(19) United States
(12) Patent Application Publication
(10) Pub. No.: US 2017/0191065 A1
(43) Pub. Date: Jul. 6, 2017

(54) COMPOSITIONS AND METHODS OF USING SAME FOR INCREASING RESISTANCE OF INFECTED MOSQUITOES

(71) Applicant: Forrest Innovations Ltd., Caesarea (IL)

(72) Inventors: Nitzan PALDI, Moshav Bar Giora (IL); Humberto BONCRISTIANI JUNIOR, Odenton, MD (US); Eyal MAORI, Rishon-LeZion (IL); Avital WEISS, Karkur (IL); Emerson Soares BERNARDES, Sao Paulo (BR)

(21) Appl. No.: 15/307,050

(22) PCT Filed: May 4, 2015
(86) PCT No.: PCT/IL2015/050466

§ 371 Date: Oct. 27, 2016

Related U.S. Application Data
(60) Provisional application No. 61/988,234, filed on May 4, 2014.
(60) Provisional application No. 61/988,246, filed on May 4, 2014.
(60) Provisional application No. 61/988,237, filed on May 4, 2014.
(60) Provisional application No. 61/988,236, filed on May 4, 2014.
(60) Provisional application No. 61/988,235, filed on May 4, 2014.

(51) Int. Cl. C12N 15/113; A01K 67/033; A01N 25/00; A01N 57/16; A01N 63/00

(52) U.S. Cl. CPC C12N 15/1138; C12N 15/1137; C12N 15/113; A01N 57/16; A01N 63/00; A01N 25/002; A01K 67/0339; C12N 2310/14; C12N 2320/32; A01K 2217/07; A01K 2227/706; A01K 2267/02

(57) ABSTRACT

A method of enhancing resistance of a mosquito to a pathogen is disclosed. The method comprising administering to a mosquito an isolated nucleic acid agent comprising a nucleic acid sequence which specifically downregulates an expression of at least one mosquito or pathogen gene wherein a product of said mosquito or pathogen gene participates in infection and/or growth of the pathogen in the mosquito.

### FIELD AND BACKGROUND OF THE INVENTION

[0001] The present invention, in some embodiments thereof, relates to isolated nucleic acid agents, and, more particularly, but not exclusively, to the use of same for increasing resistance of pathogenically infected mosquitoes.

[0002] Mosquitoes Harbor, Replicate and Transmit Human Pathogenic Viruses

[0003] Insects are among the most diverse and numerous animals on earth and populate almost every habitat. As agricultural pests, they cause severe economic losses by damaging and killing crops, but insects also pose an important threat to human and animal health. Insects are vectors for numerous pathogens, including viruses, bacteria, protozoa and nematodes. Over 500 arthropod-borne viruses (arboviruses) have been identified, among which about 100 are harmful to humans.

[0004] Arboviruses cause some of the most serious and feared human infectious diseases, such as hemorrhagic fevers and encephalitides, yet their infections of arthropod vectors, which are essential links in their transmission cycles, are almost always nonpathogenic and persistent for the life of the mosquito or tick. However, there is evidence that some parasites manipulate the behavior of their vectors to enhance pathogen transmission. For example, the malaria mosquito Anopheles gambiae, infected with transmissible sporozoite stages of the human malaria parasite Plasmodium falciparum, takes larger and more frequent blood meals than uninfected mosquitoes or those infected with non-transmissible oocyst forms. This parasite-mediated manipulation of behavior in An. gambiae is likely to facilitate parasite transmission.

[0005] The suite of factors that allow an arthropod that has encountered a pathogen to become infected and to transmit a particular pathogen once it encounters a susceptible host is defined as the arthropod's vector competence for that pathogen.

[0006] The process of vector infection begins when the pathogen enters the mosquito within a blood meal containing sufficient numbers of the pathogen to ensure some will encounter the epithelium where the blood has been deposited in the arthropod's midgut. The pathogen must be able to cross the epithelium that has been termed the midgut infection barrier (MIB). Once in the epithelium the pathogen must replicate, cross the epithelium and escape the midgut into the hemocoel in a process termed the midgut escape barrier (MEB). The pathogen then must replicate in various mosquito tissues but ultimately some sufficient quantity of the pathogen must invade the mosquito's salivary glands in a process overcoming the salivary gland infection barrier (SIB). There the pathogen replicates and ultimately must escape the salivary gland in the process described as the salivary gland escape barrier (SEB) upon subsequent blood feeding when it is injected into a susceptible animal host to complete the transmission cycle. This entire process can take several days to complete in the mosquito during a period called the extrinsic incubation period (EIP). Along the way there are a myriad of other arthropod related factors including various barriers to the pathogen that may also influence the pathogen and the arthropod's vector competence. The pathogen encounters arthropod digestive enzymes and digestive processes, intracellular processes and the arthropod's immune system.

[0007] Some Mosquitoes are Naturally Able to Restrict Virus Replication by Mounting a Strong RNAi Response to Viral Infection

[0008] Horizontal arbovirus infection of the vector is established upon blood-feeding of a susceptible female mosquito on a viremic vertebrate host. Within the insect vector, arboviruses have a complex life cycle that includes replication in the midgut, followed by systemic dissemination via the hemolymph and replication in the salivary glands. Transmission of an arbovirus to a naive vertebrate host during blood-feeding requires high viral titers in the saliva. Anatomical and immunological barriers affect the ability of the virus to reach such titers and thus to accomplish successful transmission to a naive host. Despite efficient replication, arboviruses do not cause overt pathology suggesting that the insect immune system restricts virus infection to non-pathogenic levels.

[0009] Innate immunity provides the first line of defense against microbial invaders and is defined by its rapid activation following pathogen recognition by germline-encoded receptors. These receptors recognize small molecular motifs that are conserved among classes of microbes, but are absent from the host, such as bacterial cell wall components and viral double-stranded (ds) RNA. Collectively, these motifs are called pathogen-associated molecular patterns (PAMP).

[0010] When exposed to arboviruses mosquitoes respond with anti-microbial immune pathways like Janus kinase-signal transducer and activator of transcription (JAK/STAT) and Toll pathways, immune deficiency (IMD) and RNA interference (RNAi) machinery.

[0011] RNAi is one of the molecular mechanisms for regulation of gene expression generally known as RNA silencing. It has a central role in insect antiviral immunity. It appears to require minimal transcriptional induction, although its activation might induce upregulation of other antiviral genes. Notably, the RNAi response inhibits virus replication without causing death of the infected cell.

[0012] Several lines of evidence suggest the importance of RNAi in Drosophila antiviral immunity: first, flies with mutations in known RNAi pathway components are hypersensitive to RNA virus infections and develop a dramatically increased viral load; second, many insect-pathogenic viruses encode suppressors of RNAi that counteract the immune defense of the fly; and third, siRNAs derived from the infecting virus genome (viRNAs) have been discovered and characterized in infected cells/flies.

[0013] It was previously shown that profound inhibition of alphavirus and flavivirus replication in cultured Ae. albopictus and Ae. aegypti cells and A. gambiae and Ae. aegypti mosquitoes can be triggered by transient expression or introduction into the cytoplasm of a long dsRNA derived from the virus genome sequence [Sanchez-Vargas et al. (2009) PLoS Pathog., 5(2): E1000299]. Thus mosquitoes, like flies, appear to have a mechanism for RNAi-based protection of uninfected cells from disseminating virus, suggesting that RNAi alone may be sufficient to restrict the infection and protect the organism from pathology due to arbovirus infections [Blair (2011) Future Microbiol., 6(3): 265-77].

[0014] Externally Delivered dsRNA can be Effective in Gene Regulation and Provide Phenotypic Effects in Adult and Larvae in Mosquitoes

[0015] In studies involving insects, administration (e.g. by direct injections) of in vitro-synthesized dsRNA into virtually any developmental stage can produce loss-of-function mutants [Bettencourt et al. (2002) Insect Molecular Biology 11:267-271; Amdam et al. (2003) BMC Biotechnology 3: 1; Tomoyasu and Denell (2004) Development Genes and Evolution 214: 575-578; Singh et al. (2013) J Insect Sci. 13: 69].

[0016] Studies on feeding dsRNA revealed effective gene knockdown effects in many insects, including insects of the orders Hemiptera, Coleoptera, and Lepidoptera. Feeding dsRNA to E. postvittana larvae has been shown to inhibit the expression of the carboxylesterase gene EposCXE1 in the larval midgut and also inhibit the expression of the pheromone-binding protein EposPBP1 in adult antennae [Turner et al. (2006) Insect Molecular Biology 15: 383-391]. The feeding of dsRNA also inhibited the expression of the nitrophorin 2 (NP2) gene in the salivary gland of R. prolixus, leading to a shortened coagulation time of plasma [Araujo et al. (2006) Insect Biochemistry and Molecular Biology 36: 683-693].

[0017] Direct spray of dsRNA on newly hatched Ostrinia furnalalis larvae has been reported by Wang et al. [Wang et al. (2011) PloS One 6: e18644]. The studies have shown that after spraying dsRNAs (50 ng/μL) of the DS10 and DS28 genes (i.e. chymotrypsin-like serine protease C3 (DS10) and an unknown protein (DS28), respectively) on the newly hatched larvae placed on the filter paper, the larval mortalities were around 40-50%, whereas, after dsRNAs of ten genes were sprayed on the larvae along with artificial diet, the mortalities were significantly higher to the extent of 73-100%. It was proposed through these results that in a lepidopteron insect, dsRNAs are able to penetrate the integument and could retread larval developmental ultimately leading to death [Katoch, (2013) Appl Biochem Biotechnol., 171(4):847-73].

[0018] In mosquitoes, RNAi method using chitosan/dsRNA self-assembled nanoparticles to mediate gene silencing through larval feeding in the African malaria mosquito (Anopheles gambiae) was shown [Zhang et al. (2010) Insect Molecular Biology (2010) 19(5): 683-693]. Oral-delivery of dsRNAs to larvae of the yellow fever mosquito, Ae. aegypti was also shown to be insecticidal. It was found that a relatively brief soaking in dsRNA, without the use of transfection reagents or dsRNA carriers, was sufficient to induce RNAi, and can either stunt growth or kill mosquito larvae [Singh et al. (2013), supra].

[0019] One method of introducing dsRNA to the larvae is by dehydration. Specifically, larvae are dehydrated in a NaCl solution and then rehydrated in water containing double-stranded RNA. This process is suggested to induce gene silencing in mosquito larvae. A recently published paper describes the identification of mosquito and human proteins that physically interact with Dengue virus proteins [Mairiang et al. (2013) PLoS One., 8(1):e53535]. RNAi-mediated knock down of a few of these human proteins inhibited a Dengue virus replicon suggesting that these host factors may be important for the dengue life cycle [Khadka et al. (2011) Mol Cell Proteomics, 10: M111 012187].

[0020] Similarly, host factors may be important for transmission of other viruses. For example, silencing mosquito C-type lectin (GCTL-1) impaired West Nile Virus (WNV) infection and during the mosquito blood-feeding process, WNV infection was blocked in vivo with mosquito GCTL-1 antibodies [Zelensky and Gready, (2005) FEBS J., 272(24):6179-217].

[0021] Additional background art includes:

[0022] PCT Publication No. WO 2013/026994 provides mosquitoes of the species Aedes albopictus that comprise a Wolbachia bacterium of the strain w Mel, wherein the mosquitoes have enhanced resistance to various pathogens (e.g. a viral pathogen, such as dengue virus, or a nematode pathogen, such as Dirofilaria immitis). According to WO 2013/026994 the bacterium may induce cytoplasmic incompatibility, in particular bidirectional cytoplasmic incompatibility.

[0023] U.S. Patent Application No. 20110145939 provides an isolated arthropod-adapted Wolbachia bacterium capable of modifying one or more biological properties of a mosquito host. According to U.S. 20110145939, the arthropod has improved resistance to a pathogen. Furthermore, the modified arthropod may be characterized as having a shortened life-span, a reduced ability to transmit disease, a reduced susceptibility to a pathogen, a reduced fecundity, and/or a reduced ability to feed from a host, when compared to a corresponding wild-type arthropod.

### SUMMARY OF THE INVENTION

[0024] According to an aspect of some embodiments of the present invention there is provided a method of enhancing resistance of a mosquito to a pathogen, the method comprising administering to a mosquito an isolated nucleic acid agent comprising a nucleic acid sequence which specifically downregulates an expression of at least one mosquito or pathogen gene wherein a product of the mosquito or pathogen gene participates in infection and/or growth of the pathogen in the mosquito, thereby enhancing resistance of the mosquito to the pathogen.

[0025] According to an aspect of some embodiments of the present invention there is provided a mosquito comprising an enhanced resistance to a pathogen generated according to the method of some embodiments of the invention.

[0026] According to some embodiments of the invention, the mosquito comprises a mosquito larva.

[0027] According to some embodiments of the invention, downregulation of the expression of the at least one mosquito gene in the mosquito larva renders an adult stage of the mosquito more resistant to the pathogen.

[0028] According to some embodiments of the invention, the mosquito comprises an adult mosquito.

[0029] According to some embodiments of the invention, the adult mosquito comprises a female mosquito capable of transmitting a disease to a mammalian organism.

[0030] According to some embodiments of the invention, the mosquito is of a species selected from the group consisting of Aedes aegypti, Aedes albopictus and Anopheles gambiae.

[0031] According to some embodiments of the invention, the administering comprises feeding, spraying, soaking or injecting.

[0032] According to some embodiments of the invention, the administering comprises soaking the larva with the isolated nucleic acid agent for about 12-48 hours.

[0033] According to some embodiments of the invention, the larva comprises third instar larva.

[0034] According to some embodiments of the invention, the method further comprises feeding the larva with the isolated nucleic acid agent until the larva reaches pupa stage.

[0035] According to some embodiments of the invention, the pathogen is selected from the group consisting of a virus, a nematode, a protozoa and a bacteria.

[0036] According to some embodiments of the invention, the virus is an arbovirus.

[0037] According to some embodiments of the invention, the virus is selected from the group consisting of an alphavirus, a flavivirus, a bunyavirus and an orbivirus.

[0038] According to some embodiments of the invention, the virus is selected from the group consisting of a La Crosse encephalitis virus, an Eastern equine encephalitis virus, a Japanese encephalitis virus, a Western equine encephalitis virus, a St. Louis encephalitis virus, a Tick-borne encephalitis virus, a Ross River virus, a Venezuelan equine encephalitis virus, a Chikungunya virus, a West Nile virus, a Dengue virus, a Yellow fever virus, a Bluetongue disease virus, a Sindbis Virus, a Rift Valley Fever virus, a Colorado tick fever virus, a Murray Valley encephalitis virus, an Oropouche virus and a Flock House virus.

[0039] According to some embodiments of the invention, the nematode is selected from the group consisting of a Heartworm (Dirofilaria immitis) and a Wuchereria bancrofti.

[0040] According to some embodiments of the invention, the nematode causes Heartworm Disease.

[0041] According to some embodiments of the invention, the protozoa comprises a Plasmodium.

[0042] According to some embodiments of the invention, the protozoa causes Malaria.

[0043] According to an aspect of some embodiments of the present invention there is provided a mosquito-ingestible compound comprising an isolated nucleic acid agent comprising a nucleic acid sequence which specifically downregulates an expression of at least one mosquito or pathogen gene wherein a product of the gene participates in infection and/or growth of a pathogen in a mosquito and a microorganism, algae or blood on which mosquitoes feed.

[0044] According to some embodiments of the invention, the mosquito-ingestible compound is formulated as a solid formulation.

[0045] According to some embodiments of the invention, the mosquito-ingestible compound is formulated as a liquid formulation.

[0046] According to some embodiments of the invention, the mosquito-ingestible compound is formulated in a semi-solid formulation.

[0047] According to some embodiments of the invention, the semi-solid formulation comprises an agarose.

[0048] According to some embodiments of the invention, the microorganism is selected from the group consisting of a bacteria and a water surface microorganism.

[0049] According to some embodiments of the invention, the infection is selected from the group consisting of a midgut infection and a salivary gland infection.

[0050] According to some embodiments of the invention, the pathogen gene is selected from the group consisting of a Flock House virus B2 protein (AAEL008297), La Crosse encephalitis virus gene, an Eastern equine encephalitis virus gene, a Japanese encephalitis virus gene, a Western equine encephalitis virus gene, a St. Louis encephalitis virus gene, a Tick-borne encephalitis virus gene, a Ross River virus gene, a Venezuelan equine encephalitis virus gene, a Chikungunya virus gene, a West Nile virus gene, a Dengue virus gene, a Yellow fever virus gene, a Bluetongue disease virus gene, a Sindbis Virus gene, a Rift Valley Fever virus gene, a Colorado tick fever virus gene, a Murray Valley encephalitis virus gene and an Oropouche virus gene.

[0051] According to some embodiments of the invention, the mosquito gene is selected from the group consisting of a Dicer, a C-type lectin, a Trypsin protease, a Serine protease, a Heat shock protein, a galectin, a glycosidases, and a glycosylase.

[0052] According to some embodiments of the invention, the mosquito gene is selected from the group consisting of a Dicer-2, AAEL000563 (GCTL-1), AAEL012095 (26S protease regulatory subunit), AAEL002508 (26S protease regulatory subunit 6a), AAEL010821 (60S acidic ribosomal protein P0), AAEL013583 (60S ribosomal protein L23), AAEL005524 (adenosylhomocysteinase), AAEL011129 (alcohol dehydrogenase), AAEL009948 (aldehyde dehydrogenase), AAEL003345 (argininosuccinate lyase), AAEL006577 (aspartyl-tRn/a synthetase), AAEL012237 (bhlhzip transcription factor max/bigmax), AAEL010782 (carboxypeptidase), AAEL005165 (chaperone protein dnaj), AAEL009285 (dead box atp-dependent rna helicase), AAEL000951 (elongation factor 1-beta2), AAEL012827 (endoplasmin), AAEL011742 (eukaryotic peptide chain release factor subunit), AAEL004500 (eukaryotic translation elongation factor), AAEL009101 (eukaryotic translation initiation factor 3f (eif3f)), AAEL007201 (glutamyl aminopeptidase), AAEL002145 (gonadotropin inducible transcription factor), AAEL010012 (gtp-binding protein sari), AAEL011708 (heat shock protein), AAEL014843 (heat shock protein), AAEL014845 (heat shock protein), AAEL012680 (Juvenile hormone-inducible protein, putative), AAEL003415 (lamin), AAEL009766 (lipoamide acyltransferase component of branched-chain alpha-keto acid dehydrogenase), AAEL005790 (malic enzyme), AAEL014012 (membrane-associated guanylate kinase (maguk)), AAEL010066 (microfibril-associated protein), AAEL003739 (M-type 9 protein, putative), AAEL003676 (myosin I homologue, putative), AAEL002572 (myosin regulatory light chain 2 (mlc-2)), AAEL009357 (myosin v), AAEL005567 (nucleosome assembly protein), AAEL010360 (nucleotide binding protein 2 (nbp 2)), AAEL012556 (Ofdl protein, putative), AAEL004783 (ornithine decarboxylase antizyme), AAEL010975 (paramyosin, long form), AAEL004484 (predicted protein), AAEL014396 (protein farnesyltransferase alpha subunit), AAEL012686 (ribosomal protein S12, putative), AAEL013933 (serine protease inhibitor, serpin), AAEL005037 (seryl-tRn/a synthetase), AAEL009614 (seven in absentia, putative), AAEL010585 (spermatogenesis associated factor), AAEL012348 (splicing factor 3a), AAEL011137 (succinyl-coa:3-ketoacid-coenzyme a transferase), AAEL002565 (titin), AAEL003104 (tripartite motif protein trim2,3), AAEL011988 (tRNA selenocysteine associated protein (secp43)), AAEL006572 (troponin C), AAEL003815 (zinc finger protein) and AAEL009182 (zinc finger protein, putative).

[0053] According to some embodiments of the invention, the mosquito gene is a Dicer-2.

[0054] According to some embodiments of the invention, the pathogen gene is a Flock House virus B2 protein (AAEL008297).

[0055] According to an aspect of some embodiments of the present invention there is provided an isolated nucleic acid agent comprising a polynucleotide expressing a nucleic acid sequence which specifically downregulates an expression of at least one mosquito gene selected from the group consisting of Dicer-2, AAEL000563 (GCTL-1), AAEL012095 (26S protease regulatory subunit), AAEL002508 (26S protease regulatory subunit 6a), AAEL010821 (60S acidic ribosomal protein P0), AAEL013583 (60S ribosomal protein L23), AAEL005524 (adenosylhomocysteinase), AAEL011129 (alcohol dehydrogenase), AAEL009948 (aldehyde dehydrogenase), AAEL003345 (argininosuccinate lyase), AAEL006577 (aspartyl-tRn/a synthetase), AAEL012237 (bhlhzip transcription factor max/bigmax), AAEL010782 (carboxypeptidase), AAEL005165 (chaperone protein dnaj), AAEL009285 (dead box atp-dependent ma helicase), AAEL000951 (elongation factor 1-beta2), AAEL012827 (endoplasmin), AAEL011742 (eukaryotic peptide chain release factor subunit), AAEL004500 (eukaryotic translation elongation factor), AAEL009101 (eukaryotic translation initiation factor 3f (eif3f)), AAEL007201 (glutamyl aminopeptidase), AAEL002145 (gonadotropin inducible transcription factor), AAEL010012 (gtp-binding protein sari), AAEL011708 (heat shock protein), AAEL014843 (heat shock protein), AAEL014845 (heat shock protein), AAEL012680 (Juvenile hormone-inducible protein, putative), AAEL003415 (lamin), AAEL009766 (lipoamide acyltransferase component of branched-chain alpha-keto acid dehydrogenase), AAEL005790 (malic enzyme), AAEL014012 (membrane-associated guanylate kinase (maguk)), AAEL010066 (microfibril-associated protein), AAEL003739 (M-type 9 protein, putative), AAEL003676 (myosin I homologue, putative), AAEL002572 (myosin regulatory light chain 2 (mlc-2)), AAEL009357 (myosin v), AAEL005567 (nucleosome assembly protein), AAEL010360 (nucleotide binding protein 2 (nbp 2)), AAEL012556 (Ofdl protein, putative), AAEL004783 (ornithine decarboxylase antizyme), AAEL010975 (paramyosin, long form), AAEL004484 (predicted protein), AAEL014396 (protein farnesyltransferase alpha subunit), AAEL012686 (ribosomal protein S12, putative), AAEL013933 (serine protease inhibitor, serpin), AAEL005037 (seryl-tRn/a synthetase), AAEL009614 (seven in absentia, putative), AAEL010585 (spermatogenesis associated factor), AAEL012348 (splicing factor 3a), AAEL011137 (succinyl-coa:3-ketoacid-coenzyme a transferase), AAEL002565 (titin), AAEL003104 (tripartite motif protein trim2,3), AAEL011988 (tRNA selenocysteine associated protein (secp43)), AAEL006572 (troponin C), AAEL003815 (zinc finger protein) and AAEL009182 (zinc finger protein, putative).

[0056] According to an aspect of some embodiments of the present invention there is provided an isolated nucleic acid agent comprising a polynucleotide expressing a nucleic acid sequence which specifically downregulates an expression of at least one mosquito gene comprising Dicer-2.

[0057] According to some embodiments of the invention, the nucleic acid agent is as set forth in SEQ ID NO: 1220.

[0058] According to an aspect of some embodiments of the present invention there is provided an isolated nucleic acid agent comprising a polynucleotide expressing a nucleic acid sequence which specifically downregulates an expression of at least one pathogen gene comprising Flock House virus B2 protein (AAEL008297).

[0059] According to some embodiments of the invention, the nucleic acid agent is as set forth in SEQ ID NO: 1219.

[0060] According to an aspect of some embodiments of the present invention there is provided a nucleic acid construct comprising a nucleic acid sequence encoding the isolated nucleic acid agent of some embodiments of the invention.

[0061] According to an aspect of some embodiments of the present invention there is provided a cell comprising the isolated nucleic acid agent or the nucleic acid construct of some embodiments of the invention.

[0062] According to some embodiments of the invention, the cell of some embodiments of the invention is selected from the group consisting of a bacterial cell and a cell of a water surface microorganism.

[0063] According to an aspect of some embodiments of the present invention there is provided a mosquito-ingestible compound comprising the cell of some embodiments of the invention.

[0064] According to some embodiments of the invention, the nucleic acid agent is a dsRNA.

[0065] According to some embodiments of the invention, the dsRNA comprises a carrier.

[0066] According to some embodiments of the invention, the carrier comprises a polyethyleneimine (PEI).

[0067] According to some embodiments of the invention, the dsRNA is effected at a dose of 0.001-1 μg/μL for soaking or at a dose of 1 pg to 10 μg/larvae for feeding.

[0068] According to some embodiments of the invention, the dsRNA is selected from the group consisting of SEQ ID NOs: 1211-1220.

[0069] According to some embodiments of the invention, the dsRNA is selected from the group consisting of siRNA, shRNA and miRNA.

[0070] According to some embodiments of the invention, the nucleic acid sequence is greater than 15 base pairs in length.

[0071] According to some embodiments of the invention, the nucleic acid sequence is 19 to 25 base pairs in length.

[0072] According to some embodiments of the invention, the nucleic acid sequence is 30-100 base pairs in length.

[0073] According to some embodiments of the invention, the nucleic acid sequence is 100-800 base pairs in length.

[0074] Unless otherwise defined, all technical and/or scientific terms used herein have the same meaning as commonly understood by one of ordinary skill in the art to which the invention pertains. Although methods and materials similar or equivalent to those described herein can be used in the practice or testing of embodiments of the invention, exemplary methods and/or materials are described below. In case of conflict, the patent specification, including definitions, will control. In addition, the materials, methods, and examples are illustrative only and are not intended to be necessarily limiting.

### BRIEF DESCRIPTION OF THE SEVERAL VIEWS OF THE DRAWINGS

[0075] Some embodiments of the invention are herein described, by way of example only, with reference to the accompanying drawings. With specific reference now to the drawings in detail, it is stressed that the particulars shown are by way of example and for purposes of illustrative discussion of embodiments of the invention. In this regard, the description taken with the drawings makes apparent to those skilled in the art how embodiments of the invention may be practiced.

[0076] In the drawings:

[0077] FIGS. 1A-D are schematic illustrations of mosquito immune signaling and RNAi pathways. FIG. 1A, in the Toll pathway signaling, detection of pathogen-derived ligands by pattern recognition receptors (PRRs) triggers signaling through the adaptor protein MyD88, resulting in degradation of Cactus, which in turn leads to activation of transcription of Toll-pathway regulated genes. FIG. 1B, the IMD pathway is activated by ligand binding to PGRP-LCs and -LEs. This binding triggers signaling through IMD and various caspases and kinases, leading to a functional split in the pathway. Both pathway branches lead to an activated form of Re12 which translocates to the nucleus and activate IMD-regulated transcription. FIG. 1C, the JAK-STAT pathway is triggered by Unpaired (Upd) binding to the receptor Dome, activating the receptor-associated Hop Janus kinases, which results in dimerization of phosphorylated-STAT and its translocation to the nucleus to activate JAK-STAT-regulated transcription. FIG. 1D, the exogenous siRNA pathway is activated when virus-derived long dsRNA is recognized, cleaved by Dcr2 into siRNAs and loaded onto the multi-protein RISC complex, where it is degradated. Sensing of viral dsRNA by Dcr2 also activates TRAF, leading to Re12 cleavage and activation via a distinct pathway. Re12 activates transcription of Vago, a secreted peptide which subsequently triggers JAK-STAT pathway signaling. Incorporated from Sim et al., Viruses 2014, 6, 4479-4504.

[0078] FIG. 2 is a flowchart illustration depicting introduction of dsRNA into mosquito larvae. In short, third instar larvae were treated (in groups of 100 larvae) in a final volume of 3 mL of dsRNA solution in autoclaved water (0.5 μg/μL). The control group was kept in 3 ml sterile water only. After soaking in the dsRNA solutions for 24 hrs at 27° C., the larvae were transferred into a new container (300 larvae/1500 mL of chlorine-free tap water), and were provided with both agarose cubes containing 300 μg of dsRNA once a day (for a total of four days) and 6 mg/100 mL lab dog/cat diet (Purina Mills) suspended in water. As pupae developed, they were transferred to individual vials to await eclosion and sex sorting. For bioassays purpose only females up to five days old were used.

[0079] FIGS. 3A-B are graphs depicting a comparison of two methods of in vivo infection with Flock house virus. FIG. 3A, supernatants from FHV-infected S2-Drosophila cells were diluted with defibrinated sheep blood and exposed to adult females of Aedes aegypti through a pork gut membrane on a water-jacketed membrane feeder for 20 minutes. Control mosquitoes were fed uninfected blood. At the indicated timepoints postinfection, 5-7 individual mosquitoes were collected and analyzed for FHV viral load by qPCR. FIG. 3B, supernatants from FHV-infected S2-Drosophila cells were diluted (v/v) in a 10%-solution of sugar, and the mixture were adsorved in filter paper. The filter were exposed to Ae. aegypti females for 20 minutes. Control mosquitoes were exposed to sugar only. The viral loads were determined as described in FIG. 3A. Of note, FIGS. 5A-B show the typical profile of FHV infection in mosquitoes.

[0080] FIG. 4 is a graph depicting the relative expression of MyD88 gene in Ae. aegypti mosquitoes infected with Flock house virus. Females A. aegypti mosquitoes were infected with a mixture of defibrinated sheep blood and supernatants from FHV-infected S2-Drosophila for 20 minutes. Control mosquitoes were fed with uninfected blood. At the indicated timepoints postinfection, 5-7 individual mosquitoes were collected and analyzed for the mRNA levels of MyD88 by qPCR. Data represents the mean plus standard deviation of the 5-7 mosquitoes analyzed individually. *p<0.05; ***p<0.001; ****p<0.00001; in Sidak's multiple comparisons test.

[0081] FIGS. 5A-C are graphs depicting that feeding B2 dsRNA to larvae affects the susceptibility of adult Ae. aegypti mosquitoes to Flock house virus infection. Larvae from Ae. aegypti Rockefeller strain (3^{rd} instar) were soaked for 24 hours in 0.5 μg/mL of B2 dsRNA or only in water. After soaking in the dsRNA solutions for 24 hr at 27° C., the larvae were transferred into a new container (300 larvae/1500 mL of chlorine-free tap water), and were provided with agarose cubes containing 300 μg of dsRNA once a day (for a total of four days) and then reared until adult stage. Unfed three to five-day-old females were exposed to a mixture of defibrinated sheep blood and supernatants from FHV-infected S2-Drosophila for 20 minutes. At two hours (FIG. 5A), 7 days (FIG. 5B) and 15 days (FIG. 5C) after the exposure of mosquitoes to FHV, individual mosquitoes were collected and analyzed for viral loads by qPCR, using primers specifically designed for FHV RNA-1, and normalized by the mosquito endogenous control tubulin. The dots and squares represent individual mosquitoes. Data is the mean of three independent experiments. ***p<0.0001 (Student t test).

[0082] FIGS. 6A-C are graphs depicting that feeding dicer-2 dsRNA to larvae affects the susceptibility of adult A. aegypti mosquitoes to Flock house virus infection. Larvae from Ae. aegypti Rockefeller strain (3^{rd} instar) were soaked for 24 hours in 0.5 μg/μL of dicer-2 dsRNA or only in water. After soaking in the dsRNA solutions for 24 hrs at 27° C., the larvae were transferred into a new container (300 larvae/1500 mL of chlorine-free tap water), and were provided with both agarose cubes containing 300 μg of dsRNA once a day (for a total of four days) and then reared until adult stage. Unfed three to five-day-old females were exposed to a mixture of defibrinated sheep blood and supernatants from FHV-infected S2-Drosophila for 20 minutes. At two hours (FIG. 6A), 7 days (FIG. 6B) and 15 days (FIG. 6C) after the exposure of mosquitoes to FHV, individual mosquitoes were collected and analyzed for viral loads by qPCR, using primers specifically designed for FHV RNA-1, and normalized by the mosquito endogenous control tubulin. The dots and squares represent individual mosquitoes. Data is the mean of three independent experiments. *p<0.01 (Student t test).

[0083] FIGS. 7A-C are graphs illustrating that feeding dicer-2 dsRNA to larvae decreased Dicer-2 mRNA expression levels in mosquito adults 7 and 15 days post infection. The results presented represent the average from 3 experiments performed with 8-12 individual mosquitoes per group.

[0084] FIGS. 8A-B are graphs depicting that feeding B2 and Dicer-2 dsRNA to larvae modified the expression profile of MyD88 on FHV-infected Ae. aegypti mosquitoes. Larvae from Ae. aegypti Rockefeller strain (3r^{d} instar) were soaked for 24 hours in 0.5 μg/mL of B2, Dicer-2 dsRNA or water only. After soaking in the dsRNA solutions for 24 hr at 27° C., the larvae were transferred into a new container (300 larvae/1500 mL of chlorine-free tap water), and were provided with both agarose cubes containing 300 μg of dsRNA once a day (for a total of four days) and then reared until adult stage. Unfed three to five-day-old females were exposed to a mixture of defibrinated sheep blood and supernatants from FHV-infected S2-Drosophila for 20 minutes. At two hours after the exposure of mosquitoes to FHV, individual mosquitoes were collected and analyzed for MYD88 mRNA expression (FIG. 8A for B2 dsRNA-treated mosquitoes) and (FIG. 8B for Dicer-2 dsRNA-treated mosquitoes) by qPCR. Data represent the mean and standard deviation of 5 individual mosquitoes per group. *p<0.01 (Student t test).

### DESCRIPTION OF SPECIFIC EMBODIMENTS OF THE INVENTION

[0085] The present invention, in some embodiments thereof, relates to isolated nucleic acid agents, and, more particularly, but not exclusively, to the use of same for increasing resistance of pathogenically infected mosquitoes.

[0086] The principles and operation of the present invention may be better understood with reference to the drawings and accompanying descriptions.

[0087] Before explaining at least one embodiment of the invention in detail, it is to be understood that the invention is not necessarily limited in its application to the details set forth in the following description or exemplified by the Examples. The invention is capable of other embodiments or of being practiced or carried out in various ways. Also, it is to be understood that the phraseology and terminology employed herein is for the purpose of description and should not be regarded as limiting.

[0088] It is understood that any Sequence Identification Number (SEQ ID NO) disclosed in the instant application can refer to either a DNA sequence or a RNA sequence, depending on the context where that SEQ ID NO is mentioned, even if that SEQ ID NO is expressed only in a DNA sequence format or a RNA sequence format. For example, SEQ ID NO: 1220 is expressed in a DNA sequence format (e.g., reciting T for thymine), but it can refer to either a DNA sequence that corresponds to an endo 1,4 beta gluconase nucleic acid sequence, or the RNA sequence of an RNA molecule nucleic acid sequence. Similarly, though some sequences are expressed in a RNA sequence format (e.g., reciting U for uracil), depending on the actual type of molecule being described, it can refer to either the sequence of a RNA molecule comprising a dsRNA, or the sequence of a DNA molecule that corresponds to the RNA sequence shown. In any event, both DNA and RNA molecules having the sequences disclosed with any substitutes are envisioned.

[0089] Mosquitoes pose an important threat to human and animal health. Mosquitoes are vectors for numerous pathogens, including viruses, bacteria, protozoa and nematodes. In fact over 500 arthropod-borne viruses (arboviruses) have been identified, among which approximately 100 are harmful to humans. While mosquitoes transmit these harmful pathogens, arboviruses do not cause overt pathology in mosquitoes suggesting that the insect's immune system restricts virus infection to non-pathogenic levels, thus allowing the pathogen to replicate in the mosquito and be transmitted to humans and animals.

[0090] While reducing the present invention to practice, the present inventors have uncovered that feeding dsRNA to mosquitoes, wherein the dsRNA specifically downregulates an expression of a mosquito gene, wherein a product of the mosquito gene participates in infection and/or growth of the pathogen in the mosquito, provides mosquitoes more resistant to the pathogen and infection therewith. Mosquitoes with enhanced resistance to a pathogen can efficiently inhibit the transmission of harmful pathogens.

[0091] Specifically, the present inventors have shown that soaking mosquito larvae in dsRNA targeting specific genes (e.g. virus B2 protein and Dicer-2) for 24 hours followed by feeding the larvae with agarose cubes containing dsRNA for four more days (until they reach pupa stage) resulted in lower viral load in adult mosquitoes (FIGS. 5A-C and 6A-C, Tables 5 and 6).

[0092] The present inventors postulate that downregulating genes which are involved in pathogenic infection and/or growth in a mosquito, e.g. C-type lectins, Trypsin proteases, Serine proteases and Heat shock proteins, can be used for inhibiting infection and/or growth of pathogens in mosquitoes and consequently for inhibiting transmission of the pathogens to humans and animals.

[0093] Thus, according to one aspect of the present invention there is provided a method of enhancing resistance of a mosquito to a pathogen, the method comprising administering to a mosquito an isolated nucleic acid agent comprising a nucleic acid sequence which specifically downregulates an expression of at least one mosquito or pathogen gene wherein a product of the mosquito or pathogen gene participates in infection and/or growth of the pathogen in the mosquito, thereby enhancing resistance of the mosquito to the pathogen.

[0094] As used herein the term “enhancing resistance of a mosquito” refers to managing the population of mosquitoes to prevent them from being infected with and/or transmitting a pathogen. Accordingly, enhancing resistance of mosquitoes to a pathogen reduces their damage to human health, economies, and enjoyment.

[0095] The term “mosquito” or “mosquitoes” as used herein refers to an insect of the family Culicidae. The mosquito of the invention may include an adult mosquito, a mosquito larva, a pupa or an egg thereof.

[0096] An adult mosquito is defined as any of slender, long-legged insect that has long proboscis and scales on most parts of the body. The adult females of many species of mosquitoes are blood-eating pests. In feeding on blood, adult female mosquitoes transmit harmful diseases to humans and other mammals.

[0097] A mosquito larvae is defined as any of an aquatic insect which does not comprise legs, comprises a distinct head bearing mouth brushes and antennae, a bulbous thorax that is wider than the head and abdomen, a posterior anal papillae and either a pair of respiratory openings (in the subfamily Anophelinae) or an elongate siphon (in the subfamily Culicinae) borne near the end of the abdomen.

[0098] Typically, a mosquito's life cycle includes four separate and distinct stages: egg, larva, pupa, and adult. Thus, a mosquito's life cycle begins when eggs are laid on a water surface (e.g. Culex, Culiseta, and Anopheles species) or on damp soil that is flooded by water (e.g. Aedes species). Most eggs hatch into larvae within 48 hours. The larvae live in the water feeding on microorganisms and organic matter and come to the surface to breathe. They shed their skin four times growing larger after each molting and on the fourth molt the larva changes into a pupa. The pupal stage is a resting, non-feeding stage of about two days. At this time the mosquito turns into an adult. When development is complete, the pupal skin splits and the mosquito emerges as an adult.

[0099] According to one embodiment, the mosquitoes are of the sub-families Anophelinae and Culicinae. According to one embodiment, the mosquitoes are of the genus Culex, Culiseta, Anopheles and Aedes. Exemplary mosquitoes include, but are not limited to, Aedes species e.g. Aedes aegypti, Aedes albopictus, Aedes polynesiensis, Aedes australis, Aedes cantator, Aedes cinereus, Aedes rusticus, Aedes vexans; Anopheles species e.g. Anopheles gambiae, Anopheles freeborni,Anopheles arabiensis, Anopheles funestus, Anopheles gambiae Anopheles moucheti, Anopheles balabacensis, Anopheles baimaii, Anopheles culicifacies, Anopheles dirus, Anopheles latens, Anopheles leucosphyrus, Anopheles maculatus, Anopheles minimus, Anopheles fluviatilis s.l., Anopheles sundaicus Anopheles superpictus, Anopheles farauti, Anopheles punctulatus, Anopheles sergentii, Anopheles stephensi, Anopheles sinensis, Anopheles atroparvus, Anopheles pseudopunctipennis, Anopheles bellator and Anopheles cruzii; Culex species e.g. C. annulirostris, C. antennatus, C. jenseni, C. pipiens, C. pusillus, C. quinquefasciatus, C. rajah, C. restuans, C. salinarius, C. tarsalis, C. territans, C. theileri and C. tritaeniorhynchus; and Culiseta species e.g. Culiseta incidens, Culiseta impatiens, Culiseta inornata and Culiseta particeps.

[0100] According to one embodiment, the mosquitoes are capable of transmitting disease-causing pathogens. The pathogens transmitted by mosquitoes include viruses, protozoa, worms and bacteria.

[0101] Non-limiting examples of viral pathogens which may be transmitted by mosquitoes include the arbovirus pathogens such as Alphaviruses pathogens (e.g. Eastern Equine encephalitis virus, Western Equine encephalitis virus, Venezuelan Equine encephalitis virus, Ross River virus, Sindbis Virus and Chikungunya virus), Flavivirus pathogens (e.g. Japanese Encephalitis virus, Murray Valley Encephalitis virus, West Nile Fever virus, Yellow Fever virus, Dengue Fever virus, St. Louis encephalitis virus, and Tick-borne encephalitis virus), Bunyavirus pathogens (e.g. La Crosse Encephalitis virus, Rift Valley Fever virus, and Colorado Tick Fever virus), Orthobunyavirus pathogens (e.g. Oropouche virus) and Orbivirus (e.g. Bluetongue disease virus).

[0102] Non-limiting examples of worm pathogens which may be transmitted by mosquitoes include nematodes e.g. filarial nematodes such as Wuchereria bancrofti, Brugia malayi, Brugia pahangi, Brugia timori and heartworm (Dirofilaria immitis).

[0103] Non-limiting examples of bacterial pathogens which may be transmitted by mosquitoes include gram negative and gram positive bacteria including Yersinia pestis, Borellia spp, Rickettsia spp, and Erwinia carotovora.

[0104] Non-limiting examples of protozoa pathogens which may be transmitted by mosquitoes include the Malaria parasite of the genus Plasmodium e.g. Plasmodium falciparum, Plasmodium vivax, Plasmodium ovale, Plasmodium malariae, Plasmodium berghei, Plasmodium gallinaceum, and Plasmodium knowlesi.

[0105] The mosquito of the invention may be a pathogenically infected mosquito, that is, a mosquito carrying a disease-causing pathogen. Typically the mosquito is infected with the pathogen (e.g. via a blood meal) and acts as a vector for the pathogen, enabling replication of the pathogen (e.g. in the mid gut and salivary glands of the mosquito) and transmission thereof into a host.

[0106] It will be appreciated that the mosquito of the invention may be a healthy mosquito not infected or not yet infected by a pathogen.

[0107] A “host” may be any animal upon which the mosquito feeds and/or to which a mosquito is capable of transmitting a disease-causing pathogen. Non-limiting examples of hosts are mammals such as humans, domesticated pets (e.g. dogs and cats), wild animals (e.g. monkeys, rodents and wild cats), livestock animals (e.g. sheep, pigs, cattle, and horses), avians such as poultry (e.g. chickens, turkeys and ducks) and other animals such as crustaceans (e.g. prawns and lobsters), snakes and turtles.

[0108] According to one embodiment, the mosquito comprises a female mosquito being capable of transmitting a disease to a mammalian organism (e.g. an animal or human). According to another embodiment the female mosquito is pathogenically infected.

[0109] Non-limiting examples of mosquitoes and the pathogens which they transmit include species of the genus Anopheles (e.g. Anopheles gambiae) which transmit malaria parasites as well as microfilariae, arboviruses (including encephalitis viruses) and some species also transmit Wuchereria bancrofti; species of the genus Culex (e.g. C. pipiens) which transmit West Nile virus, filariasis, Japanese encephalitis, St. Louis encephalitis and avian malaria; species of the genus Aedes (e.g. Aedes aegypti, Aedes albopictus and Aedes polynesiensis) which transmit nematode worm pathogens (e.g. heartworm (Dirofilaria immitis)), arbovirus pathogens such as Alphaviruses pathogens that cause diseases such as Eastern Equine encephalitis, Western Equine encephalitis, Venezuelan equine encephalitis and Chikungunya disease; Flavivirus pathogens that cause diseases such as Japanese encephalitis, Murray Valley Encephalitis, West Nile fever, Yellow fever, Dengue fever, and Bunyavirus pathogens that cause diseases such as LaCrosse encephalitis, Rift Valley Fever, and Colorado tick fever.

[0110] According to one embodiment, pathogens that may be transmitted by Aedes aegypti are Dengue virus, Yellow fever virus, Chikungunya virus and heartworm (Dirofilaria immitis).

[0111] According to one embodiment, pathogens that may be transmitted by Aedes albopictus include West Nile Virus, Yellow Fever virus, St. Louis Encephalitis virus, Dengue virus, and Chikungunya fever virus.

[0112] According to one embodiment, pathogens that may be transmitted by Anopheles gambiae include malaria parasites of the genus Plasmodium such as, but not limited to, Plasmodium falciparum, Plasmodium vivax, Plasmodium ovale, Plasmodium malariae, Plasmodium berghei, Plasmodium gallinaceum, and Plasmodium knowlesi.

[0113] In another embodiment, the invention provides a method of enhancing resistance of a mosquito to a pathogen.

[0114] It will be appreciated that the mosquito of the invention is less likely to transmit a pathogen compared to its wild-type counterpart, since the mosquito lacks a gene product essential for the pathogen (e.g. virus, protozoa, bacteria, nematode) infection and/or growth.

[0115] In one embodiment, the mosquito has an enhanced resistance to a pathogen.

[0116] As used herein, the term “enhanced resistance” refers to a mosquito which is more resistant to a pathogen by at least 10%, 20%, 30%, 40%, 50%, or more, say 60%, 70%, 80%, 90% or more even 100% as compared to wild type (i.e. control) mosquito not treated by the agents of the invention.

[0117] Enhancing resistance of a mosquito to a pathogen is achieved by downregulating an expression of at least one mosquito gene or a gene of the pathogen (the latter is further described hereinbelow).

[0118] As used herein, the term “mosquito gene” refers to an endogenous gene of the mosquito (naturally occurring within the mosquito) whose product is involved in pathogen viability, infection, replication, growth or transmission. According to one embodiment, the mosquito gene is essential for the pathogen's survival.

[0119] As used herein, the term “pathogen gene” refers to an endogenous gene of the pathogen (naturally occurring within the pathogen) whose product is involved in pathogen viability, infection, replication, growth or transmission (e.g. within a mosquito).

[0120] As used herein, the term “endogenous” refers to a gene originating from within an organism, e.g. mosquito or pathogen.

[0121] As used herein, the phrase “gene product” refers to an RNA molecule or a protein.

[0122] According to one embodiment, the mosquito gene product is one which is essential for the pathogen's viability, infection, replication, growth or transmission upon encounter with the mosquito. Downregulation of such a gene product would typically result in reduced pathogenicity, reduced infection and/or reduced pathogen titers within the mosquito.

[0123] Typically, the process of mosquito infection begins when the pathogen enters the mosquito within a blood meal containing sufficient numbers of the pathogen to ensure some will encounter the epithelium where the blood has been deposited in the arthropod's midgut. The pathogen must be able to cross the epithelium that has been termed the midgut infection barrier (MIB). Once in the epithelium, the pathogen replicates, crosses the epithelium and escapes the midgut into the hemocoel in a process termed the midgut escape barrier (MEB). The pathogen then replicates in various mosquito tissues but ultimately some sufficient quantity of the pathogen invades the mosquito's salivary glands in a process overcoming the salivary gland infection barrier (SIB). In the salivary glands, the pathogen replicates and ultimately escapes the salivary glands in the process described as the salivary gland escape barrier (SEB) upon subsequent blood feeding when it is injected into a susceptible host to complete the transmission cycle. This entire process (i.e. the extrinsic incubation period (EIP)) can take several days to complete in the mosquito. Other factors influence the pathogen's infectivity and replication, including the mosquito's digestive enzymes, intracellular processes and immune system.

[0124] Along the process of pathogen infection, various mosquito proteins assist the pathogen in replication, infection, growth, transmission, etc. For example, mosquito C-type lectin (GCTL-1), a group of carbohydrate-binding proteins which are highly expressed by mosquito immune cells (e.g. in monocytes, macrophages, and dendritic cells) play a role in pathogen infection (e.g. viral infection). According to another example, midgut trypsins play a central role during blood digestion in mosquitoes. In mosquitoes, synthesis of trypsin in early and late trypsin de novo occurs upon blood feeding. Early trypsin activity typically peaks 3 hours after blood feeding and then drops within a few hours. Early trypsin activity regulates late trypsin mRNA synthesis, which reaches a maximum level approximately 24 hours after feeding, followed by an increase in late trypsin protein levels. Late trypsin accounts for most of the endoproteolytic activity during blood digestion in the mosquito's midgut. Midgut trypsin activity facilitates pathogen infection in mosquitoes through a nutritional effect and probably also by direct proteolytic processing of the pathogen (e.g. viral surface). Other mosquito proteins physically interact with pathogen proteins and facilitate their pathogenesis (see exemplary list in Tables 1A and 1B below).

[0125] According to one embodiment, the infection is a midgut infection and a salivary gland infection.

[0126] Exemplary mosquito gene products that may be downregulated according to this aspect of the present invention include, but are not limited to, C-type lectins, Trypsin proteases, Serine proteases, Heat shock proteins, Galectins, Glycosidases, and Glycosylases.

[0127] Tables 1A and 1B, below, provides a partial list of mosquito genes associated with pathogen resistance, which can be potential targets for reduction in expression by introducing the nucleic acid agent of the invention.

[0128] The present teachings contemplate the targeting of homologs and orthologs according to the selected mosquito species.

[0129] Homologous sequences include both orthologous and paralogous sequences. The term “paralogous” relates to gene-duplications within the genome of a species leading to paralogous genes. The term “orthologous” relates to homologous genes in different organisms due to ancestral relationship. Thus, orthologs are evolutionary counterparts derived from a single ancestral gene in the last common ancestor of given two species (Koonin EV and Galperin MY (Sequence-Evolution-Function: Computational Approaches in Comparative Genomics. Boston: Kluwer Academic; 2003. Chapter 2, Evolutionary Concept in Genetics and Genomics. Available from: ncbi(dot)nlm(dot)nih(dot)gov/books/NBK20255) and therefore have great likelihood of having the same function. As such, orthologs usually play a similar role to that in the original species in another species.

[0130] Homology (e.g., percent homology, sequence identity+sequence similarity) can be determined using any homology comparison software computing a pairwise sequence alignment.

[0131] As used herein, “sequence identity” or “identity” in the context of two nucleic acid or polypeptide sequences includes reference to the residues in the two sequences which are the same when aligned. When percentage of sequence identity is used in reference to proteins it is recognized that residue positions which are not identical often differ by conservative amino acid substitutions, where amino acid residues are substituted for other amino acid residues with similar chemical properties (e.g. charge or hydrophobicity) and therefore do not change the functional properties of the molecule. Where sequences differ in conservative substitutions, the percent sequence identity may be adjusted upwards to correct for the conservative nature of the substitution. Sequences which differ by such conservative substitutions are to have “sequence similarity” or “similarity”. Means for making this adjustment are well-known to those of skill in the art. Typically this involves scoring a conservative substitution as a partial rather than a full mismatch, thereby increasing the percentage sequence identity. Thus, for example, where an identical amino acid is given a score of 1 and a non-conservative substitution is given a score of zero, a conservative substitution is given a score between zero and 1. The scoring of conservative substitutions is calculated, e.g., according to the algorithm of Henikoff S and Henikoff J G. [Amino acid substitution matrices from protein blocks. Proc. Natl. Acad. Sci. U.S.A. 1992, 89(22): 10915-9].

[0132] According to a specific embodiment, the homolog sequences are at least 60%, 65%, 70%, 75%, 80%, 85%, 90%, 95% or even identical to the sequences (nucleic acid or amino acid sequences) provided hereinbelow.

TABLE 1A
List of mosquito target genes

| Aedes aegypti | Culex | Anopheles gambiae | |
|---|---|---|---|
| Access. No. | Access. No. | Access No. | Name of transcript |
| AAEL012095 | CPIJ011552 | AGAP003216 | 26S protease regulatory subunit |
| (SEQ ID NO: 1) | (SEQ ID NO: 55) | (SEQ ID NO: 106) | |
| AAEL002508 | CPIJ016407 | AGAP000616 | 26S protease regulatory subunit 6a |
| (SEQ ID NO: 2) | (SEQ ID NO: 56) | (SEQ ID NO: 107) | |
| AAEL010821 | | | 60S acidic ribosomal protein P0 |
| (SEQ ID NO: 3) | | | |
| AAEL013583 | CPIJ011325 | | 60S ribosomal protein L23 |
| (SEQ ID NO: 4) | (SEQ ID NO: 57) | | |
| AAEL005524 | CPIJ011531 | AGAP000792 | adenosylhomocysteinase |
| (SEQ ID NO: 5) | (SEQ ID NO: 58) | (SEQ ID NO: 108) | |
| AAEL011129 | | | alcohol dehydrogenase |
| (SEQ ID NO: 6) | | | |
| AAEL009948 | CPIJ014581 | AGAP009944 | aldehyde dehydrogenase |
| (SEQ ID NO: 7) | (SEQ ID NO: 59) | (SEQ ID NO: 109) | |
| AAEL003345 | CPIJ004883 | AGAP008141 | argininosuccinate lyase |
| (SEQ ID NO: 8) | (SEQ ID NO: 60) | (SEQ ID NO: 110) | |
| AAEL006577 | CPIJ015476 | AGAP002969 | aspartyl-tRn/a synthetase |
| (SEQ ID NO: 9) | (SEQ ID NO: 61) | (SEQ ID NO: 111) | |
| AAEL012237 | CPIJ003297 | AGAP003177 | bhlhzip transcription factor max/bigmax |
| (SEQ ID NO: 10) | (SEQ ID NO: 62) | (SEQ ID NO: 112) | |
| AAEL010782 | CPIJ011997 | AGAP009593 | carboxypeptidase |
| (SEQ ID NO: 11) | (SEQ ID NO: 63), | (SEQ ID NO: 113) | |
| | CPIJ011998 | | |
| | (SEQ ID NO: 64) | | |
| AAEL005165 | CPIJ003204 | AGAP005981 | chaperone protein dnaj |
| (SEQ ID NO: 12) | (SEQ ID NO: 65) | (SEQ ID NO: 114) | |
| AAEL000563 | | | C-Type Lectin (CTL) - CTLMA15 |
| (SEQ ID NO: 13) | | | |
| AAEL009285 | CPIJ008599 | AGAP007511 | dead box atp-dependent rna helicase |
| (SEQ ID NO: 14) | (SEQ ID NO: 66) | (SEQ ID NO: 115) | |
| AAEL000951 | CPIJ006022 | AGAP010613 | elongation factor 1-beta2 |
| (SEQ ID NO: 15) | (SEQ ID NO: 67) | (SEQ ID NO: 116) | |
| AAEL012827 | CPIJ002384 | AGAP001424 | endoplasmin |
| (SEQ ID NO: 16) | (SEQ ID NO: 68) | (SEQ ID NO: 117) | |
| AAEL011742 | CPIJ006149 | AGAP010310 | eukaryotic peptide chain release factor |
| (SEQ ID NO: 17) | (SEQ ID NO: 69) | (SEQ ID NO: 118) | subunit |
| AAEL004500 | CPIJ001132 | AGAP009440 | eukaryotic translation elongation factor |
| (SEQ ID NO: 18) | (SEQ ID NO: 70) | (SEQ ID NO: 119), | |
| | | AGAP009441 | |
| | | (SEQ ID NO: 120) | |
| AAEL009101 | CPIJ012970 | AGAP002935 | eukaryotic translation initiation factor |
| (SEQ ID NO: 19) | (SEQ ID NO: 71) | (SEQ ID NO: 121) | 3f, eifif |
| AAEL007201 | CPIJ011103 | AGAP003077 | glutamyl aminopeptidase |
| (SEQ ID NO: 20) | (SEQ ID NO: 72) | (SEQ ID NO: 122) | |
| AAEL002145 | CPIJ007394 | AGAP003111 | gonadotropin inducible transcription |
| (SEQ ID NO: 21) | (SEQ ID NO: 73) | (SEQ ID NO: 123) | factor |
| AAEL010012 | CPIJ012024 | AGAP004098 | gtp-binding protein sar1 |
| (SEQ ID NO: 22) | (SEQ ID NO: 74) | (SEQ ID NO: 124) | |
| AAEL011708 | CPIJ011246 | AGAP006958 | heat shock protein |
| (SEQ ID NO: 23) | (SEQ ID NO: 75) | (SEQ ID NO: 125), | |
| | | AGAP006959 | |
| | | (SEQ ID NO: 126) | |
| AAEL014843 | CPIJ011244 | AGAP006958 | heat shock protein |
| (SEQ ID NO: 24) | (SEQ ID NO: 76), | (SEQ ID NO: 127) | |
| | CPIJ015075 | | |
| | (SEQ ID NO: 77) | | |
| AAEL014845 | CPIJ011246 | AGAP006958 | heat shock protein |
| (SEQ ID NO: 25) | (SEQ ID NO: 78) | (SEQ ID NO: 128), | |
| | | AGAP006959 | |
| | | (SEQ ID NO: 129) | |
| AAEL012680 | CPIJ019680 | | Juvenile hormone-inducible protein, |
| (SEQ ID NO: 26) | (SEQ ID NO: 79) | | putative |
| AAEL003415 | CPIJ010129 | AGAP011938 | lamin |
| (SEQ ID NO: 27) | (SEQ ID NO: 80) | (SEQ ID NO: 130) | |
| AAEL009766 | CPIJ006326 | AGAP000549 | lipoamide acyltransferase component of |
| (SEQ ID NO: 28) | (SEQ ID NO: 81) | (SEQ ID NO: 131) | branched-chain alpha-keto acid |
| | | | dehydrogenase |
| AAEL005790 | CPIJ012341 | AGAP000184 | malic enzyme |
| (SEQ ID NO: 29) | (SEQ ID NO: 82) | (SEQ ID NO: 132) | |
| AAEL014012 | CPIJ002874 | AGAP002711 | membrane-associated guanylate kinase |
| (SEQ ID NO: 30) | (SEQ ID NO: 83) | (SEQ ID NO: 133) | (maguk) |
| AAEL010066 | CPIJ007326 | AGAP001918 | microfibril-associated protein |
| (SEQ ID NO: 31) | (SEQ ID NO: 84) | (SEQ ID NO: 134) | |
| AAEL003739 | | AGAP007348 | M-type 9 protein, putative |
| (SEQ ID NO: 32) | | (SEQ ID NO: 135) | |
| AAEL003676 | CPIJ017220 | AGAP008951 | myosin I homologue, putative |
| (SEQ ID NO: 33) | (SEQ ID NO: 85) | (SEQ ID NO: 136) | |
| AAEL002572 | CPIJ017123 | AGAP001622 | myosin regulatory light chain 2 (mlc-2) |
| (SEQ ID NO: 34) | (SEQ ID NO: 86) | (SEQ ID NO: 137) | |
| AAEL009357 | CPIJ009300 | AGAP006479 | myosin v |
| (SEQ ID NO: 35) | (SEQ ID NO: 87) | (SEQ ID NO: 138) | |
| AAEL005567 | CPIJ015455 | AGAP001928 | nucleosome assembly protein |
| (SEQ ID NO: 36) | (SEQ ID NO: 88) | (SEQ ID NO: 139) | |
| AAEL010360 | CPIJ014142 | AGAP011997 | nucleotide binding protein 2 (nbp 2) |
| (SEQ ID NO: 37) | (SEQ ID NO: 89) | (SEQ ID NO: 140) | |
| AAEL012556 | | AGAP007857 | Ofd1 protein, putative |
| (SEQ ID NO: 38) | | (SEQ ID NO: 141) | |
| AAEL004783 | CPIJ013797 | AGAP010131 | ornithine decarboxylase antizyme, |
| (SEQ ID NO: 39) | (SEQ ID NO: 90) | (SEQ ID NO: 142) | |
| AAEL010975 | CPIJ003942 | AGAP004877 | paramyosin, long form |
| (SEQ ID NO: 40) | (SEQ ID NO: 91) | (SEQ ID NO: 143) | |
| AAEL004484 | CPIJ001135 | AGAP009444 | predicted protein |
| (SEQ ID NO: 41) | (SEQ ID NO: 92) | (SEQ ID NO: 144) | |
| AAEL014396 | CPIJ000805 | AGAP011767 | protein farnesyltransferase alpha subunit |
| (SEQ ID NO: 42) | (SEQ ID NO: 93) | (SEQ ID NO: 145) | |
| AAEL012686 | CPIJ001218 | | ribosomal protein S12, putative |
| (SEQ ID NO: 43) | (SEQ ID NO: 94) | | |
| AAEL013933 | | | serine protease inhibitor, serpin |
| (SEQ ID NO: 44) | | | |
| AAEL005037 | CPIJ019521 | AGAP008265 | seryl-tRn/a synthetase |
| (SEQ ID NO: 45) | (SEQ ID NO: 95) | (SEQ ID NO: 146) | |
| AAEL009614 | CPIJ009247 | AGAP006127 | seven in absentia, putative |
| (SEQ ID NO: 46) | (SEQ ID NO: 96) | (SEQ ID NO: 147) | |
| AAEL010585 | CPIJ004559 | AGAP005630 | spermatogenesis associated factor |
| (SEQ ID NO: 47) | (SEQ ID NO: 97) | (SEQ ID NO: 148) | |
| AAEL012348 | CPIJ002728 | AGAP003085 | splicing factor 3a |
| (SEQ ID NO: 48) | (SEQ ID NO: 98) | (SEQ ID NO: 149) | |
| AAEL011137 | CPIJ011934 | | succinyl-coa:3-ketoacid-coenzyme a |
| (SEQ ID NO: 49) | (SEQ ID NO: 99) | | transferase |
| AAEL002565 | CPIJ002358 | AGAP001633 | titin |
| (SEQ ID NO: 50) | (SEQ ID NO: 100) | (SEQ ID NO: 150) | |
| AAEL003104 | CPIJ003685 | AGAP007135 | tripartite motif protein trim2,3 |
| (SEQ ID NO: 51) | (SEQ ID NO: 101), | (SEQ ID NO: 151) | |
| | CPIJ003686 | | |
| | (SEQ ID NO: 102) | | |
| AAEL011988 | CPIJ000880 | | tRNA selenocysteine associated protein |
| (SEQ ID NO: 51) | (SEQ ID NO: 103) | | (secp43) |
| AAEL006572 | CPIJ012250 | AGAP006179 | troponin C |
| (SEQ ID NO: 53) | (SEQ ID NO: 104) | (SEQ ID NO: 152) | |
| AAEL003815 | CPIJ001300 | AGAP010751 | zinc finger protein |
| (SEQ ID NO: 54) | (SEQ ID NO: 105) | (SEQ ID NO: 153), | |
| | | AGAP013536 | |
| | | (SEQ ID NO: 154) | |

TABLE 1B
List of mosquito Aedes aegypti target genes

| seq id | | |
|---|---|---|
| no | Gene symbol | Gene Name |
| 201 | AAEL001411 | myosin heavy chain, nonmuscle or smooth muscle |
| 202 | AAEL014394 | growth factor receptor-bound protein |
| 203 | AAEL000700 | cadherin |
| 204 | AAEL001028 | hypothetical protein |
| 205 | AAEL010410 | odorant receptor 9a, putative |
| 206 | AAEL011202 | bhlhzip transcription factor bigmax |
| 207 | AAEL003355 | conserved hypothetical protein |
| 208 | AAEL002920 | hypothetical protein |
| 209 | AAEL012339 | cdk1 |
| 210 | AAEL013329 | cdk1 |
| 211 | AAEL009962 | hypothetical protein |
| 212 | AAEL000931 | alkaline phosphatase |
| 213 | AAEL000776 | conserved hypothetical protein |
| 214 | AAEL009022 | adenylate cyclase type |
| 215 | AAEL005766 | fructose-bisphosphate aldolase |
| 216 | AAEL002473 | hypothetical protein |
| 217 | AAEL012551 | conserved hypothetical protein |
| 218 | AAEL011648 | cyclin d |
| 219 | AAEL001246 | Thymidylate kinase, putative |
| 220 | AAEL011892 | receptor for activated C kinase, putative |
| 221 | AAEL003581 | amidophosphoribosyltransferase |
| 222 | AAEL014001 | yellow protein precursor, putative |
| 223 | AAEL012865 | conserved hypothetical protein |
| 224 | AAEL002510 | serine hydroxymethyltransferase |
| 225 | AAEL014025 | cell division cycle 20 (cdc20) (fizzy) |
| 226 | AAEL011250 | conserved hypothetical protein |
| 227 | AAEL010818 | hypothetical protein |
| 228 | AAEL005522 | conserved hypothetical protein |
| 229 | AAEL003325 | niemann-pick C1 |
| 230 | AAEL009773 | geminin, putative |
| 231 | AAEL004710 | spingomyelin synthetase |
| 232 | AAEL003465 | hypothetical protein |
| 233 | AAEL012510 | IMD pathway signaling I-Kappa-B Kinase 2 (IKK2 IKK-gamma). |
| 234 | AAEL013749 | conserved hypothetical protein |
| 235 | AAEL012085 | hypothetical protein |
| 236 | AAEL015080 | conserved hypothetical protein |
| 237 | AAEL013320 | translocon-associated protein, delta subunit |
| 238 | AAEL008686 | hypothetical protein |
| 239 | AAEL000217 | serine/threonine protein kinase |
| 240 | AAEL007799 | regulator of chromosome condensation |
| 241 | AAEL013912 | conserved hypothetical protein |
| 242 | AAEL002388 | zinc finger protein |
| 243 | AAEL012224 | zinc finger protein |
| 244 | AAEL010899 | hypothetical protein |
| 245 | AAEL010430 | ras-related protein, putative |
| 246 | AAEL003650 | inhibitor of growth protein, ing1 |
| 247 | AAEL005631 | conserved hypothetical protein |
| 248 | AAEL011295 | conserved hypothetical protein |
| 249 | AAEL003606 | purine biosynthesis protein 6, pur6 |
| 250 | AAEL010762 | Actin-related protein 8 |
| 251 | AAEL009645 | hypothetical protein |
| 252 | AAEL004699 | conserved hypothetical protein |
| 253 | AAEL012356 | GPCR Somatostatin Family |
| 254 | AAEL008084 | phosphatidylserine receptor |
| 255 | AAEL001352 | scaffold attachment factor b |
| 256 | AAEL007848 | conserved hypothetical protein |
| 257 | AAEL014844 | conserved hypothetical protein |
| 258 | AAEL002495 | conserved hypothetical protein |
| 259 | AAEL011714 | conserved hypothetical protein |
| 260 | AAEL008952 | sentrin/sumo-specific protease |
| 261 | AAEL011141 | hypothetical protein |
| 262 | AAEL010905 | conserved hypothetical protein |
| 263 | AAEL013797 | conserved hypothetical protein |
| 264 | AAEL007526 | electron transfer flavoprotein-ubiquinone oxidoreductase |
| 265 | AAEL006832 | GPCR Frizzled/Smoothened Family |
| 266 | AAEL011069 | conserved hypothetical protein |
| 267 | AAEL006519 | conserved hypothetical protein |
| 268 | AAEL012635 | conserved hypothetical protein |
| 269 | AAEL010659 | lethal(2)essential for life protein, l2efl |
| 270 | AAEL013343 | lethal(2)essential for life protein, l2efl |
| 271 | AAEL011639 | WAP four-disulfide core domain protein 2 precursor, putative |
| 272 | AAEL005439 | mical |
| 273 | AAEL000236 | hypothetical protein |
| 274 | AAEL012566 | conserved hypothetical protein |
| 275 | AAEL002896 | conserved hypothetical protein |
| 276 | AAEL006649 | tnf receptor associated factor |
| 277 | AAEL001856 | adenosine kinase |
| 278 | AAEL003549 | hypothetical protein |
| 279 | AAEL012043 | secreted modular calcium-binding protein |
| 280 | AAEL003425 | conserved hypothetical protein |
| 281 | AAEL007832 | GPCR Muscarinic Acetylcholine Family |
| 282 | AAEL015037 | G-protein-linked acetylcholine receptor gar-2a |
| 283 | AAEL001420 | leucine-rich immune protein (Short) |
| 284 | AAEL009615 | ultraviolet wavelength sensitive opsin |
| 285 | AAEL007397 | Ecdysone-induced protein 75B isoform A Nuclear receptor |
| 286 | AAEL000153 | conserved hypothetical protein |
| 287 | AAEL008015 | hypothetical protein |
| 288 | AAEL013552 | conserved hypothetical protein |
| 289 | AAEL005083 | conserved hypothetical protein |
| 290 | AAEL012562 | circadian locomoter output cycles kaput protein (dclock) (dpas1) |
| 291 | AAEL000580 | conserved hypothetical protein |
| 292 | AAEL011417 | synaptojanin |
| 293 | AAEL000041 | forkhead box protein (AaegFOXM2) |
| 294 | AAEL000945 | conserved hypothetical protein |
| 295 | AAEL002355 | conserved hypothetical protein |
| 296 | AAEL009230 | conserved hypothetical protein |
| 297 | AAEL002653 | semaphorin |
| 298 | AAEL009305 | numb-associated kinase |
| 299 | AAEL003574 | hypothetical protein |
| 300 | AAEL013040 | hypothetical protein |
| 301 | AAEL002400 | hypothetical protein |
| 302 | AAEL009382 | lysine-specific demethylase NO66 (EC 1.14.11.27)(Nucleolar protein 66) |
| 303 | AAEL008320 | conserved hypothetical protein |
| 304 | AAEL001667 | multicopper oxidase |
| 305 | AAEL007073 | hypothetical protein |
| 306 | AAEL003152 | werner syndrome helicase |
| 307 | AAEL015522 | conserved hypothetical protein |
| 308 | AAEL014368 | sap18 |
| 309 | AAEL004607 | Adenylyltransferase and sulfurtransferase MOCS3 (Molybdenum |
| | | cofactor synthesis protein 3) [Includes Adenylyltransferase MOCS3(EC |
| | | 2.7.7.—)(Sulfur carrier protein MOCS2A |
| 310 | AAEL001073 | malic enzyme |
| 311 | AAEL006087 | conserved hypothetical protein |
| 312 | AAEL006925 | conserved hypothetical protein |
| 313 | AAEL015285 | conserved hypothetical protein |
| 314 | AAEL010576 | modifier of mdg4 |
| 315 | AAEL011995 | conserved hypothetical protein |
| 316 | AAEL002064 | conserved hypothetical protein |
| 317 | AAEL009589 | conserved hypothetical protein |
| 318 | AAEL000356 | cysteine-rich venom protein, putative |
| 319 | AAEL000503 | hypothetical protein |
| 320 | AAEL012920 | GPCR Galanin/Allatostatin Family |
| 321 | AAEL014002 | conserved hypothetical protein |
| 322 | AAEL005850 | Hormone receptor-like in 4 (nuclear receptor) |
| 323 | AAEL000102 | conserved hypothetical protein |
| 324 | AAEL011647 | paired box protein, putative |
| 325 | AAEL005381 | Dissatisfaction (Dsf) |
| 326 | AAEL009360 | serine/threonine-protein kinase PLK4 (EC 2.7.11.21)(Polo-like kinase |
| | | 4)(PLK-4)(Serine/threonine-protein kinase SAK) |
| 327 | AAEL012105 | Zinc finger protein-like 1 homolog |
| 328 | AAEL007053 | hypothetical protein |
| 329 | AAEL009822 | GPCR Metabotropic glutamate Family |
| 330 | AAEL013175 | hypothetical protein |
| 331 | AAEL009531 | niemann-pick C1 |
| 332 | AAEL009841 | conserved hypothetical protein |
| 333 | AAEL010333 | conserved hypothetical protein |
| 334 | AAEL005627 | chordin |
| 335 | AAEL001526 | zinc finger protein |
| 336 | AAEL007408 | conserved hypothetical protein |
| 337 | AAEL013280 | rho guanine exchange factor |
| 338 | AAEL009508 | zinc finger protein |
| 339 | AAEL008839 | hypothetical protein |
| 340 | AAEL015216 | serine/threonine-protein kinase vrk |
| 341 | AAEL007436 | conserved hypothetical protein |
| 342 | AAEL014392 | hypothetical protein |
| 343 | AAEL004458 | Zinc finger CCCH-type with G patch domain-containing protein |
| 344 | AAEL000087 | macroglobulin/complement |
| 345 | AAEL000256 | Class B Scavenger Receptor (CD36 domain). |
| 346 | AAEL000274 | Copper-Zinc(Cu—Zn) Superoxide Dismutase. |
| 347 | AAEL000709 | TOLL pathway signaling. |
| 348 | AAEL000765 | hexamerin 2 beta |
| 349 | AAEL001794 | macroglobulin/complement |
| 350 | AAEL002585 | serine protease |
| 351 | AAEL002595 | serine protease |
| 352 | AAEL002629 | serine protease |
| 353 | AAEL002730 | Serine Protease Inhibitor (serpin) likely cleavage at R/V. |
| 354 | AAEL003119 | C-Type Lectin (CTL). |
| 355 | AAEL003439 | Caspase (Short). |
| 356 | AAEL003849 | defensin anti-microbial peptide |
| 357 | AAEL004386 | heme peroxidase |
| 358 | AAEL004388 | heme peroxidase |
| 359 | AAEL004390 | heme peroxidase |
| 360 | AAEL005064 | Clip-Domain Serine Protease family B. |
| 361 | AAEL005325 | dopachrome-conversion enzyme (DCE) isoenzyme, putative |
| 362 | AAEL005443 | conserved hypothetical protein |
| 363 | AAEL005673 | Serine Protease Inhibitor (serpin) likely cleavage at K/F. |
| 364 | AAEL005738 | yellow protein precursor |
| 365 | AAEL005832 | programmed cell death |
| 366 | AAEL006271 | copper-zinc (Cu—Zn) superoxide dismutase |
| 367 | AAEL006383 | chymotrypsin, putative |
| 368 | AAEL006576 | clip-domain serine protease, putative |
| 369 | AAEL006702 | fibrinogen and fibronectin |
| 370 | AAEL008364 | Serine Protease Inhibitor (serpin) likely cleavage at S/S. |
| 371 | AAEL009436 | conserved hypothetical protein |
| 372 | AAEL009861 | conserved hypothetical protein |
| 373 | AAEL010973 | conserved hypothetical protein |
| 374 | AAEL011498 | copper-zinc (Cu—Zn) superoxide dismutase |
| 375 | AAEL011699 | hypothetical protein |
| 376 | AAEL012267 | macroglobulin/complement |
| 377 | AAEL012958 | conserved hypothetical protein |
| 378 | AAEL013441 | Toll-like receptor |
| 379 | AAEL013757 | hexamerin 2 beta |
| 380 | AAEL013936 | Serine Protease Inhibitor (serpin) likely cleavage at I/S. Transcript A. |
| 381 | AAEL014078 | serine protease inhibitor, serpin |
| 382 | AAEL014079 | serine protease inhibitor, serpin |
| 383 | AAEL014238 | aromatic amino acid decarboxylase |
| 384 | AAEL014390 | galactose-specific C-type lectin, putative |
| 385 | AAEL014548 | Thioredoxin Peroxidase. |
| 386 | AAEL014755 | tep2 |
| 387 | AAEL014989 | peptidoglycan recognition protein-1, putative |
| 388 | AAEL015322 | slit protein |
| 389 | AAEL007097 | 4-nitrophenylphosphatase |
| 390 | AAEL007323 | deoxyuridine 5′-triphosphate nucleotidohydrolase |
| 391 | AAEL006239 | glycerol kinase |
| 392 | AAEL002542 | triosephosphate isomerase |
| 393 | AAEL010208 | 3-hydroxyisobutyrate dehydrogenase |
| 394 | AAEL000006 | phosphoenolpyruvate carboxykinase |
| 395 | AAEL009245 | 3-hydroxyisobutyrate dehydrogenase, putative |
| 396 | AAEL015143 | glycine rich RNA binding protein, putative |
| 397 | AAEL006684 | Putative oxidoreductase GLYR1 homolog (EC 1.—.—.—)(Glyoxylate |
| | | reductase 1 homolog)(Nuclear protein NP60 homolog) |
| 398 | AAEL012580 | 3-hydroxyisobutyrate dehydrogenase |
| 399 | AAEL013819 | Bj1 protein, putative |
| 400 | AAEL008849 | selenophosphate synthase |
| 401 | AAEL003084 | dolichyl-phosphate beta-D-mannosyltransferase, putative |
| 402 | AAEL014186 | dolichyl-phosphate beta-D-mannosyltransferase, putative |
| 403 | AAEL010751 | methylenetetrahydrofolate dehydrogenase |
| 404 | AAEL013877 | Glucosamine-6-phosphate isomerase (EC 3.5.99.6)(Glucosamine-6- |
| | | phosphate deaminase)(GlcN6P deaminase)(GNPDA) |
| 405 | AAEL008166 | malate dehydrogenase |
| 406 | AAEL009721 | paraplegin |
| 407 | AAEL012337 | goliath E3 ubiquitin ligase |
| 408 | AAEL007593 | Clip-Domain Serine Protease family C. |
| 409 | AAEL003769 | methionine aminopeptidase |
| 410 | AAEL008416 | pre-mRNA processing factor |
| 411 | AAEL005201 | hydroxymethylglutaryl-coa synthase |
| 412 | AAEL008905 | host cell factor C1 |
| 413 | AAEL001112 | conserved hypothetical protein |
| 414 | AAEL002655 | matrix metalloproteinase |
| 415 | AAEL006323 | hypothetical protein |
| 416 | AAEL007649 | cell cycle checkpoint protein rad17 |
| 417 | AAEL004589 | small calcium-binding mitochondrial carrier, putative |
| 418 | AAEL011704 | heat shock protein |
| 419 | AAEL001052 | heat shock protein, putative |
| 420 | AAEL006362 | mitochondrial solute carrier |
| 421 | AAEL010002 | mitochondrial import inner membrane translocase subunit tim17 |
| 422 | AAEL015575 | mitochondrial import inner membrane translocase subunit tim17 |
| 423 | AAEL005413 | mitochondrial ribosomal protein, S11, putative |
| 424 | AAEL009964 | conserved hypothetical protein |
| 425 | AAEL010673 | NADH dehydrogenase, putative |
| 426 | AAEL001615 | mitochondrial ribosomal protein, S18C, putative |
| 427 | AAEL003215 | heat shock factor binding protein, putative |
| 428 | AAEL012499 | histone H2A |
| 429 | AAEL008500 | DEAD box ATP-dependent RNA helicase |
| 430 | AAEL007609 | histone H2A |
| 431 | AAEL005114 | RNA and export factor binding protein |
| 432 | AAEL015263 | RNA and export factor binding protein |
| 433 | AAEL006473 | arginine/serine-rich splicing factor |
| 434 | AAEL007928 | eukaryotic translation initiation factor 4 gamma |
| 435 | AAEL010340 | serine/arginine rich splicing factor |
| 436 | AAEL010402 | DEAD box ATP-dependent RNA helicase |
| 437 | AAEL003401 | DNA-directed RNA polymerase II 19 kDa polypeptide rpb7 |
| 438 | AAEL006135 | Nuclear cap-binding protein subunit 2 (20 kDa nuclear cap-binding |
| | | protein)(NCBP 20 kDa subunit)(CBP20) |
| 439 | AAEL009913 | DEAD box ATP-dependent RNA helicase |
| 440 | AAEL007078 | Eukaryotic translation initiation factor 3 subunit A (eIF3a)(Eukaryotic |
| | | translation initiation factor 3 subunit 10) |
| 441 | AAEL007923 | eukaryotic translation initiation factor 4 gamma |
| 442 | AAEL010612 | alternative splicing type 3 and, putative |
| 443 | AAEL011687 | alternative splicing type 3 and, putative |
| 444 | AAEL003893 | DNA repair protein xp-c/rad4 |
| 445 | AAEL006883 | conserved hypothetical protein |
| 446 | AAEL012585 | 60S ribosomal protein L7 |
| 447 | AAEL014429 | T-box transcription factor tbx20 |
| 448 | AAEL000098 | hypothetical protein |
| 449 | AAEL004174 | T-box transcription factor tbx6 |
| 450 | AAEL007458 | amino acid transporter |
| 451 | AAEL011470 | cis,cis-muconate transport protein MucK, putative |
| 452 | AAEL013146 | mfs transporter |
| 453 | AAEL002525 | amino acids transporter |
| 454 | AAEL006879 | folate carrier protein |
| 455 | AAEL012183 | mfs transporter |
| 456 | AAEL008878 | diacylglycerol o-acyltransferase |
| 457 | AAEL001968 | zinc transporter |
| 458 | AAEL009362 | cationic amino acid transporter |
| 459 | AAEL008138 | ABC transporter |
| 460 | AAEL005635 | nucleoporin |
| 461 | AAEL011679 | ion channel nompc |
| 462 | AAEL009421 | cyclophilin-r |
| 463 | AAEL003433 | copper-transporting ATPase 1, 2 (copper pump 1, 2) |
| 464 | AAEL006526 | neurotransmitter gated ion channel |
| 465 | AAEL004268 | Sialin, Sodium/sialic acid cotransporter, putative |
| 466 | AAEL005991 | tricarboxylate transport protein |
| 467 | AAEL009206 | organic cation transporter |
| 468 | AAEL002756 | synaptotagmin-4, |
| 469 | AAEL001405 | clathrin coat assembly protein |
| 470 | AAEL000675 | hypothetical protein |
| 471 | AAEL000727 | hypothetical protein |
| 472 | AAEL000969 | hypothetical protein |
| 473 | AAEL002095 | conserved hypothetical protein |
| 474 | AAEL002803 | conserved hypothetical protein |
| 475 | AAEL002975 | hypothetical protein |
| 476 | AAEL002979 | conserved hypothetical protein |
| 477 | AAEL003089 | conserved hypothetical protein |
| 478 | AAEL003131 | conserved hypothetical protein |
| 479 | AAEL003316 | hypothetical protein |
| 480 | AAEL003430 | conserved hypothetical protein |
| 481 | AAEL004498 | hypothetical protein |
| 482 | AAEL004604 | hypothetical protein |
| 483 | AAEL004625 | conserved hypothetical protein |
| 484 | AAEL004734 | conserved hypothetical protein |
| 485 | AAEL004754 | hypothetical protein |
| 486 | AAEL004976 | conserved hypothetical protein |
| 487 | AAEL005121 | conserved hypothetical protein |
| 488 | AAEL005192 | hypothetical protein |
| 489 | AAEL005389 | conserved hypothetical protein |
| 490 | AAEL006001 | conserved hypothetical protein |
| 491 | AAEL006072 | hypothetical protein |
| 492 | AAEL006243 | hypothetical protein |
| 493 | AAEL006247 | conserved hypothetical protein |
| 494 | AAEL006502 | conserved hypothetical protein |
| 495 | AAEL006606 | hypothetical protein |
| 496 | AAEL006755 | conserved hypothetical protein |
| 497 | AAEL007744 | hypothetical protein |
| 498 | AAEL007940 | gustatory receptor Gr77 |
| 499 | AAEL008439 | conserved hypothetical protein |
| 500 | AAEL008492 | conserved hypothetical protein |
| 501 | AAEL008636 | conserved hypothetical protein |
| 502 | AAEL009070 | hypothetical protein |
| 503 | AAEL009082 | hypothetical protein |
| 504 | AAEL009247 | conserved hypothetical protein |
| 505 | AAEL009322 | hypothetical protein |
| 506 | AAEL009385 | hypothetical protein |
| 507 | AAEL009473 | conserved hypothetical protein |
| 508 | AAEL009565 | conserved hypothetical protein |
| 509 | AAEL010022 | hypothetical protein |
| 510 | AAEL010113 | conserved hypothetical protein |
| 511 | AAEL010155 | hypothetical protein |
| 512 | AAEL010407 | conserved hypothetical protein |
| 513 | AAEL010898 | conserved hypothetical protein |
| 514 | AAEL011737 | hypothetical protein |
| 515 | AAEL011771 | hypothetical protein |
| 516 | AAEL011826 | conserved hypothetical protein |
| 517 | AAEL011872 | conserved hypothetical protein |
| 518 | AAEL012058 | hypothetical protein |
| 519 | AAEL012504 | hypothetical protein |
| 520 | AAEL012742 | conserved hypothetical protein |
| 521 | AAEL012754 | hypothetical protein |
| 522 | AAEL013024 | hypothetical protein |
| 523 | AAEL013037 | conserved hypothetical protein |
| 524 | AAEL013169 | conserved hypothetical protein |
| 525 | AAEL013776 | predicted protein |
| 526 | AAEL013977 | conserved hypothetical protein |
| 527 | AAEL014126 | hypothetical protein |
| 528 | AAEL014294 | conserved hypothetical protein |
| 529 | AAEL014816 | hypothetical protein |
| 530 | AAEL015613 | hypothetical protein |
| 531 | AAEL015634 | conserved hypothetical protein |
| 532 | AAEL001411 | myosin heavy chain, nonmuscle or smooth muscle |
| 533 | AAEL013778 | F-actin capping protein alpha |
| 534 | AAEL010510 | conserved hypothetical protein |
| 535 | AAEL011154 | hypothetical protein |
| 536 | AAEL004936 | conserved hypothetical protein |
| 537 | AAEL010979 | growth factor receptor-bound protein |
| 538 | AAEL001477 | laminin alpha-1, 2 chain |
| 539 | AAEL001904 | arp2/3 |
| 540 | AAEL002771 | microtubule binding protein, putative |
| 541 | AAEL005845 | beta chain spectrin |
| 542 | AAEL013808 | fascin |
| 543 | AAEL004440 | tubulin-specific chaperone e |
| 544 | AAEL000700 | cadherin |
| 545 | AAEL002761 | tropomyosin invertebrate |
| 546 | AAEL004668 | septin |
| 547 | AAEL003027 | conserved hypothetical protein |
| 548 | AAEL002185 | cuticle protein, putative |
| 549 | AAEL009527 | conserved hypothetical protein |
| 550 | AAEL014483 | conserved hypothetical protein |
| 551 | AAEL006340 | conserved hypothetical protein |
| 552 | AAEL012207 | myosin light chain 1, |
| 553 | AAEL008185 | conserved hypothetical protein |
| 554 | AAEL000048 | gustatory receptor Gr4 |
| 555 | AAEL003593 | hypothetical protein |
| 556 | AAEL015071 | gustatory receptor 64a, putative |
| 557 | AAEL013882 | tkr |
| 558 | AAEL007653 | allantoinase |
| 559 | AAEL000820 | dimethylaniline monooxygenase |
| 560 | AAEL014301 | hypothetical protein |
| 561 | AAEL003989 | GTP-binding protein alpha subunit, gna |
| 562 | AAEL011384 | hypothetical protein |
| 563 | AAEL010674 | hypothetical protein |
| 564 | AAEL007401 | roundabout, putative |
| 565 | AAEL006619 | conserved hypothetical protein |
| 566 | AAEL011105 | adducin |
| 567 | AAEL003220 | hypothetical protein |
| 568 | AAEL013028 | zinc finger protein |
| 569 | AAEL010755 | hypothetical protein |
| 570 | AAEL011552 | hypothetical protein |
| 571 | AAEL010301 | conserved hypothetical protein |
| 572 | AAEL008027 | hypothetical protein |
| 573 | AAEL014991 | hypothetical protein |
| 574 | AAEL004710 | spingomyelin synthetase |
| 575 | AAEL000405 | odd Oz protein |
| 576 | AAEL014746 | o-linked n-acetylglucosamine transferase, ogt |
| 577 | AAEL004715 | b-cell translocation protein |
| 578 | AAEL009646 | conserved hypothetical protein |
| 579 | AAEL003623 | conserved hypothetical protein |
| 580 | AAEL014042 | protein phosphatase pp2a regulatory subunit b |
| 581 | AAEL009249 | coronin |
| 582 | AAEL004351 | casein kinase |
| 583 | AAEL008806 | testis development protein prtd |
| 584 | AAEL003470 | conserved hypothetical protein |
| 585 | AAEL001434 | coronin |
| 586 | AAEL013969 | conserved hypothetical protein |
| 587 | AAEL012915 | als2cr7 |
| 588 | AAEL003571 | factor for adipocyte differentiation |
| 589 | AAEL001946 | four and a half lim domains |
| 590 | AAEL005795 | conserved hypothetical protein |
| 591 | AAEL007705 | hect E3 ubiquitin ligase |
| 592 | AAEL002705 | nucleolar protein c7b |
| 593 | AAEL005241 | lateral signaling target protein 2 |
| 594 | AAEL001853 | rac-GTP binding protein |
| 595 | AAEL003698 | conserved hypothetical protein |
| 596 | AAEL008879 | Kynurenine 3-monooxygenase (EC 1.14.13.9)(Kynurenine 3- |
| | | hydroxylase) |
| 597 | AAEL004501 | s-adenosylmethionine synthetase |
| 598 | AAEL003145 | bestrophin 2,3,4 |
| 599 | AAEL006786 | GTPase_rho |
| 600 | AAEL008171 | double-stranded RNA-binding protein zn72d |
| 601 | AAEL008007 | conserved hypothetical protein |
| 602 | AAEL010665 | developmentally regulated RNA-binding protein |
| 603 | AAEL013057 | serine/threonine-protein kinase wnk 1,3,4 |
| 604 | AAEL002082 | latent nuclear antigen, putative |
| 605 | AAEL002090 | conserved hypothetical protein |
| 606 | AAEL004041 | flotillin-2 |
| 607 | AAEL010676 | regulator of g protein signaling |
| 608 | AAEL008739 | shc transforming protein |
| 609 | AAEL011061 | hypothetical protein |
| 610 | AAEL007479 | hypothetical protein |
| 611 | AAEL014851 | mediator complex subunit rgr-1 |
| 612 | AAEL005930 | ubiquitin-protein ligase |
| 613 | AAEL002277 | cAMP-dependent protein kinase type i-beta regulatory subunit |
| 614 | AAEL009422 | conserved hypothetical protein |
| 615 | AAEL006460 | par-6 gamma |
| 616 | AAEL001848 | conserved hypothetical protein |
| 617 | AAEL002607 | conserved hypothetical protein |
| 618 | AAEL000090 | secretory carrier-associated membrane protein (scamp) |
| 619 | AAEL005535 | conserved hypothetical protein |
| 620 | AAEL010344 | SEC14, putative |
| 621 | AAEL011006 | guanylate kinase |
| 622 | AAEL006539 | serine/threonine protein kinase |
| 623 | AAEL005284 | receptor tyrosine phosphatase type r2a |
| 624 | AAEL009495 | rab6-interacting |
| 625 | AAEL005400 | 2-hydroxyacid dehydrogenase |
| 626 | AAEL000395 | Ultra spiracleisoform A nuclear receptor |
| 627 | AAEL002175 | conserved hypothetical protein |
| 628 | AAEL010170 | ras-related protein Rab-8A, putative |
| 629 | AAEL007889 | F-spondin |
| 630 | AAEL008078 | clk2 |
| 631 | AAEL014510 | sprouty |
| 632 | AAEL011417 | synaptojanin |
| 633 | AAEL000591 | hypothetical protein |
| 634 | AAEL001528 | hypothetical protein |
| 635 | AAEL005369 | zinc finger protein |
| 636 | AAEL010668 | quinone oxidoreductase |
| 637 | AAEL001099 | DEAD box polypeptide |
| 638 | AAEL002451 | zinc finger protein |
| 639 | AAEL003845 | Ets domain-containing protein |
| 640 | AAEL011970 | GPCR Purine/Adenosine Family |
| 641 | AAEL007322 | phosphatidate phosphatase |
| 642 | AAEL010561 | conserved hypothetical protein |
| 643 | AAEL006780 | hypothetical protein |
| 644 | AAEL007436 | conserved hypothetical protein |
| 645 | AAEL000737 | rab6 GTPase activating protein, gapcena (rabgap1 protein) |
| 646 | AAEL001133 | conserved hypothetical protein |
| 647 | AAEL005683 | conserved hypothetical protein |
| 648 | AAEL007375 | pyruvate dehydrogenase |
| 649 | AAEL001393 | triple functional domain, trio |
| 650 | AAEL005238 | mck1 |
| 651 | AAEL009874 | conserved hypothetical protein |
| 652 | AAEL001375 | Y-box binding protein |
| 653 | AAEL013308 | odd Oz protein |
| 654 | AAEL001398 | guanine nucleotide exchange factor |
| 655 | AAEL009171 | conserved hypothetical protein |
| 656 | AAEL004964 | hypothetical protein |
| 657 | AAEL009264 | hypothetical protein |
| 658 | AAEL001898 | conserved hypothetical protein |
| 659 | AAEL000421 | protein farnesyltransferase alpha subunit/rab geranylgeranyl transferase |
| | | alpha subunit |
| 660 | AAEL012554 | maltose phosphorylase |
| 661 | AAEL000262 | conserved hypothetical protein |
| 662 | AAEL000770 | platelet-activating factor acetylhydrolase isoform 1b alpha subunit |
| 663 | AAEL003976 | conserved hypothetical protein |
| 664 | AAEL002937 | hypothetical protein |
| 665 | AAEL003540 | conserved hypothetical protein |
| 666 | AAEL005706 | triacylglycerol lipase |
| 667 | AAEL007662 | casein kinase |
| 668 | AAEL013619 | dolichyl-diphosphooligosaccharide protein glycosyltransferase |
| 669 | AAEL004209 | opioid-binding protein/cell adhesion molecule, putative |
| 670 | AAEL003750 | conserved hypothetical protein |
| 671 | AAEL004709 | protein phosphatase type 2c |
| 672 | AAEL009382 | lysine-specific demethylase NO66 (EC 1.14.11.27)(Nucleolar protein 66) |
| 673 | AAEL014999 | conserved hypothetical protein |
| 674 | AAEL012076 | conserved hypothetical protein |
| 675 | AAEL013334 | conserved hypothetical protein |
| 676 | AAEL005861 | vacuolar sorting protein (vps) |
| 677 | AAEL002251 | conserved hypothetical protein |
| 678 | AAEL009645 | hypothetical protein |
| 679 | AAEL000713 | reticulon/nogo |
| 680 | AAEL006651 | dystrophin |
| 681 | AAEL009606 | conserved hypothetical protein |
| 682 | AAEL008591 | zinc finger protein, putative |
| 683 | AAEL013459 | conserved hypothetical protein |
| 684 | AAEL006041 | conserved hypothetical protein |
| 685 | AAEL013510 | smaug protein |
| 686 | AAEL005528 | conserved hypothetical protein |
| 687 | AAEL003824 | conserved hypothetical protein |
| 688 | AAEL011575 | conserved hypothetical protein |
| 689 | AAEL006990 | conserved hypothetical protein |
| 690 | AAEL002306 | hect E3 ubiquitin ligase |
| 691 | AAEL013068 | protein phsophatase-2a |
| 692 | AAEL005320 | skeletrophin |
| 693 | AAEL000079 | hypothetical protein |
| 694 | AAEL010020 | Mediator of RNA polymerase II transcription subunit 14 (Mediator |
| | | complex subunit 14) |
| 695 | AAEL007011 | conserved hypothetical protein |
| 696 | AAEL000399 | conserved hypothetical protein |
| 697 | AAEL001919 | protein tyrosine phosphatase, non-receptor type nt1 |
| 698 | AAEL005302 | beta-1,4-galactosyltransferase |
| 699 | AAEL003509 | smap1 |
| 700 | AAEL003955 | hypothetical protein |
| 701 | AAEL003928 | pdgf/vegf receptor |
| 702 | AAEL000824 | hypothetical protein |
| 703 | AAEL004472 | hypothetical protein |
| 704 | AAEL010750 | hypothetical protein |
| 705 | AAEL002706 | hypothetical protein |
| 706 | AAEL007884 | conserved membrane protein at 44E, putative |
| 707 | AAEL008107 | f14p3.9 protein (auxin transport protein) |
| 708 | AAEL000857 | conserved hypothetical protein |
| 709 | AAEL014931 | sarm1 |
| 710 | AAEL001709 | hypothetical protein |
| 711 | AAEL008733 | histidine triad (hit) protein member |
| 712 | AAEL005502 | conserved hypothetical protein |
| 713 | AAEL001640 | multicopper oxidase |
| 714 | AAEL003799 | autophagy related gene |
| 715 | AAEL002142 | conserved hypothetical protein |
| 716 | AAEL015466 | conserved hypothetical protein |
| 717 | AAEL007687 | transmembrane 9 superfamily protein member 4 |
| 718 | AAEL013280 | rho guanine exchange factor |
| 719 | AAEL003454 | phocein protein, putative |
| 720 | AAEL001152 | beta-1,3-galactosyltransferase-6 |
| 721 | AAEL008793 | conserved hypothetical protein |
| 722 | AAEL007455 | thrombospondin |
| 723 | AAEL013072 | conserved hypothetical protein |
| 724 | AAEL007370 | conserved hypothetical protein |
| 725 | AAEL002732 | nephrin |
| 726 | AAEL002364 | hypothetical protein |
| 727 | AAEL007665 | hypothetical protein |
| 728 | AAEL002637 | tripartite motif protein trim9 |
| 729 | AAEL011623 | conserved hypothetical protein |
| 730 | AAEL014622 | conserved hypothetical protein |
| 731 | AAEL015487 | zinc finger protein, putative |
| 732 | AAEL010229 | hypothetical protein |
| 733 | AAEL004412 | polo kinase kinase |
| 734 | AAEL002448 | hypothetical protein |
| 735 | AAEL001388 | hypothetical protein |
| 736 | AAEL012998 | conserved hypothetical protein |
| 737 | AAEL013231 | hypothetical protein |
| 738 | AAEL010062 | conserved hypothetical protein |
| 739 | AAEL007199 | hypothetical protein |
| 740 | AAEL005109 | WD-repeat protein |
| 741 | AAEL003312 | hypothetical protein |
| 742 | AAEL013430 | putative G-protein coupled receptor (GPCR) |
| 743 | AAEL003508 | serine-pyruvate aminotransferase |
| 744 | AAEL002120 | zinc finger protein |
| 745 | AAEL004508 | hypothetical protein |
| 746 | AAEL012570 | hypothetical protein |
| 747 | AAEL001569 | conserved hypothetical protein |
| 748 | AAEL001094 | conserved hypothetical protein |
| 749 | AAEL000165 | conserved hypothetical protein |
| 750 | AAEL012086 | leucine-rich immune protein (Long) |
| 751 | AAEL009520 | leucine-rich immune protein (Long) |
| 752 | AAEL000703 | glycogen phosphorylase |
| 753 | AAEL007677 | phospholysine phosphohistidine inorganic pyrophosphate phosphatase |
| 754 | AAEL011220 | Ati or CPXV158 protein, putative |
| 755 | AAEL001635 | conserved hypothetical protein |
| 756 | AAEL000541 | fasciclin, putative |
| 757 | AAEL005216 | conserved hypothetical protein |
| 758 | AAEL004221 | glycogen synthase |
| 759 | AAEL004150 | fibrinogen and fibronectin |
| 760 | AAEL012187 | lethal(3)malignant brain tumor |
| 761 | AAEL003651 | conserved hypothetical protein |
| 762 | AAEL003729 | Probable hydroxyacid-oxoacid transhydrogenase, mitochondrial |
| | | Precursor (HOT)(EC 1.1.99.24) |
| 763 | AAEL013453 | sarcolemmal associated protein, putative |
| 764 | AAEL001650 | conserved hypothetical protein |
| 765 | AAEL002569 | serine/threonine kinase |
| 766 | AAEL012238 | glutaredoxin, putative |
| 767 | AAEL004229 | glutathione transferase |
| 768 | AAEL011596 | mitotic checkpoint serine/threonine-protein kinase bub1 and bubr1 |
| 769 | AAEL006207 | conserved hypothetical protein |
| 770 | AAEL014596 | hypothetical protein |
| 771 | AAEL012391 | conserved hypothetical protein |
| 772 | AAEL013974 | conserved hypothetical protein |
| 773 | AAEL008719 | Sm protein G, putative |
| 774 | AAEL008316 | mitotic spindle assembly checkpoint protein mad2 |
| 775 | AAEL008646 | fibrinogen and fibronectin |
| 776 | AAEL011235 | conserved hypothetical protein |
| 777 | AAEL008716 | conserved hypothetical protein |
| 778 | AAEL015555 | conserved hypothetical protein |
| 779 | AAEL012628 | conserved hypothetical protein |
| 780 | AAEL000465 | conserved hypothetical protein |
| 781 | AAEL008369 | acyl phosphatase, putative |
| 782 | AAEL004512 | zinc finger protein |
| 783 | AAEL005557 | hypothetical protein |
| 784 | AAEL001653 | fetal globin-inducing factor |
| 785 | AAEL010622 | hypothetical protein |
| 786 | AAEL007907 | serine/threonine protein kinase |
| 787 | AAEL010013 | WD-repeat protein |
| 788 | AAEL002739 | conserved hypothetical protein |
| 789 | AAEL011834 | hypothetical protein |
| 790 | AAEL000147 | single-stranded DNA binding protein, putative |
| 791 | AAEL013943 | mediator complex, 100 kD-subunit, putative |
| 792 | AAEL005976 | adenine phosphoribosyltransferase, putative |
| 793 | AAEL001838 | conserved hypothetical protein |
| 794 | AAEL000425 | conserved hypothetical protein |
| 795 | AAEL015060 | Rad51A protein, putative |
| 796 | AAEL015658 | conserved hypothetical protein |
| 797 | AAEL004086 | aldo-keto reductase |
| 798 | AAEL009701 | conserved hypothetical protein |
| 799 | AAEL011362 | hypothetical protein |
| 800 | AAEL007395 | conserved hypothetical protein |
| 801 | AAEL007564 | zinc finger protein |
| 802 | AAEL002888 | williams-beuren syndrome critical region protein |
| 803 | AAEL012771 | leucine-rich immune protein (Coil-less) |
| 804 | AAEL009149 | kinectin, putative |
| 805 | AAEL009425 | hypothetical protein |
| 806 | AAEL012938 | zinc finger protein |
| 807 | AAEL005719 | cleavage stimulation factor |
| 808 | AAEL013844 | diazepam binding inhibitor, putative |
| 809 | AAEL006787 | conserved hypothetical protein |
| 810 | AAEL006948 | tomosyn |
| 811 | AAEL004335 | secreted ferritin G subunit precursor, putative |
| 812 | AAEL014438 | juvenile hormone-inducible protein, putative |
| 813 | AAEL011606 | conserved hypothetical protein |
| 814 | AAEL008486 | protein kinase C inhibitor, putative |
| 815 | AAEL006628 | conserved hypothetical protein |
| 816 | AAEL000065 | conserved hypothetical protein |
| 817 | AAEL005297 | guanine nucleotide exchange factor |
| 818 | AAEL013338 | lethal(2)essential for life protein, l2efl |
| 819 | AAEL015636 | interleukin enhancer binding factor |
| 820 | AAEL010472 | helix-loop-helix protein hen |
| 821 | AAEL002950 | conserved hypothetical protein |
| 822 | AAEL005395 | conserved hypothetical protein |
| 823 | AAEL000629 | adenylate kinase 3, |
| 824 | AAEL004004 | chromatin regulatory protein sir2 |
| 825 | AAEL011816 | conserved hypothetical protein |
| 826 | AAEL002399 | aspartate aminotransferase |
| 827 | AAEL006203 | juvenile hormone-inducible protein, putative |
| 828 | AAEL015017 | islet cell autoantigen |
| 829 | AAEL013644 | ubiquitously transcribed sex (x/y) chromosome tetratricopeptide repeat |
| | | protein |
| 830 | AAEL006965 | NBP2b protein, putative |
| 831 | AAEL004566 | myo inositol monophosphatase |
| 832 | AAEL012939 | gamma-subunit,methylmalonyl-CoA decarboxylase, putative |
| 833 | AAEL001703 | serine-type enodpeptidase, |
| 834 | AAEL002273 | trypsin, putative |
| 835 | AAEL010951 | glutamate decarboxylase |
| 836 | AAEL007363 | leucine-rich transmembrane protein |
| 837 | AAEL007613 | Toll-like receptor |
| 838 | AAEL002166 | leucine rich repeat (in flii) interacting protein |
| 839 | AAEL002206 | rap GTPase-activating protein |
| 840 | AAEL005832 | programmed cell death |
| 841 | AAEL000709 | TOLL pathway signaling. |
| 842 | AAEL003119 | C-Type Lectin (CTL). |
| 843 | AAEL014989 | peptidoglycan recognition protein-1, putative |
| 844 | AAEL014356 | C-Type Lectin (CTL) - selectin like. |
| 845 | AAEL003554 | leucine rich repeat protein |
| 846 | AAEL001914 | scavenger receptor, putative |
| 847 | AAEL006702 | fibrinogen and fibronectin |
| 848 | AAEL006699 | fibrinogen and fibronectin |
| 849 | AAEL011764 | prophenoloxidase |
| 850 | AAEL006137 | Serine Protease Inhibitor (serpin) homologue - unlikely to be inhibitory. |
| 851 | AAEL009420 | Class B Scavenger Receptor (CD36 domain). |
| 852 | AAEL013417 | fibrinogen and fibronectin |
| 853 | AAEL000533 | C-Type Lectin (CTL). |
| 854 | AAEL002354 | heme peroxidase |
| 855 | AAEL002704 | Serine Protease Inhibitor (serpin) homologue |
| 856 | AAEL000633 | Toll-like receptor |
| 857 | AAEL008681 | C-Type Lectin (CTL). |
| 858 | AAEL009551 | Toll-like receptor |
| 859 | AAEL009176 | Gram-Negative Binding Protein (GNBP) or Beta-1 3-Glucan Binding |
| | | Protein (BGBP). |
| 860 | AAEL007768 | TOLL pathway signaling. |
| 861 | AAEL000227 | Class B Scavenger Receptor (CD36 domain). |
| 862 | AAEL001163 | macroglobulin/complement |
| 863 | AAEL009474 | Peptidoglycan Recognition Protein (Short) |
| 864 | AAEL011009 | fibrinogen and fibronectin |
| 865 | AAEL009384 | fibrinogen and fibronectin |
| 866 | AAEL005800 | Clip-Domain Serine Protease family E. Protease homologue. |
| 867 | AAEL007107 | serine protease, putative |
| 868 | AAEL002601 | Clip-Domain Serine Protease family A. Protease homologue. |
| 869 | AAEL007626 | Gram-Negative Binding Protein (GNBP) or Beta-1 3-Glucan Binding |
| | | Protein (BGBP). |
| 870 | AAEL003632 | Clip-Domain Serine Protease family B. |
| 871 | AAEL006161 | Clip-Domain Serine Protease family B. |
| 872 | AAEL003857 | defensin anti-microbial peptide |
| 873 | AAEL004868 | hemomucin |
| 874 | AAEL009842 | galectin |
| 875 | AAEL014246 | glucosyl/glucuronosyl transferases |
| 876 | AAEL002688 | glucosyl/glucuronosyl transferases |
| 877 | AAEL013128 | elongase, putative |
| 878 | AAEL014664 | AMP dependent coa ligase |
| 879 | AAEL001273 | Sec24B protein, putative |
| 880 | AAEL013458 | glutamine synthetase 1, 2 (glutamate-amonia ligase) (gs) |
| 881 | AAEL010256 | E3 ubiquitin ligase |
| 882 | AAEL006687 | exportin |
| 883 | AAEL014871 | methylenetetrahydrofolate dehydrogenase |
| 884 | AAEL002430 | n-acetylglucosamine-6-phosphate deacetylase |
| 885 | AAEL010751 | methylenetetrahydrofolate dehydrogenase |
| 886 | AAEL004952 | protein N-terminal asparagine amidohydrolase, putative |
| 887 | AAEL008374 | E3 ubiquitin-protein ligase nedd-4 |
| 888 | AAEL008687 | tar RNA binding protein (trbp) |
| 889 | AAEL004294 | dihydrolipoamide acetyltransferase component of pyruvate |
| | | dehydrogenase |
| 890 | AAEL005763 | lysosomal alpha-mannosidase (mannosidase alpha class 2b member 1) |
| 891 | AAEL008507 | srpk |
| 892 | AAEL001593 | glycerol-3-phosphate dehydrogenase |
| 893 | AAEL004865 | cyclin g |
| 894 | AAEL003402 | sphingomyelin phosphodiesterase |
| 895 | AAEL003091 | glucosyl/glucuronosyl transferases |
| 896 | AAEL008393 | phosphatidylserine synthase |
| 897 | AAEL001523 | secretory Phospholipase A2, putative |
| 898 | AAEL014965 | nova |
| 899 | AAEL005380 | mixed-lineage leukemia protein, mll |
| 900 | AAEL003873 | glycerol-3-phosphate dehydrogenase |
| 901 | AAEL004757 | cleavage and polyadenylation specificity factor |
| 902 | AAEL002528 | histone deacetylase |
| 903 | AAEL000690 | steroid dehydrogenase |
| 904 | AAEL011957 | elongase, putative |
| 905 | AAEL012446 | Inhibitor of Apoptosis (IAP) containing Baculoviral IAP Repeat(s) (BIR |
| | | domains). |
| 906 | AAEL000006 | phosphoenolpyruvate carboxykinase |
| 907 | AAEL013525 | Timp-3, putative |
| 908 | AAEL002658 | AMP dependent ligase |
| 909 | AAEL013831 | pyrroline-5-carboxylate dehydrogenase |
| 910 | AAEL002542 | triosephosphate isomerase |
| 911 | AAEL012014 | l-lactate dehydrogenase |
| 912 | AAEL012418 | deoxyribonuclease ii |
| 913 | AAEL009237 | glycoside hydrolases |
| 914 | AAEL012994 | glucose-6-phosphate isomerase |
| 915 | AAEL012455 | alcohol dehydrogenase |
| 916 | AAEL015020 | glycoside hydrolases |
| 917 | AAEL004778 | acyl-coa dehydrogenase |
| 918 | AAEL008865 | oligoribonuclease, mitochondrial |
| 919 | AAEL007893 | short chain type dehydrogenase |
| 920 | AAEL014139 | proacrosin, putative |
| 921 | AAEL008668 | Clip-Domain Serine Protease family B. |
| 922 | AAEL008124 | possible RNA methyltransferase, putative |
| 923 | AAEL014353 | conserved hypothetical protein |
| 924 | AAEL003026 | regulator of g protein signaling |
| 925 | AAEL002663 | kuzbanian |
| 926 | AAEL008202 | serine-type enodpeptidase, |
| 927 | AAEL004138 | signal peptide peptidase |
| 928 | AAEL004980 | conserved hypothetical protein |
| 929 | AAEL003733 | hypothetical protein |
| 930 | AAEL001540 | ubiquitin specific protease |
| 931 | AAEL003965 | calpain 4, 6, 7, invertebrate |
| 932 | AAEL006542 | retinoid-inducible serine carboxypeptidase (serine carboxypeptidase |
| 933 | AAEL013605 | hypothetical protein |
| 934 | AAEL005107 | hypothetical protein |
| 935 | AAEL015272 | zinc carboxypeptidase |
| 936 | AAEL008769 | serine-type enodpeptidase, |
| 937 | AAEL003967 | calpain 4, 6, 7, invertebrate |
| 938 | AAEL010989 | hypothetical protein |
| 939 | AAEL005342 | conserved hypothetical protein |
| 940 | AAEL011850 | cytochrome P450 |
| 941 | AAEL006386 | mitochondrial 39S ribosomal protein L39 |
| 942 | AAEL010226 | daughterless |
| 943 | AAEL004589 | small calcium-binding mitochondrial carrier, putative |
| 944 | AAEL014608 | cytochrome P450 |
| 945 | AAEL007235 | mitochondrial uncoupling protein |
| 946 | AAEL003215 | heat shock factor binding protein, putative |
| 947 | AAEL010546 | heat shock factor binding protein, putative |
| 948 | AAEL000895 | peroxisome biogenesis factor 1 (peroxin-1) |
| 949 | AAEL001024 | mitochondrial carrier protein |
| 950 | AAEL006318 | short-chain dehydrogenase |
| 951 | AAEL013350 | heat shock protein 26 kD, putative |
| 952 | AAEL007046 | mitochondrial brown fat uncoupling protein |
| 953 | AAEL010372 | aldehyde oxidase |
| 954 | AAEL013693 | excision repair cross-complementing 1 ercc1 |
| 955 | AAEL012308 | hypothetical protein |
| 956 | AAEL003195 | Carboxy/choline esterase Alpha Esterase |
| 957 | AAEL010677 | oxidoreductase |
| 958 | AAEL010380 | aldehyde oxidase |
| 959 | AAEL002523 | mitochondrial inner membrane protein translocase, 9 kD-subunit, putative |
| 960 | AAEL002486 | mitochondrial inner membrane protein translocase, 9 kD-subunit, putative |
| 961 | AAEL004829 | NADH dehydrogenase, putative |
| 962 | AAEL011752 | glutathione transferase |
| 963 | AAEL006984 | cytochrome P450 |
| 964 | AAEL007355 | mitochondrial ribosomal protein, S18A, putative |
| 965 | AAEL003770 | conserved hypothetical protein |
| 966 | AAEL002783 | mitochondrial ribosomal protein, L37, putative |
| 967 | AAEL004450 | cytochrome b5, putative |
| 968 | AAEL008601 | mitochondrial ribosomal protein, L28, putative |
| 969 | AAEL007946 | glutathione transferase |
| 970 | AAEL013790 | mitochondrial ribosomal protein, L50, putative |
| 971 | AAEL005113 | Carboxy/choline esterase Alpha Esterase |
| 972 | AAEL004716 | chromodomain helicase DNA binding protein |
| 973 | AAEL007923 | eukaryotic translation initiation factor 4 gamma |
| 974 | AAEL010467 | heterogeneous nuclear ribonucleoprotein |
| 975 | AAEL004119 | ribonuclease p/mrp subunit |
| 976 | AAEL013653 | tata-box binding protein |
| 977 | AAEL010222 | transcription factor GATA-4 (GATA binding factor-4) |
| 978 | AAEL015263 | RNA and export factor binding protein |
| 979 | AAEL002853 | ccaat/enhancer binding protein |
| 980 | AAEL003800 | hypothetical protein |
| 981 | AAEL002551 | DNA topoisomerase type I |
| 982 | AAEL008738 | DEAD box ATP-dependent RNA helicase |
| 983 | AAEL000193 | histone-lysine n-methyltransferase |
| 984 | AAEL001912 | forkhead protein/forkhead protein domain |
| 985 | AAEL002359 | homeobox protein onecut |
| 986 | AAEL006473 | arginine/serine-rich splicing factor |
| 987 | AAEL007801 | exonuclease |
| 988 | AAEL003985 | small nuclear ribonucleoprotein, core, putative |
| 989 | AAEL010642 | poly(A)-binding protein, putative |
| 990 | AAEL001280 | 28S ribosomal protein S15, mitochondrial precursor |
| 991 | AAEL015236 | signal recognition particle, 9 kD-subunit, putative |
| 992 | AAEL015045 | transcription factor IIIA, putative |
| 993 | AAEL001363 | small nuclear ribonucleoprotein Sm D1, putative |
| 994 | AAEL005888 | DNA polymerase theta |
| 995 | AAEL007885 | translation initiation factor-3 (IF3), putative |
| 996 | AAEL006582 | calcium-transporting ATPase sarcoplasmic/endoplasmic reticulum type |
| 997 | AAEL005392 | dihydropyridine-sensitive 1-type calcium channel |
| 998 | AAEL003393 | ATP synthase beta subunit |
| 999 | AAEL008928 | inward-rectifying potassium channel |
| 1000 | AAEL010361 | rer1 protein |
| 1001 | AAEL005043 | ATP-dependent bile acid permease |
| 1002 | AAEL010470 | calcineurin b subunit |
| 1003 | AAEL004141 | phosphatidylinositol transfer protein/retinal degeneration b protein |
| 1004 | AAEL011657 | importin alpha |
| 1005 | AAEL007971 | tyrosine transporter |
| 1006 | AAEL009088 | liquid facets |
| 1007 | AAEL000567 | Facilitated trehalose transporter Tret1 |
| 1008 | AAEL003789 | exportin, putative |
| 1009 | AAEL010608 | succinate dehydrogenase |
| 1010 | AAEL013704 | beta-arrestin 1, |
| 1011 | AAEL013614 | clathrin heavy chain |
| 1012 | AAEL002061 | cation-transporting ATPase 13a1 (g-box binding protein) |
| 1013 | AAEL000417 | monocarboxylate transporter |
| 1014 | AAEL004743 | multidrug resistance protein 2 (ATP-binding cassette protein c) |
| 1015 | AAEL002412 | monocarboxylate transporter |
| 1016 | AAEL008587 | glutamate receptor, ionotropic, N-methyl d-aspartate |
| 1017 | AAEL010481 | sugar transporter |
| 1018 | AAEL006047 | histamine-gated chloride channel subunit |
| 1019 | AAEL010823 | ATP synthase delta chain |
| 1020 | AAEL004025 | glucose dehydrogenase |
| 1021 | AAEL003626 | sodium/chloride dependent amino acid transporter |
| 1022 | AAEL005859 | amino acid transporter |
| 1023 | AAEL000435 | THO complex, putative |
| 1024 | AAEL004620 | sorting nexin |
| 1025 | AAEL011423 | sugar transporter |
| 1026 | AAEL013215 | sulfonylurea receptor/ABC transporter |
| 1027 | AAEL001313 | conserved hypothetical protein |
| 1028 | AAEL003025 | hypothetical protein |
| 1029 | AAEL004447 | hypothetical protein |
| 1030 | AAEL004149 | hypothetical protein |
| 1031 | AAEL011064 | hypothetical protein |
| 1032 | AAEL002757 | hypothetical protein |
| 1033 | AAEL009776 | conserved hypothetical protein |
| 1034 | AAEL002835 | conserved hypothetical protein |
| 1035 | AAEL014693 | conserved hypothetical protein |
| 1036 | AAEL012203 | conserved hypothetical protein |
| 1037 | AAEL005867 | conserved hypothetical protein |
| 1038 | AAEL007539 | hypothetical protein |
| 1039 | AAEL001409 | conserved hypothetical protein |
| 1040 | AAEL002963 | conserved hypothetical protein |
| 1041 | AAEL010308 | hypothetical protein |
| 1042 | AAEL009386 | hypothetical protein |
| 1043 | AAEL011153 | hypothetical protein |
| 1044 | AAEL006863 | hypothetical protein |
| 1045 | AAEL001786 | hypothetical protein |
| 1046 | AAEL007606 | hypothetical protein |
| 1047 | AAEL007242 | conserved hypothetical protein |
| 1048 | AAEL008054 | conserved hypothetical protein |
| 1049 | AAEL014415 | conserved hypothetical protein |
| 1050 | AAEL011703 | conserved hypothetical protein |
| 1051 | AAEL002169 | conserved hypothetical protein |
| 1052 | AAEL002168 | conserved hypothetical protein |
| 1053 | AAEL010445 | hypothetical protein |
| 1054 | AAEL004583 | conserved hypothetical protein |
| 1055 | AAEL003373 | hypothetical protein |
| 1056 | AAEL005843 | conserved hypothetical protein |
| 1057 | AAEL012302 | conserved hypothetical protein |
| 1058 | AAEL012293 | conserved hypothetical protein |
| 1059 | AAEL007817 | hypothetical protein |
| 1060 | AAEL002327 | hypothetical protein |
| 1061 | AAEL010015 | hypothetical protein |
| 1062 | AAEL004800 | hypothetical protein |
| 1063 | AAEL013800 | conserved hypothetical protein |
| 1064 | AAEL007454 | conserved hypothetical protein |
| 1065 | AAEL001581 | conserved hypothetical protein |
| 1066 | AAEL001376 | hypothetical protein |
| 1067 | AAEL004854 | conserved hypothetical protein |
| 1068 | AAEL007015 | conserved hypothetical protein |
| 1069 | AAEL000258 | conserved hypothetical protein |
| 1070 | AAEL002543 | conserved hypothetical protein |
| 1071 | AAEL006520 | hypothetical protein |
| 1072 | AAEL006275 | conserved hypothetical protein |
| 1073 | AAEL014294 | conserved hypothetical protein |
| 1074 | AAEL014022 | conserved hypothetical protein |
| 1075 | AAEL004832 | conserved hypothetical protein |
| 1076 | AAEL000316 | hypothetical protein |
| 1077 | AAEL012754 | hypothetical protein |
| 1078 | AAEL005007 | hypothetical protein |
| 1079 | AAEL009163 | conserved hypothetical protein |
| 1080 | AAEL001495 | conserved hypothetical protein |
| 1081 | AAEL004934 | hypothetical protein |
| 1082 | AAEL007071 | conserved hypothetical protein |
| 1083 | AAEL004363 | conserved hypothetical protein |
| 1084 | AAEL007433 | conserved hypothetical protein |
| 1085 | AAEL010025 | conserved hypothetical protein |
| 1086 | AAEL002984 | hypothetical protein |
| 1087 | AAEL003126 | conserved hypothetical protein |
| 1088 | AAEL008154 | hypothetical protein |
| 1089 | AAEL000649 | conserved hypothetical protein |
| 1090 | AAEL013724 | conserved hypothetical protein |
| 1091 | AAEL012854 | hypothetical protein |
| 1092 | AAEL012858 | hypothetical protein |
| 1093 | AAEL014950 | spaetzle-like cytokine |
| 1094 | AAEL011066 | hypothetical protein |
| 1095 | AAEL009896 | hypothetical protein |
| 1096 | AAEL001727 | hypothetical protein |
| 1097 | AAEL001921 | hypothetical protein |
| 1098 | AAEL012396 | conserved hypothetical protein |
| 1099 | AAEL005233 | hypothetical protein |
| 1100 | AAEL015446 | conserved hypothetical protein |
| 1101 | AAEL007550 | conserved hypothetical protein |
| 1102 | AAEL011886 | hypothetical protein |
| 1103 | AAEL006761 | hypothetical protein |
| 1104 | AAEL003778 | conserved hypothetical protein |
| 1105 | AAEL002931 | hypothetical protein |
| 1106 | AAEL013303 | conserved hypothetical protein |
| 1107 | AAEL007414 | conserved hypothetical protein |
| 1108 | AAEL003693 | hypothetical protein |
| 1109 | AAEL010150 | conserved hypothetical protein |
| 1110 | AAEL004498 | hypothetical protein |
| 1111 | AAEL011598 | hypothetical protein |
| 1112 | AAEL003798 | hypothetical protein |
| 1113 | AAEL010746 | hypothetical protein |
| 1114 | AAEL011266 | hypothetical protein |
| 1115 | AAEL001271 | conserved hypothetical protein |
| 1116 | AAEL005193 | hypothetical protein |
| 1117 | AAEL007805 | hypothetical protein |
| 1118 | AAEL013304 | conserved hypothetical protein |
| 1119 | AAEL008142 | hypothetical protein |
| 1120 | AAEL009322 | hypothetical protein |
| 1121 | AAEL004018 | conserved hypothetical protein |
| 1122 | AAEL006606 | hypothetical protein |
| 1123 | AAEL007437 | conserved hypothetical protein |
| 1124 | AAEL013684 | conserved hypothetical protein |
| 1125 | AAEL007751 | predicted protein |
| 1126 | AAEL005623 | hypothetical protein |
| 1127 | AAEL006896 | hypothetical protein |
| 1128 | AAEL003190 | hypothetical protein |
| 1129 | AAEL007886 | hypothetical protein |
| 1130 | AAEL004943 | conserved hypothetical protein |
| 1131 | AAEL004561 | conserved hypothetical protein |
| 1132 | AAEL005264 | hypothetical protein |
| 1133 | AAEL011330 | conserved hypothetical protein |
| 1134 | AAEL000186 | conserved hypothetical protein |
| 1135 | AAEL012931 | conserved hypothetical protein |
| 1136 | AAEL000561 | hypothetical protein |
| 1137 | AAEL002921 | conserved hypothetical protein |
| 1138 | AAEL001162 | conserved hypothetical protein |
| 1139 | AAEL012361 | conserved hypothetical protein |
| 1140 | AAEL013426 | hypothetical protein |
| 1141 | AAEL013935 | conserved hypothetical protein |
| 1142 | AAEL003264 | conserved hypothetical protein |
| 1143 | AAEL005972 | hypothetical protein |
| 1144 | AAEL008680 | Ubiquitin-related modifier 1 homolog |
| 1145 | AAEL003088 | hypothetical protein |
| 1146 | AAEL009270 | hypothetical protein |
| 1147 | AAEL012878 | hypothetical protein |
| 1148 | AAEL013895 | conserved hypothetical protein |
| 1149 | AAEL003816 | hypothetical protein |
| 1150 | AAEL011636 | hypothetical protein |
| 1151 | AAEL004775 | conserved hypothetical protein |
| 1152 | AAEL006225 | conserved hypothetical protein |
| 1153 | AAEL009892 | conserved hypothetical protein |
| 1154 | AAEL011640 | hypothetical protein |
| 1155 | AAEL009767 | conserved hypothetical protein |
| 1156 | AAEL003113 | conserved hypothetical protein |
| 1157 | AAEL008557 | conserved hypothetical protein |
| 1158 | AAEL002856 | conserved hypothetical protein |
| 1159 | AAEL004250 | conserved hypothetical protein |
| 1160 | AAEL003451 | conserved hypothetical protein |
| 1161 | AAEL010249 | conserved hypothetical protein |
| 1162 | AAEL014937 | hypothetical protein |
| 1163 | AAEL004552 | conserved hypothetical protein |
| 1164 | AAEL005000 | conserved hypothetical protein |
| 1165 | AAEL010768 | conserved hypothetical protein |
| 1166 | AAEL004960 | hypothetical protein |
| 1167 | AAEL003822 | conserved hypothetical protein |
| 1168 | AAEL004473 | conserved hypothetical protein |
| 1169 | AAEL009952 | hypothetical protein |
| 1170 | AAEL002109 | conserved hypothetical protein |
| 1171 | AAEL007849 | conserved hypothetical protein |
| 1172 | AAEL010507 | hypothetical protein |
| 1173 | AAEL015340 | hypothetical protein |
| 1174 | AAEL013725 | conserved hypothetical protein |
| 1175 | AAEL000526 | conserved hypothetical protein |
| 1176 | AAEL010770 | hypothetical protein |
| 1177 | AAEL015507 | conserved hypothetical protein |
| 1178 | AAEL001573 | conserved hypothetical protein |
| 1179 | AAEL007045 | conserved hypothetical protein |
| 1180 | AAEL008403 | conserved hypothetical protein |
| 1181 | AAEL007859 | conserved hypothetical protein |
| 1182 | AAEL011635 | conserved hypothetical protein |
| 1183 | AAEL008059 | conserved hypothetical protein |
| 1184 | AAEL014633 | conserved hypothetical protein |
| 1185 | AAEL011119 | hypothetical protein |
| 1186 | AAEL005640 | conserved hypothetical protein |
| 1187 | AAEL013740 | hypothetical protein |
| 1188 | AAEL009440 | conserved hypothetical protein |
| 1189 | AAEL002087 | conserved hypothetical protein |
| 1190 | AAEL008436 | conserved hypothetical protein |
| 1222 | AY713296.1 | Dicer-2 |

[0133] Exemplary pathogen gene products that may be downregulated according to this aspect of the present invention include, but are not limited to, a virus gene product, a nematode gene product, a protozoa gene product and a bacteria gene product.

[0134] According to one embodiment, the pathogen gene product comprises a viral gene product including, but not limited to, a La Crosse encephalitis virus gene, an Eastern equine encephalitis virus gene, a Japanese encephalitis virus gene, a Western equine encephalitis virus gene, a St. Louis encephalitis virus gene, a Tick-borne encephalitis virus gene, a Ross River virus gene, a Venezuelan equine encephalitis virus gene, a Chikungunya virus gene, a West Nile virus gene, a Dengue virus gene, a Yellow fever virus gene, a Bluetongue disease virus gene, a Sindbis Virus gene, a Rift Valley Fever virus gene, a Colorado tick fever virus gene, a Murray Valley encephalitis virus gene and an Oropouche virus gene.

[0135] Table 1C, below, provides a partial list of pathogen genes associated with infection and/or growth of a pathogen in a mosquito, which can be potential targets for reduction in expression by introducing the nucleic acid agent of the invention.

TABLE 1C
List of pathogen target genes

| | | SEQ |
|---|---|---|
| Pathogen gene | Accession no. | ID NO: |
| Yellow fever virus | NC_002031.1 | 167 |
| St. Louis encephalitis virus | NC_007580.2 | 168 |
| West Nile virus | NC_009942.1 | 169 |
| | NC_001563.2 | 170 |
| Dengue virus 4 | NC_002640.1 | 171 |
| Dengue virus 3 | NC_001475.2 | 172 |
| Dengue virus 1 | NC_001477.1 | 173 |
| Dengue virus 2 | NC_001474.2 | 174 |
| Eastern equine encephalitis virus strain PE6 | AY722102.1 | 175 |
| Western equine encephalomyelitis virus | NC_003908.1 | 176 |
| Venezuelan equine encephalitis virus | L01442.2 | 177 |
| Ross River virus (RRV) (strain NB5092) | M20162.1 | 178 |
| Sindbis virus | NC_001547.1 | 179 |
| Chikungunya virus | NC_004162.2 | 180 |
| Japanese encephalitis virus | NC_001437.1 | 181 |
| La Crosse virus segment S | NC_004110.1 | 182 |
| La Crosse virus segment M | NC_004109.1 | 183 |
| La Crosse virus segment L | NC_004108.1 | 184 |
| Rift Valley fever virus segment S | NC_014395.1 | 185 |
| Rift Valley fever virus segment M | NC_014396.1 | 186 |
| Rift Valley fever virus segment L | NC_014397.1 | 187 |
| Colorado tick fever virus - segment 12 | NC_004190.1 | 188 |
| Colorado tick fever virus - segment 10 | NC_004189.1 | 189 |
| Colorado tick fever virus - segment 8 | NC_004188.1 | 190 |
| Colorado tick fever virus - segment 7 | NC_004187.1 | 191 |
| Colorado tick fever virus - segment 6 | NC_004186.1 | 192 |
| Colorado tick fever virus - segment 5 | NC_004185.1 | 193 |
| Colorado tick fever virus - segment 4 | NC_004184.1 | 194 |
| Colorado tick fever virus - segment 3 | NC_004183.1 | 195 |
| Colorado tick fever virus - segment 2 | NC_004182.1 | 196 |
| Colorado tick fever virus - segment 9 | NC_004180.1 | 197 |
| Colorado tick fever virus - segment 1 | NC_004181.1 | 198 |
| Colorado tick fever virus - segment 11 | NC_004191.1 | 199 |
| Murray Valley encephalitis virus | NC_000943.1 | 200 |
| Flock House virus B2 protein | AAEL008297 | 1221 |

[0136] It will be appreciated that more than one gene may be targeted in order to maximize the resistant effect of the mosquitoes.

[0137] As used herein, the term “downregulates an expression” or “downregulating expression” refers to causing, directly or indirectly, reduction in the transcription of a desired gene, reduction in the amount, stability or translatability of transcription products (e.g. RNA) of the gene, and/or reduction in translation of the polypeptide(s) encoded by the desired gene.

[0138] Downregulating expression of a mosquito or a pathogen gene product of a mosquito can be monitored, for example, by direct detection of gene transcripts (for example, by PCR), by detection of polypeptide(s) encoded by the gene (for example, by Western blot or immunoprecipitation), by detection of biological activity of polypeptides encode by the gene (for example, catalytic activity, ligand binding, and the like), or by monitoring changes in the mosquitoes (for example, changes in motility of the mosquito, changes in viability, etc). Additionally or alternatively downregulating expression of a mosquito or a pathogen gene product may be monitored by measuring pathogen levels (e.g. viral levels, bacterial levels etc.) in the mosquitoes as compared to wild type (i.e. control) mosquitoes not treated by the agents of the invention.

[0139] Thus, according to some aspects of the invention there is provided an isolated nucleic acid agent comprising a nucleic acid sequence which specifically downregulates the expression of at least one mosquito or pathogen gene product.

[0140] According to one embodiment, the agent is a polynucleotide agent, such as an RNA silencing agent.

[0141] As used herein, the term “RNA silencing agent” refers to an RNA which is capable of inhibiting or “silencing” the expression of a target gene. In certain embodiments, the RNA silencing agent is capable of preventing complete processing (e.g, the full translation and/or expression) of an mRNA molecule through a post-transcriptional silencing mechanism. RNA silencing agents include noncoding RNA molecules, for example RNA duplexes comprising paired strands, as well as precursor RNAs from which such small non-coding RNAs can be generated. Exemplary RNA silencing agents include dsRNAs such as siRNAs, miRNAs and shRNAs. In one embodiment, the RNA silencing agent is capable of inducing RNA interference. In another embodiment, the RNA silencing agent is capable of mediating translational repression.

[0142] In some embodiments of the invention, the nucleic acid agent is a double stranded RNA (dsRNA). As used herein the term “dsRNA” relates to two strands of anti-parallel polyribonucleic acids held together by base pairing. The two strands can be of identical length or of different lengths provided there is enough sequence homology between the two strands that a double stranded structure is formed with at least 80%, 90%, 95% or 100% complementarity over the entire length. According to an embodiment of the invention, there are no overhangs for the dsRNA molecule. According to another embodiment of the invention, the dsRNA molecule comprises overhangs. According to other embodiments, the strands are aligned such that there are at least 1, 2, or 3 bases at the end of the strands which do not align (i.e., for which no complementary bases occur in the opposing strand) such that an overhang of 1, 2 or 3 residues occurs at one or both ends of the duplex when strands are annealed.

[0143] It will be noted that the dsRNA can be defined in terms of the nucleic acid sequence of the DNA encoding the target gene transcript, and it is understood that a dsRNA sequence corresponding to the coding sequence of a gene comprises an RNA complement of the gene's coding sequence, or other sequence of the gene which is transcribed into RNA.

[0144] The inhibitory RNA sequence can be greater than 90% identical, or even 100% identical, to the portion of the target gene transcript. Alternatively, the duplex region of the RNA may be defined functionally as a nucleotide sequence that is capable of hybridizing with a portion of the target gene transcript under stringent conditions (e.g., 400 mM NaCl, 40 mM PIPES pH 6.4, 1 mM EDTA, 60 degrees C. hybridization for 12-16 hours; followed by washing). The length of the double-stranded nucleotide sequences complementary to the target gene transcript may be at least about 18, 19, 21, 25, 50, 100, 200, 300, 400, 491, 500, 550, 600, 650, 700, 750, 800, 900, 1000 or more bases. In some embodiments of the invention, the length of the double-stranded nucleotide sequence is approximately from about 18 to about 1000, about 18 to about 750, about 18 to about 510, about 18 to about 400, about 18 to about 250 nucleotides in length.

[0145] The term “corresponds to” as used herein means a polynucleotide sequence homologous to all or a portion of a reference polynucleotide sequence. In contradistinction, the term “complementary to” is used herein to mean that the complementary sequence is homologous to all or a portion of a reference polynucleotide sequence. For example, the nucleotide sequence “TATAC” corresponds to a reference sequence “TATAC” and is complementary to a reference sequence “GTATA”.

[0146] The present teachings relate to various lengths of dsRNA, whereby the shorter version i.e., x is shorter or equals 50 bp (e.g., 17-50), is referred to as siRNA or miRNA. Longer dsRNA molecules of 51-600 are referred to herein as dsRNA, which can be further processed for siRNA molecules. According to some embodiments, the nucleic acid sequence of the dsRNA is greater than 15 base pairs in length. According to yet other embodiments, the nucleic acid sequence of the dsRNA is 19-25 base pairs in length, 30-100 base pairs in length, 100-250 base pairs in length or 100-500 base pairs in length. According to still other embodiments, the dsRNA is 500-800 base pairs in length, 700-800 base pairs in length, 300-600 base pairs in length, 350-500 base pairs in length or 400-450 base pairs in length. In some embodiments, the dsRNA is 400 base pairs in length. In some embodiments, the dsRNA is 750 base pairs in length.

[0147] The term “siRNA” refers to small inhibitory RNA duplexes (generally between 17-30 basepairs, but also longer e.g., 31-50 bp) that induce the RNA interference (RNAi) pathway. Typically, siRNAs are chemically synthesized as 21 mers with a central 19 bp duplex region and symmetric 2-base 3′-overhangs on the termini, although it has been recently described that chemically synthesized RNA duplexes of 25-30 base length can have as much as a 100-fold increase in potency compared with 21 mers at the same location. The observed increased potency obtained using longer RNAs in triggering RNAi is theorized to result from providing Dicer with a substrate (27 mer) instead of a product (21 mer) and that this improves the rate or efficiency of entry of the siRNA duplex into RISC.

[0148] It has been found that position of the 3′-overhang influences potency of a siRNA and asymmetric duplexes having a 3′-overhang on the antisense strand are generally more potent than those with the 3′-overhang on the sense strand (Rose et al., 2005). This can be attributed to asymmetrical strand loading into RISC, as the opposite efficacy patterns are observed when targeting the antisense transcript.

[0149] The strands of a double-stranded interfering RNA (e.g., a siRNA) may be connected to form a hairpin or stem-loop structure (e.g., a shRNA). Thus, as mentioned the RNA silencing agent of some embodiments of the invention may also be a short hairpin RNA (shRNA).

[0150] The term “shRNA”, as used herein, refers to an RNA agent having a stem-loop structure, comprising a first and second region of complementary sequence, the degree of complementarity and orientation of the regions being sufficient such that base pairing occurs between the regions, the first and second regions being joined by a loop region, the loop resulting from a lack of base pairing between nucleotides (or nucleotide analogs) within the loop region. The number of nucleotides in the loop is a number between and including 3 to 23, or 5 to 15, or 7 to 13, or 4 to 9, or 9 to 11. Some of the nucleotides in the loop can be involved in base-pair interactions with other nucleotides in the loop. Examples of oligonucleotide sequences that can be used to form the loop include 5′-UUCAAGAGA-3′ (Brummelkamp, T. R. et al. (2002) Science 296: 550, SEQ ID NO: 165) and 5′-UUUGUGUAG-3′ (Castanotto, D. et al. (2002) RNA 8:1454, SEQ ID NO: 166). It will be recognized by one of skill in the art that the resulting single chain oligonucleotide forms a stem-loop or hairpin structure comprising a double-stranded region capable of interacting with the RNAi machinery.

[0151] As used herein, the phrase “microRNA (also referred to herein interchangeably as “miRNA” or “miR”) or a precursor thereof” refers to a microRNA (miRNA) molecule acting as a post-transcriptional regulator. Typically, the miRNA molecules are RNA molecules of about 20 to 22 nucleotides in length which can be loaded into a RISC complex and which direct the cleavage of another RNA molecule, wherein the other RNA molecule comprises a nucleotide sequence essentially complementary to the nucleotide sequence of the miRNA molecule.

[0152] Typically, a miRNA molecule is processed from a “pre-miRNA” or as used herein a precursor of a pre-miRNA molecule by proteins, such as DCL proteins, and loaded onto a RISC complex where it can guide the cleavage of the target RNA molecules.

[0153] Pre-microRNA molecules are typically processed from pri-microRNA molecules (primary transcripts). The single stranded RNA segments flanking the pre-microRNA are important for processing of the pri-miRNA into the pre-miRNA. The cleavage site appears to be determined by the distance from the stem-ssRNA junction (Han et al. 2006, Cell 125, 887-901, 887-901).

[0154] As used herein, a “pre-miRNA” molecule is an RNA molecule of about 100 to about 200 nucleotides, preferably about 100 to about 130 nucleotides which can adopt a secondary structure comprising an imperfect double stranded RNA stem and a single stranded RNA loop (also referred to as “hairpin”) and further comprising the nucleotide sequence of the miRNA (and its complement sequence) in the double stranded RNA stem. According to a specific embodiment, the miRNA and its complement are located about 10 to about 20 nucleotides from the free ends of the miRNA double stranded RNA stem. The length and sequence of the single stranded loop region are not critical and may vary considerably, e.g. between 30 and 50 nucleotides in length. The complementarity between the miRNA and its complement need not be perfect and about 1 to 3 bulges of unpaired nucleotides can be tolerated. The secondary structure adopted by an RNA molecule can be predicted by computer algorithms conventional in the art such as mFOLD. The particular strand of the double stranded RNA stem from the pre-miRNA which is released by DCL activity and loaded onto the RISC complex is determined by the degree of complementarity at the 5′ end, whereby the strand which at its 5′ end is the least involved in hydrogen bounding between the nucleotides of the different strands of the cleaved dsRNA stem is loaded onto the RISC complex and will determine the sequence specificity of the target RNA molecule degradation. However, if empirically the miRNA molecule from a particular synthetic pre-miRNA molecule is not functional (because the “wrong” strand is loaded on the RISC complex), it will be immediately evident that this problem can be solved by exchanging the position of the miRNA molecule and its complement on the respective strands of the dsRNA stem of the pre-miRNA molecule. As is known in the art, binding between A and U involving two hydrogen bounds, or G and U involving two hydrogen bounds is less strong that between G and C involving three hydrogen bounds.

[0155] Naturally occurring miRNA molecules may be comprised within their naturally occurring pre-miRNA molecules but they can also be introduced into existing pre-miRNA molecule scaffolds by exchanging the nucleotide sequence of the miRNA molecule normally processed from such existing pre-miRNA molecule for the nucleotide sequence of another miRNA of interest. The scaffold of the pre-miRNA can also be completely synthetic. Likewise, synthetic miRNA molecules may be comprised within, and processed from, existing pre-miRNA molecule scaffolds or synthetic pre-miRNA scaffolds. Some pre-miRNA scaffolds may be preferred over others for their efficiency to be correctly processed into the designed microRNAs, particularly when expressed as a chimeric gene wherein other DNA regions, such as untranslated leader sequences or transcription termination and polyadenylation regions are incorporated in the primary transcript in addition to the pre-microRNA.

[0156] According to the present teachings, the dsRNA molecules may be naturally occurring or synthetic.

[0157] The dsRNA can be a mixture of long and short dsRNA molecules such as, dsRNA, siRNA, siRNA+dsRNA, siRNA+miRNA, or a combination of same.

[0158] The nucleic acid agent is designed for specifically targeting a target gene of interest (e.g. a mosquito gene or a gene of a pathogen). It will be appreciated that the nucleic acid agent can be used to downregulate one or more target genes (e.g. as described in detail above). If a number of target genes are targeted, a heterogenic composition which comprises a plurality of nucleic acid agents for targeting a number of target genes is used. Alternatively the plurality of nucleic acid agents is separately formulated. According to a specific embodiment, a number of distinct nucleic acid agent molecules for a single target are used, which may be used separately or simultaneously (i.e., co-formulation) applied.

[0159] For example, in order to silence the expression of an mRNA of interest, synthesis of the dsRNA suitable for use with some embodiments of the invention can be selected as follows. First, the mRNA sequence is scanned including the 3′ UTR and the 5′ UTR. Second, the mRNA sequence is compared to an appropriate genomic database using any sequence alignment software, such as the BLAST software available from the NCBI server (wwwdotncbidotnlmdotnihdotgov/BLAST/). Putative regions in the mRNA sequence which exhibit significant homology to other coding sequences are filtered out.

[0160] Qualifying target sequences are selected as template for dsRNA synthesis. Preferred sequences are those that have as little homology to other genes in the genome to reduce an “off-target” effect.

[0161] Exemplary dsRNA include, but are not limited to the dsRNA set forth in SEQ ID NO: 155-163.

[0162] According to one embodiment, the dsRNA targets a mosquito gene. According to a specific embodiment, the dsRNA targets Dicer-2 (as set forth in SEQ ID NO: 1222) and is set forth in SEQ ID NO: 1220.

[0163] According to one embodiment, the dsRNA targets C-type lectin (GCTL-1), AAEL000563 (base-pairs 90-425), as set forth in SEQ ID NO: 164.

[0164] According to another embodiment, the dsRNA specifically targets a gene selected from the group consisting of AAEL007698 (AuB), AAEL007823 (Argonaute-3) and Dicer-2.

[0165] According to one embodiment, the dsRNA targets a pathogen gene. According to a specific embodiment, the dsRNA targets Flock House virus B2 protein (AAEL008297) (as set forth in SEQ ID NO: 1221) and is set forth in SEQ ID NO: 1219.

[0166] According to one embodiment, the dsRNA is selected from the group consisting of SEQ ID NOs: 1211-1220.

[0167] It will be appreciated that the RNA silencing agent of some embodiments of the invention need not be limited to those molecules containing only RNA, but further encompasses chemically-modified nucleotides and non-nucleotides.

[0168] The dsRNA may be synthesized using any method known in the art, including either enzymatic syntheses or solid-phase syntheses. These are especially useful in the case of short polynucleotide sequences with or without modifications as explained above. Equipment and reagents for executing solid-phase synthesis are commercially available from, for example, Applied Biosystems. Any other means for such synthesis may also be employed; the actual synthesis of the oligonucleotides is well within the capabilities of one skilled in the art and can be accomplished via established methodologies as detailed in, for example: Sambrook, J. and Russell, D. W. (2001), “Molecular Cloning: A Laboratory Manual”; Ausubel, R. M. et al., eds. (1994, 1989), “Current Protocols in Molecular Biology,” Volumes I-III, John Wiley & Sons, Baltimore, Md.; Perbal, B. (1988), “A Practical Guide to Molecular Cloning,” John Wiley & Sons, New York; and Gait, M. J., ed. (1984), “Oligonucleotide Synthesis”; utilizing solid-phase chemistry, e.g. cyanoethyl phosphoramidite followed by deprotection, desalting, and purification by, for example, an automated trityl-on method or HPLC.

[0169] According to a specific embodiment, the nucleic acid agent is provided to the mosquito in a configuration devoid of a heterologous promoter for driving recombinant expression of the dsRNA (exogenous), rendering the nucleic acid molecule of the instant invention a naked molecule. The nucleic acid agent may still comprise modifications that may affect its stability and bioavailability (e.g., PNA).

[0170] The term “recombinant expression” refers to an expression from a nucleic acid construct.

[0171] As used herein “devoid of a heterologous promoter for driving expression of the dsRNA” means that the molecule doesn't include a cis-acting regulatory sequence (e.g., heterologous) transcribing the dsRNA. As used herein the term “heterologous” refers to exogenous, not-naturally occurring within a native cell of the mosquito or in a cell in which the dsRNA is fed to the larvae or mosquito (such as by position of integration, or being non-naturally found within the cell).

[0172] The nucleic acid agent can be further comprised within a nucleic acid construct comprising additional regulatory elements. Thus, according to some embodiments of aspects of the invention there is provided a nucleic acid construct comprising isolated nucleic acid agent comprising a nucleic acid sequence which specifically reduces the expression of at least one mosquito or pathogen gene product.

[0173] Although the instant teachings mainly concentrate on the use of dsRNA which is not comprised in or transcribed from an expression vector (naked), the present teachings also contemplate an embodiment wherein the nucleic acid agent is ligated into a nucleic acid construct comprising additional regulatory elements. Thus, according to some embodiments of the invention there is provided a nucleic acid construct comprising an isolated nucleic acid agent comprising a nucleic acid sequence.

[0174] For transcription from an expression cassette, a regulatory region (e.g., promoter, enhancer, silencer, leader, intron and polyadenylation) may be used to modulate the transcription of the RNA strand (or strands). Therefore, in one embodiment, there is provided a nucleic acid construct comprising the nucleic acid agent. The nucleic acid construct can have polynucleotide sequences constructed to facilitate transcription of the RNA molecules of the present invention operably linked to one or more promoter sequences functional in a mosquito cell. The polynucleotide sequences may be placed under the control of an endogenous promoter normally present in the mosquito genome. The polynucleotide sequences of the present invention, under the control of an operably linked promoter sequence, may further be flanked by additional sequences that advantageously affect its transcription and/or the stability of a resulting transcript. Such sequences are generally located upstream of the promoter and/or downstream of the 3′ end of the expression construct. The term “operably linked”, as used in reference to a regulatory sequence and a structural nucleotide sequence, means that the regulatory sequence causes regulated expression of the linked structural nucleotide sequence. “Regulatory sequences” or “control elements” refer to nucleotide sequences located upstream, within, or downstream of a structural nucleotide sequence, and which influence the timing and level or amount of transcription, RNA processing or stability, or translation of the associated structural nucleotide sequence. Regulatory sequences may include promoters, translation leader sequences, introns, enhancers, stem-loop structures, repressor binding sequences, termination sequences, pausing sequences, polyadenylation recognition sequences, and the like.

[0175] It will be appreciated that the nucleic acid agents can be delivered to the mosquitoes in a variety of ways.

[0176] According to one embodiment, the nucleic acid agents are delivered to mosquito larvae.

[0177] According to one embodiment, the nucleic acid agents are delivered to adult mosquitoes.

[0178] According to one embodiment, the composition of some embodiments comprises cells, which comprise the nucleic acid agent.

[0179] As used herein the term “cell” or “cells” refers to a mosquito ingestible cell (e.g. mosquito-larva ingestible cell or adult mosquito-ingestible cell).

[0180] Examples of such cells include, but are not limited to, cells of phytoplankton (e.g., algae), fungi (e.g., Legendium giganteum), bacteria, zooplankton such as rotifers, and blood cells (e.g. red blood cells).

[0181] Specific examples include, bacteria (e.g., cocci and rods), filamentous algae and detritus.

[0182] The choice of the cell may depend on the target mosquito (e.g. larvae).

[0183] Analyzing the gut content of mosquitoes and larvae may be used to elucidate their preferred diet. The skilled artisan knows how to characterize the gut content. Typically the gut content is stained such as by using a fluorochromatic stain, 4′,6-diamidino-2-phenylindole or DAPI.

[0184] Cells of particular interest are the prokaryotes and the lower eukaryotes, such as fungi. Illustrative prokaryotes, both Gram-negative and Gram-positive, include Enterobacteriaceae; Bacillaceae; Rhizobiceae; Spirillaceae; Lactobacillaceae; and phylloplane organisms such as members of the Pseudomonadaceae.

[0185] An exemplary list includes Bacillus spp., including B. megaterium, B. subtilis; B. cereus, Bacillus thuringiensis, Escherichia spp., including E. coli, and/or Pseudomonas spp., including P. cepacia, P. aeruginosa, and P. fluorescens.

[0186] Among eukaryotes are fungi, such as Phycomycetes and Ascomycetes, which includes yeast, such as Schizosaccharomyces; and Basidiomycetes, Rhodotorula, Aureobasidium, Sporobolomyces, Saccharomyces spp., and Sporobolomyces spp.

[0187] According to a specific embodiment, the cell is an algal cell.

[0188] Various algal species can be used in accordance with the teachings of the invention since they are a significant part of the diet for many kinds of mosquito larvae that feed opportunistically on microorganisms as well as on small aquatic animals such as rotifers.

[0189] Examples of algae that can be used in accordance with the present teachings include, but are not limited to, blue-green algae as well as green algae.

[0190] According to a specific embodiment, the algal cell is a cyanobacterium cell which is in itself toxic to mosquitoes as taught by Marten 2007 Biorational Control of Mosquitoes. American mosquito control association Bulletin No. 7.

[0191] Specific examples of algal cells which can be used in accordance with the present teachings are provided in Marten, G. G. (1986) Mosquito control by plankton management: the potential of indigestible green algae. Journal of Tropical Medicine and Hygiene, 89: 213-222, and further listed infra.

### Green Algae

[0192] Actinastrum hantzschii, Ankistrodesmus falcatus, Ankistrodesmus spiralis, Aphanochaete elegans, Chlamydomonas sp., Chlorella ellipsoidea, Chlorella pyrenoidosa, Chlorella variegate, Chlorococcum hypnosporum, Chodatella brevispina, Closterium acerosum, Closteriopsis acicularis, Coccochloris peniocystis, Crucigenia lauterbornii, Crucigenia tetrapedia, Coronastrum ellipsoideum, Cosmarium botrytis, Desmidium swartzii, Eudorina elegans, Gloeocystis gigas, Golenkinia minutissima, Gonium multicoccum, Nannochloris oculata, Oocystis marssonii, Oocystis minuta, Oocystis pusilla, Palmella texensis, Pandorina morum, Paulschulzia pseudovolvox, Pediastrum clathratum, Pediastrum duplex, Pediastrum simplex, Planktosphaeria gelatinosa, Polyedriopsis spinulosa, Pseudococcomyxa adhaerans, Quadrigula closterioides, Radiococcus nimbatus, Scenedesmus basiliensis, Spirogyra pratensis, Staurastrum gladiosum, Tetraedron bitridens, Trochiscia hystrix.

### Blue-Green Algae

[0193] Anabaena catenula, Anabaena spiroides, Chroococcus turgidus, Cylindrospermum licheniforme, Bucapsis sp. (U. Texas No. 1519), Lyngbya spiralis, Microcystis aeruginosa, Nodularia spumigena, Nostoc linckia, Oscillatoria lutea, Phormidiumfaveolarum, Spinilina platensis.

### Other

[0194] Compsopogon coeruleus, CTyptomonas ovata, Navicula pelliculosa.

[0195] The nucleic acid agent is introduced into the cells. To this end cells are typically selected exhibiting natural competence or are rendered competent, also referred to as artificial competence.

[0196] Competence is the ability of a cell to take up nucleic acid molecules e.g., the nucleic acid agent, from its environment.

[0197] A number of methods are known in the art to induce artificial competence.

[0198] Thus, artificial competence can be induced in laboratory procedures that involve making the cell passively permeable to the nucleic acid agent by exposing it to conditions that do not normally occur in nature. Typically the cells are incubated in a solution containing divalent cations (e.g., calcium chloride) under cold conditions, before being exposed to a heat pulse (heat shock).

[0199] Electroporation is another method of promoting competence. In this method the cells are briefly shocked with an electric field (e.g., 10-20 kV/cm) which is thought to create holes in the cell membrane through which the nucleic acid agent may enter. After the electric shock the holes are rapidly closed by the cell's membrane-repair mechanisms.

[0200] Yet alternatively or additionally, cells may be treated with enzymes to degrade their cell walls, yielding. These cells are very fragile but take up foreign nucleic acids at a high rate.

[0201] Exposing intact cells to alkali cations such as those of cesium or lithium allows the cells to take up nucleic acids. Improved protocols use this transformation method, while employing lithium acetate, polyethylene glycol, and single-stranded nucleic acids. In these protocols, the single-stranded molecule preferentially binds to the cell wall in yeast cells, preventing double stranded molecule from doing so and leaving it available for transformation.

[0202] Enzymatic digestion or agitation with glass beads may also be used to transform cells.

[0203] Particle bombardment, microprojectile bombardment, or biolistics is yet another method for artificial competence. Particles of gold or tungsten are coated with the nucleic acid agent and then shot into cells.

[0204] Astier C R Acad Sci Hebd Seances Acad Sci D. 1976 Feb. 23; 282(8):795-7, which is hereby incorporated by reference in its entirety, teaches transformation of a unicellular, facultative chemoheterotroph blue-green Algae, Aphanocapsa 6714. The recipient strain becomes competent when the growth reaches its second, slower, exponential phase.

[0205] Vazquez-Acevedo M¹Mitochondrion. 2014 Feb. 21. pii: S1567-7249(14)00019-1. doi: 10.1016/j.mito.2014.02.005, which is hereby incorporated by reference in its entirety, teaches transformation of algal cells e.g., Chlamydomonas reinhardtii, Polytomella sp. and Volvox carteri by generating import-competent mitochondria.

[0206] According to one embodiment, the composition of some embodiments comprises a feed suitable for adult mosquitoes.

[0207] Adult mosquitoes typically feed on blood (female mosquitoes) and nectar of flowers (male mosquitoes), but have been known to ingest non-natural feeds as well. Mosquitoes can be fed various foodstuffs including, but not limited to egg/soy protein mixture, carbohydrate foods such as sugar solutions (e.g. sugar syrup), corn syrup, honey, various fruit juices, raisins, apple slices and bananas. These can be provided as a dry mix or as a solution in open feeders. Soaked cotton balls, sponges or alike can also be used to providing a solution (e.g. sugar solution) to adult mosquitoes.

[0208] Feed suitable for adult mosquitoes may further include blood, blood components (e.g. plasma, hemoglobin, gamma globulin, red blood cells, adenosine triphosphate, glucose, and cholesterol), or an artificial medium (e.g., such a media is disclosed in U.S. Pat. No. 8,133,524 and in U.S. Patent Application No. 20120145081, both of which are incorporated by reference herein).

[0209] According to a specific embodiment the composition of the invention comprises an RNA binding protein.

[0210] According to a specific embodiment, the dsRNA binding protein (DRBP) comprises any of the family of eukaryotic, prokaryotic, and viral-encoded products that share a common evolutionarily conserved motif specifically facilitating interaction with dsRNA. Polypeptides which comprise dsRNA binding domains (DRBDs) may interact with at least 11 bp of dsRNA, an event that is independent of nucleotide sequence arrangement. More than 20 DRBPs have been identified and reportedly function in a diverse range of critically important roles in the cell. Examples include the dsRNA-dependent protein kinase PKR that functions in dsRNA signaling and host defense against virus infection and DICER.

[0211] Alternatively or additionally, an siRNA binding protein may be used as taught in U.S. Pat. Application No. 20140045914, which is herein incorporated by reference in its entirety.

[0212] According to a specific embodiment the RNA binding protein is the p19 RNA binding protein. The protein may increase in vivo stability of an siRNA molecule by coupling it at a binding site where the homodimer of the p19 RNA binding proteins is formed and thus protecting the siRNA from external attacks and accordingly, it can be utilized as an effective siRNA delivery vehicle.

[0213] According to a specific embodiment, the RNA binding protein may be attached to a target-oriented peptide.

[0214] According to a specific embodiment, the target-oriented peptide is located on the surface of the siRNA binding protein.

[0215] According to specific embodiments of the invention, whole cell preparations, cell extracts, cell suspensions, cell homogenates, cell lysates, cell supernatants, cell filtrates, cell pellets of cell cultures of cells, whole blood, blood components or artificial medium comprising the nucleic acid agent can be used.

[0216] The composition of some embodiments of the invention may further comprise at least one of a surface-active agent, an inert carrier vehicle, a preservative, a humectant, a feeding stimulant, an attractant, an encapsulating agent, a binder, an emulsifier, a dye, an ultra-violet protector, a buffer, a flow agent or fertilizer, micronutrient donors.

[0217] According to a specific embodiment, the compositions (e.g. cells) are formulated by any means known in the art. The methods for preparing such formulations include, e.g., desiccation, lyophilization, homogenization, extraction, filtration, encapsulation centrifugation, sedimentation, or concentration of one or more cell types.

[0218] Additionally, the composition may be supplemented with mosquito food (food bait) or with excrements of farm animals, on which the mosquito, e.g. larvae, feed.

[0219] In one embodiment, the composition comprises an oil flowable suspension. For example, in some embodiments, oil flowable or aqueous solutions may be formulated to contain lysed or unlysed cells, spores, or crystals.

[0220] In a further embodiment, the composition may be formulated as a water dispersible granule or powder.

[0221] In yet a further embodiment, the compositions of the present invention may also comprise a wettable powder, spray, emulsion, colloid, aqueous or organic solution, dust, pellet, or colloidal concentrate. Dry forms of the compositions may be formulated to dissolve immediately upon wetting, or alternatively, dissolve in a controlled-release, sustained-release, or other time-dependent manner.

[0222] Alternatively or additionally, the composition may comprise an aqueous solution. Such aqueous solutions or suspensions may be provided as a concentrated stock solution which is diluted prior to application, or alternatively, as a diluted solution ready-to-apply. Such compositions may be formulated in a variety of ways. They may be employed as wettable powders, granules or dusts, by mixing with various inert materials, such as inorganic minerals (silicone or silicon derivatives, phyllosilicates, carbonates, sulfates, phosphates, and the like) or botanical materials (powdered corncobs, rice hulls, walnut shells, and the like).

[0223] The formulations may include spreader-sticker adjuvants, stabilizing agents, other pesticidal additives, or surfactants. Liquid formulations may be employed as foams, suspensions, emulsifiable concentrates, or the like. The ingredients may include Theological agents, surfactants, emulsifiers, dispersants, or polymers.

[0224] As mentioned, the dsRNA of the invention may be administered as a naked dsRNA. Alternatively, the dsRNA of the invention may be conjugated to a carrier known to one of skill in the art, such as a transfection agent e.g. PEI or chitosan or a protein/lipid carrier.

[0225] The compositions may be formulated prior to administration in an appropriate means such as lyophilized, freeze-dried, microencapsulated, desiccated, or in an aqueous carrier, medium or suitable diluent, such as saline or other buffer. Suitable agricultural carriers can be solid, semi-solid or liquid and are well known in the art. The term “agriculturally-acceptable carrier” covers all adjuvants, e.g., inert components, dispersants, surfactants, tackifiers, binders, etc. that are ordinarily used in pesticide formulation technology.

[0226] According to one embodiment, the composition is formulated as a semi-solid such as in agarose (e.g. agarose cubes).

[0227] As mentioned, the nucleic acid agents can be delivered to the mosquitoes in various ways. Thus, administration of the composition to the mosquitoes may be carried out using any suitable or desired manual or mechanical technique for application of a composition comprising a nucleic acid agent, including but not limited to feeding, spraying, soaking, brushing, dressing, dripping, dipping, coating, spreading, applying as small droplets, a mist or an aerosol.

[0228] According to one embodiment, the composition is administered to mosquito, e.g. to mosquito larvae, by soaking or by spraying.

[0229] Soaking the larva with the composition can be effected for about 2 hours to 96 hours, about 2 hours to 84 hours, about 2 hours to 72 hours, for about 2 hours to 60 hours, about 2 hours to 48 hours, about 2 hours to 36 hours, about 2 hours to 24 hours, about 2 hours to 12 hours, 12 hours to 96 hours, about 12 hours to 84 hours, about 12 hours to 72 hours, for about 12 hours to 60 hours, about 12 hours to 48 hours, about 12 hours to 36 hours, about 12 hours to 24 hours, or about 24 hours to 48 hours.

[0230] According to a specific embodiment, the composition is administered to the larvae by soaking for 12-24 hours.

[0231] According to one embodiment, the composition is administered to the larvae by feeding.

[0232] Feeding the larva with the composition can be effected for about 2 hours to 120 hours, about 2 hours to 108 hours, about 2 hours to 96 hours, about 2 hours to 84 hours, about 2 hours to 72 hours, for about 2 hours to 60 hours, about 2 hours to 48 hours, about 2 hours to 36 hours, about 2 hours to 24 hours, about 2 hours to 12 hours, 12 hours to 24 hours, about 24 hours to 36 hours, about 24 hours to 48 hours, about 36 hours to 48 hours, for about 48 hours to 60 hours, about 60 hours to 72 hours, about 72 hours to 84 hours, about 84 hours to 96 hours, about 96 hours to 108 hours, or about 108 hours to 120 hours.

[0233] According to a specific embodiment, the composition is administered to the larvae by feeding for 48-96 hours.

[0234] According to one embodiment, feeding the larva with the composition is affected until the larva reaches pupa stage.

[0235] According to one embodiment, dsRNA is administered to the larva by soaking followed by feeding with food-containing dsRNA. Thus, for example, larvae (e.g. first, second, third or four instar larva, e.g. third instar larvae) are first treated (in groups of about 100 larvae) with dsRNA at a dose of about 0.001-5 μg/μL (e.g. 0.2 μg/μL), in a final volume of about 3 mL of dsRNA solution in autoclaved water. After soaking in the dsRNA solutions for about 12-48 hours (e.g. for 24 hrs) at 25-29° C. (e.g. 27° C.), the larvae are transferred into containers so as not to exceed concentration of about 200-500 larvae/1500 mL (e.g. 300 larvae/1500 mL) of chlorine-free tap water, and provided with food containing dsRNA (e.g. agarose cubes containing 300 μg of dsRNA, e.g. 1 μg of dsRNA/larvae). The larva are fed once a day until they reach pupa stage (e.g. for 2-5 days, e.g. four days). Larvae are also fed with additional food requirements, e.g. 2-10 mg/100 mL (e.g. 6 mg/100 mL) lab dog/cat diet suspended in water.

[0236] Feeding the larva can be effected using any method known in the art. Thus, for example, the larva may be fed with agrose cubes, chitosan nanoparticles, oral delivery or diet containing dsRNA.

[0237] Chitosan nanoparticles: A group of 15-20 3rd-instar mosquito larvae are transferred into a container (e.g. 500 ml glass beaker) containing 50-1000 ml, e.g. 100 ml, of deionized water. One sixth of the gel slices that are prepared from dsRNA (e.g. 32 μg of dsRNA) are added into each beaker. Approximately an equal amount of the gel slices are used to feed the larvae once a day for a total of 2-5 days, e.g. four days (see Insect Mol Biol. 2010 19(5):683-93).

[0238] Oral delivery of dsRNA: First instar larvae (less than 24 hrs old) are treated in groups of 10-100, e.g. 50, in a final volume of 25-100 μl of dsRNA, e.g. 75 μl of dsRNA, at various concentrations (ranging from 0.01 to 5 μg/μl, e.g. 0.02 to 0.5 μg/μl-dsRNAs) in tubes e.g. 2 mL microfuge tube (see J Insect Sci. 2013; 13:69).

[0239] Diet containing dsRNA: larvae are fed a single concentration of 1-2000 ng dsRNA/mL, e.g. 1000 ng dsRNA/mL, diet in a diet overlay bioassay for a period of 1-10 days, e.g. 5 days (see PLoS One. 2012; 7(10): e47534.).

[0240] Diet containing dsRNA: Newly emerged larvae are starved for 1-12 hours, e.g. 2 hours, and are then fed with a single drop of 0.5-10 μl, e.g. 1 μl, containing 1-20 μg, e.g. 4 μg, dsRNA (1-20 μg of dsRNA/larva, e.g. 4 μg of dsRNA/larva) (see Appl Environ Microbiol. 2013 August; 79(15):4543-50).

[0241] Thus, according to a specific embodiment, the composition may be applied to standing water. The mosquito larva may be soaked in the water for several hours (1, 2, 3, 4, 5, 6 hours or more) to several days (1, 2, 3, 4 days or more) with or without the use of transfection reagents or dsRNA carriers.

[0242] Alternatively, the mosquito, e.g. larva, may be sprayed with an effective amount of the composition (e.g. via an aqueous solution).

[0243] If needed, the composition may be dissolved, suspended and/or diluted in a suitable solution (as described in detail above) before use.

[0244] The composition of the invention may further include a sugar (e.g., glucose), a blood component (e.g., plasma, hemoglobin, gamma globulin, red blood cells, adenosine triphosphate, glucose, or cholesterol), which may be at a concentration approximately equal to a physiological level for human blood, a preservative, a stabilizer, a mosquito attractant, a pheromone, a kairomone, an allomone, a mosquito phagostimulant, or a colorant. The composition may be water-soluble, and may be dissolved in a liquid (e.g., water or blood plasma) or a gel, which may include a preservative, a stabilizer, a mosquito attractant, a pheromone, a kairomone, an allomone, and/or a mosquito phagostimulant.

[0245] The nucleic acid compositions of the invention may be employed in the method of the invention singly or in combination with other compounds, including, but not limited to, inert carriers that may be natural, synthetic, organic or inorganic, humectants, feeding stimulants, attractants, encapsulating agents (for example Algae, bacteria and yeast, nanoparticles), dsRNA binding proteins, binders, emulsifiers, dyes, sugars, sugar alcohols, starches, modified starches, dispersants, or combinations thereof may also be utilized in conjunction with the composition of some embodiments of the invention.

[0246] Compositions of the invention can be used to control mosquitoes (e.g. enhance resistance in mosquitoes). Such an application may comprise administering to larvae of the mosquitoes an effective amount of the composition which renders an adult stage of the mosquitoes more resistant to a pathogen. Alternatively, the composition may be administered directly to adult mosquitoes, preferable before exposure to a pathogen, to enhance resistance thereto.

[0247] Thus, regardless of the method of application, the amount of the active component(s) are applied at a effective amount for an adult stage of the mosquito to be more resistant to a pathogen, which will vary depending on factors such as, for example, the specific mosquito to be controlled, the type of pathogen (bacteria, virus, protozoa, etc.), the environmental conditions, the water source to be treated, and the method, rate, and quantity of application of the composition.

[0248] The concentration of the composition that is used for environmental, systemic, or foliar application will vary widely depending upon the nature of the particular formulation, means of application, environmental conditions, and degree of activity.

[0249] Exemplary concentrations of dsRNA in the composition (e.g. for soaking) include, but are not limited to, about 1 pg-10 μg of dsRNA/μl, about 1 pg-1 μg of dsRNA/μl, about 1 pg-0.1 μg of dsRNA/μl, about 1 pg-0.01 μg of dsRNA/μl, about 1 pg-0.001 μg of dsRNA/μl, about 0.001 μg-10 μg of dsRNA/μl, about 0.001 μg-5 μg of dsRNA/μl, about 0.001 μg-1 μg of dsRNA/μl, about 0.001 μg-0.1 μg of dsRNA/μl, about 0.001 μg-0.01 μg of dsRNA/μl, about 0.01 μg-10 μg of dsRNA/μl, about 0.01 μg-5 μg of dsRNA/μl, about 0.01 μg-1 μg of dsRNA/μl, about 0.01 μg-0.1 μg of dsRNA/μl, about 0.1 μg-10 μg of dsRNA/μl, about 0.1 μg-5 μg of dsRNA/μl, about 0.5 μg-5 μg of dsRNA/μl, about 0.5 μg-10 μg of dsRNA/μl, about 1 μg-5 μg of dsRNA/μl, or about 1 μg-10 μg of dsRNA/μl.

[0250] When formulated as a feed, the dsRNA may be effected at a dose of 1 pg/larvae-1000 μg/larvae, 1 pg/larvae-500 μg/larvae, 1 pg/larvae-100 μg/larvae, 1 pg/larvae-10 μg/larvae, 1 pg/larvae-1 μg/larvae, 1 pg/larvae-0.1 μg/larvae, 1 pg/larvae-0.01 μg/larvae, 1 pg/larvae-0.001 μg/larvae, 0.001-1000 μg/larvae, 0.001-500 μg/larvae, 0.001-100 μg/larvae, 0.001-50 μg/larvae, 0.001-10 μg/larvae, 0.001-1 μg/larvae, 0.001-0.1 μg/larvae, 0.001-0.01 μg/larvae, 0.01-1000 μg/larvae, 0.01-500 μg/larvae, 0.01-100 μg/larvae, 0.01-50 μg/larvae, 0.01-10 μg/larvae, 0.01-1 μg/larvae, 0.01-0.1 μg/larvae, 0.1-1000 μg/larvae, 0.1-500 μg/larvae, 0.1-100 μg/larvae, 0.1-50 μg/larvae, 0.1-10 μg/larvae, 0.1-1 μg/larvae, 1-1000 μg/larvae, 1-500 μg/larvae, 1-100 μg/larvae, 1-50 μg/larvae, 1-10 μg/larvae, 10-1000 μg/larvae, 10-500 μg/larvae, 10-100 μg/larvae, 10-50 μg/larvae, 50-1000 μg/larvae, 50-500 μg/larvae, 50-400 μg/larvae, 50-300 μg/larvae, 100-500 μg/larvae, 100-300 μg/larvae, 200-500 μg/larvae, 200-300 μg/larvae, or 300-500 μg/larvae

[0251] The mosquito larva food containing dsRNA may be prepared by any method known to one of skill in the art. Thus, for example, cubes of dsRNA-containing mosquito food may be prepared by first mixing 10-500 μg, e.g. 300 μg of dsRNA with 3 to 300 μg, e.g. 10 μg of a transfection agent e.g. Polyethylenimine 25 kDa linear (Polysciences) in 10-500 μL, e.g. 200 μL of sterile water. Alternatively, 2 different dsRNA (10-500 μg, e.g. 150 μg of each) plus 3 to 300 μg, e.g. 30 μg of Polyethylenimine may be mixed in 10-500 μL, e.g. 200 μL of sterile water. Alternatively, cubes of dsRNA-containing mosquito food may be prepared without the addition of transfection reagents. Then, a suspension of ground mosquito larval food (1-20 grams/100 mL e.g. 6 grams/100 mL) may be prepared with 2% agarose (Fisher Scientific). The food/agarose mixture can then be heated to 53-57° C., e.g. 55° C., and 10-500 μL, e.g. 200 μL of the mixture can then be transferred to the tubes containing 10-500 μL, e.g. 200 μL of dsRNA+PEI or dsRNA only. The mixture is then allowed to solidify into a gel. The solidified gel containing both the food and dsRNA can be cut into small pieces (approximately 1-10 mm, e.g. 1 mm, thick) using a razor blade, and can be used to feed mosquito larvae in water.

[0252] According to some embodiments, the nucleic acid agent is provided in amounts effective to reduce or suppress expression of at least one mosquito or pathogen gene product. As used herein “a suppressive amount” or “an effective amount” refers to an amount of dsRNA which is sufficient to downregulate (reduce expression of) the target gene by at least 20%, 30%, 40%, 50%, or more, say 60%, 70%, 80%, 90% or more even 100%.

[0253] Testing the efficacy of gene silencing can be effected using any method known in the art. For example, using quantitative RT-PCR measuring gene knockdown. Thus, for example, ten to twenty larvae from each treatment group can be collected and pooled together. RNA can be extracted therefrom and cDNA syntheses can be performed. The cDNA can then be used to assess the extent of RNAi by measuring levels of gene expression using qRT-PCR.

[0254] Reagents of the present invention can be packed in a kit including the nucleic acid agent (e.g. dsRNA), instructions for administration of the nucleic acid agent, construct or composition to mosquitoes.

[0255] Compositions of some embodiments of the invention may, if desired, be presented in a pack or dispenser device, which may contain one or more dosage forms containing the active ingredient. The pack may, for example, comprise metal or plastic foil, such as a blister pack. The pack or dispenser device may be accompanied by instructions for administration to the mosquitoes.

[0256] As used herein the term “about” refers to ±10%.

[0257] The terms “comprises”, “comprising”, “includes”, “including”, “having” and their conjugates mean “including but not limited to”.

[0258] The term “consisting of means “including and limited to”.

[0259] The term “consisting essentially of” means that the composition, method or structure may include additional ingredients, steps and/or parts, but only if the additional ingredients, steps and/or parts do not materially alter the basic and novel characteristics of the claimed composition, method or structure.

[0260] As used herein, the singular form “a”, “an” and “the” include plural references unless the context clearly dictates otherwise. For example, the term “a compound” or “at least one compound” may include a plurality of compounds, including mixtures thereof.

[0261] Throughout this application, various embodiments of this invention may be presented in a range format. It should be understood that the description in range format is merely for convenience and brevity and should not be construed as an inflexible limitation on the scope of the invention. Accordingly, the description of a range should be considered to have specifically disclosed all the possible subranges as well as individual numerical values within that range. For example, description of a range such as from 1 to 6 should be considered to have specifically disclosed subranges such as from 1 to 3, from 1 to 4, from 1 to 5, from 2 to 4, from 2 to 6, from 3 to 6 etc., as well as individual numbers within that range, for example, 1, 2, 3, 4, 5, and 6. This applies regardless of the breadth of the range.

[0262] Whenever a numerical range is indicated herein, it is meant to include any cited numeral (fractional or integral) within the indicated range. The phrases “ranging/ranges between” a first indicate number and a second indicate number and “ranging/ranges from” a first indicate number “to” a second indicate number are used herein interchangeably and are meant to include the first and second indicated numbers and all the fractional and integral numerals therebetween.

[0263] As used herein the term “method” refers to manners, means, techniques and procedures for accomplishing a given task including, but not limited to, those manners, means, techniques and procedures either known to, or readily developed from known manners, means, techniques and procedures by practitioners of the chemical, pharmacological, biological, biochemical and medical arts.

[0264] As used herein, the term “treating” includes abrogating, substantially inhibiting, slowing or reversing the progression of a condition, substantially ameliorating clinical or aesthetical symptoms of a condition or substantially preventing the appearance of clinical or aesthetical symptoms of a condition.

[0265] It is appreciated that certain features of the invention, which are, for clarity, described in the context of separate embodiments, may also be provided in combination in a single embodiment. Conversely, various features of the invention, which are, for brevity, described in the context of a single embodiment, may also be provided separately or in any suitable subcombination or as suitable in any other described embodiment of the invention. Certain features described in the context of various embodiments are not to be considered essential features of those embodiments, unless the embodiment is inoperative without those elements.

[0266] Various embodiments and aspects of the present invention as delineated hereinabove and as claimed in the claims section below find experimental support in the following examples.

### EXAMPLES

[0267] Reference is now made to the following examples, which together with the above descriptions, illustrate the invention in a non limiting fashion.

[0268] Generally, the nomenclature used herein and the laboratory procedures utilized in the present invention include molecular, biochemical, microbiological and recombinant DNA techniques. Such techniques are thoroughly explained in the literature. See, for example, “Molecular Cloning: A laboratory Manual” Sambrook et al., (1989); “Current Protocols in Molecular Biology” Volumes I-III Ausubel, R. M., ed. (1994); Ausubel et al., “Current Protocols in Molecular Biology”, John Wiley and Sons, Baltimore, Md. (1989); Perbal, “A Practical Guide to Molecular Cloning”, John Wiley & Sons, New York (1988); Watson et al., “Recombinant DNA”, Scientific American Books, New York; Birren et al. (eds) “Genome Analysis: A Laboratory Manual Series”, Vols. 1-4, Cold Spring Harbor Laboratory Press, New York (1998); methodologies as set forth in U.S. Pat. Nos. 4,666,828; 4,683,202; 4,801,531; 5,192,659 and 5,272,057; “Cell Biology: A Laboratory Handbook”, Volumes I-III Cellis, J. E., ed. (1994); “Current Protocols in Immunology” Volumes I-III Coligan J. E., ed. (1994); Stites et al. (eds), “Basic and Clinical Immunology” (8th Edition), Appleton & Lange, Norwalk, Conn. (1994); Mishell and Shiigi (eds), “Selected Methods in Cellular Immunology”, W. H. Freeman and Co., New York (1980); available immunoassays are extensively described in the patent and scientific literature, see, for example, U.S. Pat. Nos. 3,791,932; 3,839,153; 3,850,752; 3,850,578; 3,853,987; 3,867,517; 3,879,262; 3,901,654; 3,935,074; 3,984,533; 3,996,345; 4,034,074; 4,098,876; 4,879,219; 5,011,771 and 5,281,521; “Oligonucleotide Synthesis” Gait, M. J., ed. (1984); “Nucleic Acid Hybridization” Hames, B. D., and Higgins S. J., eds. (1985); “Transcription and Translation” Hames, B. D., and Higgins S. J., Eds. (1984); “Animal Cell Culture” Freshney, R.I., ed. (1986); “Immobilized Cells and Enzymes” IRL Press, (1986); “A Practical Guide to Molecular Cloning” Perbal, B., (1984) and “Methods in Enzymology” Vol. 1-317, Academic Press; “PCR Protocols: A Guide To Methods And Applications”, Academic Press, San Diego, Calif. (1990); Marshak et al., “Strategies for Protein Purification and Characterization—A Laboratory Course Manual” CSHL Press (1996); all of which are incorporated by reference as if fully set forth herein. Other general references are provided throughout this document. The procedures therein are believed to be well known in the art and are provided for the convenience of the reader. All the information contained therein is incorporated herein by reference.

### Example 1

### Materials and Experimental Procedures

[0269] Gene Target Selection

[0270] Target genes are selected according to reported microarray and RNAseq experiments that compare populations of infected versus uninfected mosquitoes. A list of about 100 potential genes for target is generated. Genes from different functional categories are targeted, such as: metabolism (MET), immunity (IMM), cytoskeleton, cell membrane, cell motility and extracellular structures (C-CWCM-ES), post-translational modification, protein turnover, chaperone (PM-PT-C), signal transduction (ST), proteolysis (PROT), oxidoreductase activity (REDOX), transcription and translation (TT), diverse (DIV), transport (TR), cell-cycle (CC), energy production and conversion (EPC), chromatin structure and dynamics (CSD). The specific sequence for targeting is selected according to siRNA analysis available on-line, such as www(dot)med(dot)nagoya-u(dot)ac(dot)jp/neurogenetics/i_Score/i_score(dot)html. The selected sequences are ordered synthetically and serve as template for in vitro reverse transcription reaction.

[0271] For example, mosquito C-type lectin (GCTL-1), AAEL000563, bp 90-425 (total of 336 bp) is selected for targeting and dsRNA targeting same is generated as described below.

[0272] dsRNA Preparation

[0273] Large scale dsRNA preparation is performed by PCR using synthetic DNA templates, such as with the Ambion® MEGAscript® RNAi Kit. dsRNA integrity is verified on gel and purified by a column based method. The concentration of the dsRNA is evaluated both by Nano-drop and gel-based estimation. This dsRNA serves for the following experiments.

[0274] Bioassays

[0275] A. aegypti is reared at 27° C., 50% humidity, on a 16:8 L:D photoperiod. Females are fed warmed cattle blood through a stretched film. Mosquito eggs are allowed to develop for a minimum of one week, then are submerged in dechlorinated tap water to induce hatching. Larvae are maintained on a ground powder diet compromising dry cat food, dry rabbit chow, fish flakes and yeast.

[0276] Groups of 20 first instar larvae are soaked for 2 hr in 75 μl water containing 0.5 μg/μl dsRNA and 0.5% bromophenol blue. The larvae are photographed and the intensity of the dye in the gut is calculated using ImageJ image processing software (rsbweb(dot)nih(dot)gov/ij/). The extent of dye in the gut is correlated with the extent of knockdown of the gene expression using quantitative reverse transcriptase PCR (see section below). Once it is determined that dsRNA is being ingested by larvae, subsequent dsRNA treatments are performed without the addition of the dye.

[0277] First instar larvae (less than 24 hr old) are treated in groups of 50 in a final volume 75 μl of dsRNA at a concentration of 0.5 μg/μl dsRNAs) in a 2 mL microfuge tube. Negative control larvae are treated with either water alone or with scrambled dsRNA, which has no homology with any mosquito genes and has no adverse effects on several other insects.

[0278] Larvae are soaked in the dsRNA solutions for 2 hr at 27° C., and then transferred to 12-well tissue culture plates, which are also maintained at 27° C., and are provided with a restricted diet on a daily basis. This amount of food is equivalent to half-rations of food per day typically enabled for most of the insects' population to develop to the pupal stage in 5 days. The reduced food during these bioassays slows their development and facilitates easier monitoring of differential growth rates and/or survivorship. Growth and/or survival of the larvae are observed over a 2-week period, by which time all non-treated larvae are pupated and have developed into adults. Once becoming adults, the mosquitoes are infected with viruses, and the extant of infection is tested.

[0279] Quantitative RT-PCR to Measure Gene Knockdown

[0280] Ten to 20 larvae from each treatment is collected and pooled together 3 days after the single 2 hr dsRNA soakings. RNA extractions and cDNA syntheses are performed. Only live insects are used for the RNA extractions, as the RNA in dead insects could have degraded. The cDNA from each replicate treatment is then used to assess the extent of RNAi by measuring levels of gene expression using qRT-PCR. Reactions are performed in triplicate and compared to an internal reference to compare levels of RNAi. Larva with decreased levels of a tested gene are allowed to pupate and become adult. The adult mosquitoes are further submitted to virus infection.

[0281] Virus and Mosquito Oral Infection

[0282] Viruses are cultured in Ae. albopictus C6/36 cells and high passage (25 passages) viruses are used in oral challenges as previously described [Salazar et al. (2007) BMC Microbiol 30: 7-9]. Specifically, 350 and 330 adult females are fed either a virus-infected meal diluted 1:1 in cattle's blood or uninfected C6/36 cell culture medium diluted 1:1 in cattle's blood, respectively. Blood meals are measured for their viral titer. After blood feeding, 20 virus infected mosquitoes are sacrificed and viral titers are determined for each individual using a standard method as previously described [Hess et al. (2011) BMC Microbiol 11: 45]. Specifically, mosquito bodies are homogenized in 270 ml of Dulbecco' s Modified Eagle Medium (DMEM) and then centrifuged to eliminate large debris particles. The supernatant are then further filtered and used in serial dilutions to infect monolayers of Vero cells. The lowest concentration infecting Vero cells is used to calculate the viral titer of virus infected mosquitoes.

### Results

### Use of dsRNA to Increase Resistance of Mosquitoes to Human Pathogenic Viruses

[0283] The present inventors contemplate that feeding dsRNA to mosquitoes makes them more resistant to human pathogenic viruses.

[0284] Mosquito C-type lectin (GCTL-1), a group of carbohydrate-binding proteins, e.g. AAEL000563, play a role in West Nile Virus (WNV) infection. Accordingly, the present invention generates dsRNA targeting C-type lectins which are highly expressed by mosquito immune cells, including monocytes, macrophages, and dendritic cells (DCs), and play a central role in activating host defense.

[0285] Furthermore, in order to increase mosquito resistance to virus infection, genes that are elevated during infection with a virus (e.g. DENV infection) are targeted, since that the present invention contemplates that down-regulation of such genes as listed below prevents replication of the virus in the mosquito host.

[0286] Midgut trypsins play a central role during blood digestion in Aedes aegypti. In mosquitoes, synthesis of trypsin in early and late trypsin de novo occurs upon blood feeding. Early trypsin activity peaks 3 hours after blood feeding and then drops within a few hours. Early trypsin activity regulates late trypsin mRNA synthesis, which reaches a maximum level 24 hours after feeding, followed by an increase in late trypsin protein, which reaches 4-6 μg/midgut. Late trypsin accounts for most of the endoproteolytic activity during blood digestion in the Ae. aegypti midgut. Midgut trypsin activity facilitates DEN infection in Ae. aegypti through a nutritional effect and probably also by direct proteolytic processing of the viral surface [Molina-cruz et al. (2005) Am J Trop Med Hyg., 72(5):631-7].

[0287] Furthermore, host genes to be targeted by dsRNA include mosquito proteins that physically interact with virus proteins (e.g. dengue proteins). Such proteins are listed in Table 2, below. dsRNA against the sequences coding for these proteins are used as targets for silencing and accordingly for increasing host resistance.

TABLE 2
Genes to be targeted

| GENE ID | Name of transcript |
|---|---|
| AAEL012095 | 26S protease regulatory subunit |
| AAEL002508 | 26S protease regulatory subunit 6a |
| AAEL010821 | 60S acidic ribosomal protein P0 |
| AAEL013583 | 60S ribosomal protein L23 |
| AAEL005524 | adenosylhomocysteinase |
| AAEL011129 | alcohol dehydrogenase |
| AAEL009948 | aldehyde dehydrogenase |
| AAEL003345 | argininosuccinate lyase |
| AAEL006577 | aspartyl-tRn/a synthetase |
| AAEL012237 | bhlhzip transcription factor max/bigmax |
| AAEL010782 | carboxypeptidase |
| AAEL005165 | chaperone protein dnaj |
| AAEL009285 | dead box atp-dependent rna helicase |
| AAEL000951 | elongation factor 1-beta2 |
| AAEL012827 | endoplasmin |
| AAEL011742 | eukaryotic peptide chain release factor subunit |
| AAEL004500 | eukaryotic translation elongation factor |
| AAEL009101 | eukaryotic translation initiation factor 3f, eif3f |
| AAEL007201 | glutamyl aminopeptidase |
| AAEL002145 | gonadotropin inducible transcription factor |
| AAEL010012 | gtp-binding protein sar1 |
| AAEL011708 | heat shock protein |
| AAEL014843 | heat shock protein |
| AAEL014845 | heat shock protein |
| AAEL012680 | Juvenile hormone-inducible protein, putative |
| AAEL003415 | lamin |
| AAEL009766 | lipoamide acyltransferase component of branched- |
| | chain alpha-keto acid dehydrogenase |
| AAEL005790 | malic enzyme |
| AAEL014012 | membrane-associated guanylate kinase (maguk) |
| AAEL010066 | microfibril-associated protein |
| AAEL003739 | M-type 9 protein, putative |
| AAEL003676 | myosin I homologue, putative |
| AAEL002572 | myosin regulatory light chain 2 (mlc-2) |
| AAEL009357 | myosin v |
| AAEL005567 | nucleosome assembly protein |
| AAEL010360 | nucleotide binding protein 2 (nbp 2) |
| AAEL012556 | Ofd1 protein, putative |
| AAEL004783 | ornithine decarboxylase antizyme, |
| AAEL010975 | paramyosin, long form |
| AAEL004484 | predicted protein |
| AAEL014396 | protein farnesyltransferase alpha subunit |
| AAEL012686 | ribosomal protein S12, putative |
| AAEL013933 | serine protease inhibitor, serpin |
| AAEL005037 | seryl-tRn/a synthetase |
| AAEL009614 | seven in absentia, putative |
| AAEL010585 | spermatogenesis associated factor |
| AAEL012348 | splicing factor 3a |
| AAEL011137 | succinyl-coa:3-ketoacid-coenzyme a transferase |
| AAEL002565 | titin |
| AAEL003104 | tripartite motif protein trim2,3 |
| AAEL011988 | tRNA selenocysteine associated protein (secp43) |
| AAEL006572 | troponin C |
| AAEL003815 | zinc finger protein |
| AAEL009182 | zinc finger protein, putative |

### Example 2

### Materials and Experimental Procedures

[0288] Mosquito Maintenance

[0289] Mosquitoes were taken from an Ae. aegypti colony of the Rockefeller strain, which were reared continuously in the laboratory at 28° C. and 70-80% relative humidity. Adult mosquitoes were maintained in a 10% sucrose solution, and the adult females were fed with sheep blood for egg laying. The larvae were reared on dog/cat food unless stated otherwise.

[0290] Introducing dsRNA into a Mosquito Larvae

[0291] Soaking with “Naked” dsRNA Plus Additional Larvae Feeding with Food-Containing dsRNA

[0292] Third instar larvae were treated (in groups of 100 larvae) in a final volume of 3 mL of dsRNA solution in autoclaved water (0.5 μg/μL) to target Flock House virus B2 protein (AAEL008297) and Dicer-2. The control group was kept in 3 ml sterile water only. After soaking in the dsRNA solutions for 24 hr at 27° C., the larvae were transferred into larger recipients (300 larvae/1500 mL of chlorine-free tap water), and provided both agarose cubes containing 300 μg of dsRNA once a day (for a total of four days) and 6 mg/100 mL lab dog/cat diet (Purina Mills) suspended in water. As pupae developed, they were transferred to individual vials to await eclosion and sex sorting. For bioassays purpose only females up to five days old were used. FIG. 2 describes the experiment.

[0293] Preparation of Mosquito Larval Food Containing dsRNA

[0294] Cubes of dsRNA-containing mosquito food were prepared as follows: First, 300 μg of dsRNA were mixed with 30 μg of Polyethylenimine 25 kDa linear (Polysciences) in 200 μL of sterile water. Then, a suspension of ground mosquito larval food (6 grams/100 mL) was prepared with 2% agarose (Fisher Scientific). The food/agarose mixture was heated to 55° C. and 200 μL of the mixture was then transferred to the tubes containing 200 μL of dsRNA+PEI or water only (control). The mixture was then allowed to solidify into a gel. The solidified gel containing both the food and dsRNA was cut into small pieces (approximately 1 mm thick) using a razor blade, which were then used to feed mosquito larvae in water.

[0295] RNA Isolation and dsRNA Production

[0296] Total RNA was extracted from groups of five Ae. aegypti fourth instar larvae and early adult male/female Ae. aegypti, using TRIzol (Invitrogen, Carlsbad, Calif., USA) according to the manufacturer's instructions. RNA was treated with amplification grade DNase I (Invitrogen) and 1 μg was used to synthesize cDNA using a First Strand cDNA Synthesis kit (Invitrogen). The cDNA served as template DNA for PCR amplification of gene fragments using the primers listed in Table 3, below. PCR products were purified using a QlAquick PCR purification kit (Qiagen). The MEGAscript RNAi kit (Ambion) was then used for in vitro transcription and purification of dsRNAs (Table 4, below).

TABLE 3
qPCR primers

| Target gene | Accession number | qPCR primers (5′-3′) | |
|---|---|---|---|
| FHV RNA-1 | EF690537.1 | F: | CCAGATCACCCGAACTGAAT |
| | | | (SEQ ID NO: 1191) |
| | | R: | AGGCTGTCAAGCGGATAGAA |
| | | | (SEQ ID NO: 1192) |
| Argonaute-3 | XM_001652895.1 | F: | TCGGCATTCGTAGCTTCGTT |
| AAEL007823 | | | (SEQ ID NO: 1193) |
| | | R: | GCAGCTGACAGTTTGCCTTC |
| | | | (SEQ ID NO: 1194) |
| AuB | | F: | CAGAATCCCAGACCCGGAAC |
| AAEL007689 | | | (SEQ ID NO: 1195) |
| | | R: | TTGGCGAAACCGTACCTTGA |
| | | | (SEQ ID NO: 1196) |
| Cactus | XM_001650217.2 | F: | ACTTTCCCTGGCCTTTCCAC |
| AAEL000709 | | | (SEQ ID NO: 1197) |
| | | R: | GCGAAACGTGAAGGTGCTAC |
| | | | (SEQ ID NO: 1198) |
| MyD88 | XM_001658585.2 | F: | TGCCGAGAACAGTGATCAGG |
| AAEL007768 | | | (SEQ ID NO: 1199) |
| | | R: | CTCAGATTTTTCGCCGGTGC |
| | | | (SEQ ID NO: 1200) |
| AAEL007696 | XM_001652790.2 | F: | GGACTCGTCGGAGCTGAAAT |
| Rel-1A | | | (SEQ ID NO: 1201) |
| | | R: | AACTGTCCGAGAGGGTTTCG |
| | | | (SEQ ID NO: 1202) |
| AAEL003832 | XM_001657238.2 | F: | TGAGTTTCTCGAGAGGAAAACCT |
| | | | (SEQ ID NO: 1203) |
| | | R: | TCACTACCCCTCCCTCGTTT |
| | | | (SEQ ID NO: 1204) |
| AAEL000598 | XM_001649131.2 | F: | TTCGCAGCTTTCGTCATGTG |
| | | | (SEQ ID NO: 1205) |
| | | R: | TTTCGAAACGGCGCAATCAC |
| | | | (SEQ ID NO: 1206) |
| AAEL007562 | XM_001658400.1 | F: | AGCTGCCATGTCTCAATCGT |
| | | | (SEQ ID NO: 1207) |
| | | R: | CCAGTTGGAAATTTCGCGGG |
| | | | (SEQ ID NO: 1208) |
| AAEL010179 | XM_001654244.1 | F: | TTCTGTTGGACGGCCCTTAC |
| | | | (SEQ ID NO: 1209) |
| | | R: | AGCCCGCAAACGGTGTAATA |
| | | | (SEQ ID NO: 1210) |
| Dicer-2 | EF690537.1 | F: | TGTGTCACAACTACCAATTCCCT |
| | | | (SEQ ID NO: 1223) |
| | | R: | AGATCCACGCGAATGTTTTCC |
| | | | (SEQ ID NO: 1224) |
| B2 FVH | EF690537.1 | F: | GCAAACTCGCGCTAATCCAG |
| | | | (SEQ ID NO: 1225) |
| | | R: | TTGTTCGGTGCGTCTTGGTA |
| | | | (SEQ ID NO: 1226) |

TABLE 4
dsRNA sequences

| Target gene | Accession number | dsRNA sequence |
|---|---|---|
| Argonaute-3 | XM_001652895.1 | SEQ ID NO: 1211 |
| AAEL007823 | | |
| AuB | | SEQ ID NO: 1212 |
| AAEL007698 | | |
| Cactus | XM_001650217.2 | SEQ ID NO: 1213 |
| AAEL000709 | | |
| MyD88 | XM_001658585.2 | SEQ ID NO: 1214 |
| AAEL007768 | | |
| AAEL007696 | XM_001652790.2 | SEQ ID NO: 1215 |
| Rel1A | | |
| AAEL003832 | XM_001657238.2 | SEQ ID NO: 1216 |
| AAEL007562 | XM_001658400.1 | SEQ ID NO: 1217 |
| AAEL010179 | XM_001654244.1 | SEQ ID NO: 1218 |
| B2 FVH | X77156.1 | SEQ ID NO: 1219 |
| Dicer-2 | AY713296.1 | SEQ ID NO: 1220 |

[0297] qPCR Analysis

[0298] Approximately 1000 ng first-strand cDNA obtained as described previously was used as template. The qPCR reactions were performed using SYBR® Green PCR Master Mix (Applied Biosystems) following the manufacturer's instructions. Briefly, approximately 50 ng/μl cDNA and gene-specific primers (600 nM) were used for each reaction mixture. qPCR conditions used were 10 min at 95° C. followed by 35 cycles of 15 s at 94° C., 15 s at 54° C. and 60 s at 72° C. The ribosomal protein S7 and tubulin were used as the reference gene to normalize expression levels amongst the samples. Raw quantification cycle (Cq) values normalized against those of the tubulin and S7 standards were then used to calculate the relative expression levels in samples using the 2^{-ΔΔCt} method [Livak & Schmittgen, (2001) Methods25(4):402-8]. Results (mean±SD) are representative of at least two independent experiments performed in triplicate.

[0299] Cells and Preparation of Flock House Virus (FHV) Stocks

[0300] D. melanogaster cells (S2) were grown at 26° C. in Schneider's insect cell medium (Gibco, Life Technologies) supplemented with 10% fetal bovine serum (FBS). FHV stocks were prepared by propagation in S2 cells at a multiplicity of infection (MOI) of 5 for 72 hours. Then, cell-free supernatants were collected, aliquoted and stored at −80° C. until the moment of use. Viral loads were quantified in the S2-culture supernatants using a quantitative Real-Time PCR. Briefly, total viral RNA purified from 1×10⁸ PFU of FHV were 10-fold serially diluted to generate a standard curve. The viral RNA was purified using the QlAamp Viral RNA minikit (QIAGEN; Hamburg, Germany). Viral RNA was converted in cDNA using Improm II kit (Promega) and the quantitative PCR reaction was carried out with the Power SYBR Green Master mix (Invitrogen, Life Technologies) in a 7500-Real time PCR System (Applied Biosystems, Life Technologies). The primer sequences used for FHV detection were detailed in table 3, above.

[0301] Infection of Mosquitoes with FHV

[0302] Female Aedes aegypti mosquitoes (Rockfeller strain) were infected with FHV by two different methods. In the first one, mosquitoes were fed an artificial blood meal mixed with FHV-infected S2 supernatants at a 1:1 ratio (virus titres were 1-2×10⁸ PFU/mL) through a pork gut membrane on a water-jacketed membrane feeder [Rutledge et al., (1964) Mosq News. 24:407-419], for 20 minutes, and then kept in breeding cages up to 15 days postinfection. Control mosquitoes were fed uninfected blood. In the second method of infection, the same source of FHV was diluted at 1:1 ratio in a 10%-solution of sugar. The mixture was then adsorbed in filter papers and placed into the breeding cages. The exposure to mosquitoes lasted 20 minutes. Control mosquitoes were exposed to sugar adsorbed in the filter papers.

[0303] Determination of Viral Loads in Infected Mosquitoes

[0304] Mosquitoes infected with FHV were collected at different timepoints postinfection, as indicated. Total RNA was extracted with TRIzol (Invitrogen) according to the manufacturer's protocol. cDNAs were synthesized by using Improm II Reverse transcriptase (Promega) and oligo dT (Thermo Scientific). Real-time quantitative PCRs were carried out using Power SYBR green Master Mix (Life technologies) and specific primers to FHV RNA1 (Table 3, above). The relative viral loads were estimated by the 2^{-ΔΔCT} method, and normalized to a mosquito endogenous control (tubulin).

### Results

[0305] Though not a classical innate immune pathway, the RNA interference (RNAi) pathway also plays a key role in antiviral defense in plants and invertebrates (FIGS. 1A-D). To combat RNAi-mediated immunity, many plant and animal viruses encode viral suppressors of RNA silencing (VSRs) that target different components in the

[0306] RNAi machinery. The ideal model for studying viral pathogenesis and RNAi immunity is the persistent infection of Drosophila melanogaster cells with Flock House virus (FHV), the most extensively studied member of the Nodaviridae family, which encodes a well-defined VSR designated B2. The B2 protein is a homodimer and indiscriminately binds to double-stranded RNA (dsRNA) molecules independent of their nucleotide sequences and sizes such as siRNAs duplexes and long dsRNAs, thereby protecting dsRNA from being accessed and processed by dicer-2 of the RNAi machinery. The purpose of this experiment was to treat larvae using dsRNA in order to decrease virus replication inside mosquitoes. To do so, the present inventors designed dsRNA sequences to target specifically the virus protein B2 and Dicer-2.

[0307] It has been shown previously that FHV replicates in four species of mosquito, including Ae. aegypti. In this study, FHV growth was first monitored in Ae. aegypti mosquitoes at different intervals (2 hours, 3, 5, 7, 11 and 13 days) following an infectious blood meal or infectious sugar meal. The virus titer was high in both methods of infection 2 hours after infection and decreased thereafter until day 7 (FIGS. 3A-B). However, only in the group infected with blood meal, the virus titers rise again 11 and 13 days postinfection (FIG. 3A).

[0308] In order to evaluate the activation of immune response mechanism after FHV infection, the expression level of MYD88 was evaluated in mosquitoes at different intervals (2 hours, 3, 5, 7, 11, 13 and 15 days) following an infectious blood meal. Interestingly, the mRNA levels of MYD88 increased at 7 days postinfection, immediately before the virus titer started to increase (FIG. 4).

[0309] The mosquito midgut is the first tissue that the dengue virus encounters in the vector following an infectious blood meal. It has been demonstrated that there is a rapid induction of proapoptotic genes within 1-3 hours of exposure to Flock House virus and dengue virus type 2 (DEN-2) and this rapid induction of apoptosis plays a very important role in mediating insect resistance to viral infection (PLoS Pathog. 2013 February; 9(2):e1003137). In order to block the virus replication inside adult mosquitoes, Ae. aegypti third instar larvae were treated with dsRNA to silence Dicer-2 or FHV B2. Larvae were reared until adult mosquitoes and then received an infectious blood meal. As soon as 2 hours postinfection, a decrease in viral copy number was found, which remained at 7 and 15 days postinfection (FIGS. 5A-C and Table 5, below). A similar pattern of infection was observed in Dicer-2 dsRNA-treated mosquitoes (FIGS. 6A-C and Table 6, below).

TABLE 5
Number of infected mosquitoes after 0, 7 and 15 days postinfection
with Flock house virus (treatment with dsRNA B2)

| | 0 days | | 7 days | | 15 days | |
|---|---|---|---|---|---|---|
| | Water | dsRNA B2 | Water | dsRNA B2 | Water | dsRNA B2 |
| | (#infected/ | (infected/ | (infected/ | (infected/ | (infected/ | (infected/ |
| # Experiment | #total) | total) | total) | total) | total) | total) |
| 1 | 5/5 | 5/5 | 1/5 | 2/5 | 1/5 | 1/5 |
| 2 | 3/5 | 4/5 | 2/8 | 5/8 | 4/8 | 4/8 |
| 3 | 3/5 | 4/5 | 1/8 | 1/8 | 5/8 | 1/8 |
| total | 11/15 | 13/15 | 4/21 | 8/21 | 10/21 | 6/21 |

TABLE 6
Number of infected mosquitoes after 0, 7 and 15 days postinfection
with Flock house virus (treatment with dsRNA dicer-2)

| | 0 days | | 7 days | | 15 days | |
|---|---|---|---|---|---|---|
| | | dsRNA | | dsRNA | | dsRNA |
| | Water | dicer-2 | Water | dicer-2 | Water | dicer-2 |
| | (#infected/ | (infected/ | (infected/ | (infected/ | (infected/ | (infected/ |
| # Experiment | #total) | total) | total) | total) | total) | total) |
| 1 | 5/5 | 5/5 | 1/5 | 0/8 | 1/5 | 9/12 |
| 2 | 5/5 | 5/5 | 2/7 | 4/9 | 4/8 | 5/8 |
| 3 | 3/5 | 3/5 | 1/8 | 0/8 | 5/8 | 2/7 |
| total | 13/15 | 13/15 | 4/20 | 4/25 | 10/21 | 16/27 |

[0310] When larvae were fed with dicer-2 dsRNA, there was a decreased in Dicer-2 mRNA expression levels in adults mosquitoes at 7 and 15 days postinfection (FIG. 7A-C). Interestingly, it was also demonstrated that the expression level of MyD88 was significantly higher in B2 dsRNA-treated group at 2 hours postinfection in comparison to the water control group; however, there was no significant upreglation of MYD88 expression after FHV infection in Dicer-2 dsRNA-treated mosquitoes (FIGS. 8A and 8B, respectively).

[0311] Although the invention has been described in conjunction with specific embodiments thereof, it is evident that many alternatives, modifications and variations will be apparent to those skilled in the art. Accordingly, it is intended to embrace all such alternatives, modifications and variations that fall within the spirit and broad scope of the appended claims.

[0312] All publications, patents and patent applications mentioned in this specification are herein incorporated in their entirety by into the specification, to the same extent as if each individual publication, patent or patent application was specifically and individually indicated to be incorporated herein by reference. In addition, citation or identification of any reference in this application shall not be construed as an admission that such reference is available as prior art to the present invention. To the extent that section headings are used, they should not be construed as necessarily limiting.

The application's sequence listing, which the Patent Office published only in electronic form, follows.

SEQUENCE LISTING (1226 sequences)

SEQ ID NO: 1 - DNA, 1510 bp, Aedes aegypti
gcaacttcagtgctccagtaatcatcgcagaaaactgtaaattcacggaagcatctggtagaaatctcttttttctaggagatattgtgcctatttttaagaaaaaatgggacaaaatcaatcagccggaggtggcggcgataaaaaggatgacaaagacaagaagaagaaatacgagcccccgattccgacgcgcgttggaaagaaaaagcggaagaacaagggtccggatgccgccatgaaattaccccaggtcactcctcatactcggtgtcgtttgaagttgttgaaattggagcgcatcaaggattatttgctgatggaggaggaattcattcgtaaccaggaacgactaaagccccaggatgaaaagaacgaagaggaacgttccaaagtcgatgatctgcgaggaacgccaatgtctgtgggcaacttggaggaaatcatagacgataatcatgcgattgtgtccacttccgtcggaagtgagcattacgttagcatcctgtctttcgttgataaagatcaattggaaccggggtgttcggtcttactgaatcataaggttcatgccgtggtcggagtgctgggagacgatactgacccgatggttaccgttatgaagctggagaaggctccccaggaaacgtatgccgatattggagggttagacactcagattcaagaaatcaaggaatccgtagagttgcctttgactcatcccgaatactacgaagaaatgggtataaaaccgccgaagggagttatcctctatggacctccaggaacgggtaaaacactactcgccaaggccgtggccaatcaaacttcagcgacatttttgcgagtggtcggatcggagttgatccagaagtacttgggtgatggacccaaactggttcgagaactattccgtgtcgctgaggaacatgctccttcaattgtcttcattgacgaaatcgatgcagtaggcacaaaacgttacgattctaattccggaggagaacgtgagatccagagaaccatgttggaactgctgaaccagctggacggtttcgattcacgcggggatgtgaaggttattatggcaaccaatcgcattgaaactctcgatccagctttgattcgtcctggtcgtattgatcgcaagattgagttcccacttccggacgagaaaaccaagcgtcgtatttttaacattcacaccgcccgtatgacgttggcagatgatgtgaacctttccgagctgattatggccaaggatgacctttccggggccgacatcaaagccatctgcactgaagcgggtctgatggctttacgtgagcgccgtatgaaagtgacgaacgaagactttaaaaaatccaaggaaagtgtcctttaccgcaagaaggaaggaactcccgaaggattgtatctctaggttggtatatgtcatgtgcattagccgtattatattcagatttgcttttgtctgatcatttaataaactcaaatgaaagaaaagtag

SEQ ID NO: 2 - DNA, 1601 bp, Aedes aegypti
catcaacactcgccccatcacaggattgttttgtgtcgcggtcatattcctctaaattttgctattaaaatccgtagaattcggtcggaaacagtcgtaaagtagtgccctcgaagtaaagaaagtaagtgaatcgaattcagcaccatggccggaacactggaggacaaatccatctgggaagacggtgaggaaacactgggcgaggaagtgctccggatgccaaccgatgaaatagtgagcagaacccgtctgatggacaatgaaatcaaaatcatgaaaagcgaagtgatgcggatcaatcatgagctgcaaacaatgaacgaaaagattaaggataatacggaaaagatcaaggttaacaaaactctcccgtatttggtgtcgaatgtgatcgaactgctggatgtggatccgcaggaggaggaagatgacggcgcggtggtggtgctggattcgcagcggaagggcaaatgcgccgtcatcaaaacatcgacccggcagacatacttcctgccggtgatcgggctggtcgatccggagaagctcaagccgggagatctggtcggggtgaacaaggattcgtatctgattctggaaacgcttccggccgagtacgatgcccgtgttaaggccatggaagtggatgaacggccgacggaacagtactcggatattggtgggttggacaagcagatccaggaactgatcgaagcggttgtgctgccgatgacgcacaaggacaaattcaagaatctgggcattcacccgccgaagggtgtgctgctgtatggacctcctggaaccggaaaaactctgctggcccgtgcatgtgctgctcaaaccaagtccactttcctcaaactggccgggcctcagttggtgcagatgttcatcggagatggtgccaagctggtgcgtgatgccttcgctctggccaaagagaaatccccggcaattatcttcatcgacgagctggatgccatcggtaccaagcgtttcgactcggagaaggccggcgatcgtgaagtgcagcgtactatgttggagctgctgaatcagttggacggtttcagttccactgcggacatcaaggtcatcgcagctactaatcgggtggacattctggatccggctttgctgcgttccggtcgtctggatcgtaagattgaattcccgcacccgaacgaggaagcccgtgcgcgtattatgcagatccattcgcgtaagatgaacgtcagtccggacgtgaactttgaggagctggctcgttcgaccgacgacttcaacggtgcccagtgtaaggcggtgtgcgtcgaggccggtatgattgcactgagacgttcggcggtggccgttacccatgaggactttatggatgccatcatggaggtgcaggccaagaagaaggccaatctgaactactacgcgtaaggtccagacagagaagacttggtaggtaagttgctttgtcctttaaaaaaaaccttatgtatcgctaacttgtactagcaataaacaattgtattctgattacgggaaggatgctgaattttccgaacatgtcccaagtcgtcagatataagttgtaggtaacattt

SEQ ID NO: 3 - DNA, 1302 bp, Aedes aegypti
cactcgttcattacgttcgtgtacgctgaagcaagcaaattgtctcggctttgttcttaaatttcttccggaagtccctatttaacattcaagatgggtagggaggacaaagctacctggaaagccaactatttcgttaagatcgtgcaactgctcgatgagtaccccaagtgcttcatcgtcggtgccgacaacgtcggatcgcgccagatgcagaccatccgtatctcgctgcgtggaacggccgtcgtcctgatgggcaagaacaccatgatgcgcaaggctatccgtggccatctggaggagaactcgaacctggagaagctgctgccacacatcaagggcaacgttggcttcgtgttcaccaagggtgatctggttgaggtccgtgacaagctgatggaaagcaaggtccgtgctccggctcgtgctggtgctatcgctcccctggaggtcgtcattccggcccaaaacaccggtcttggacccgagaagacctctttcttccaggctctgtccatcccgaccaagatttccaagggtacgattgaaatcatcaacgatgtacccattctgaagccaggcgacaaagtcggtgcttccgaagccaccctgctcaacatgttgaacatctctccgttctcgtacggtctgcagattgagcaggtgtacgattccggttcgatcttctccccggacattctggacatcaagccggaagatctccgtgccaagttccaggctggagttgccaacttggctgccgtttcgctcgagattggatacccaactctggcttccgtgccgcacagcattgccaacggattccgcaacctgttggccatcgctgccgtcaccgaggttgagttcaaggaagccgaaaccgtcaaggagttcatcaaggacccaagcaagttcgctgccgttgctgccccggctgcttctgctgctgctgctgctccggccgccgctgccaaggaagccccgaaggaagagtccgaatccgaggatgacgacatgggcttcggtctgttcgattaagaagcgcgttcttgtctagccgccaccagtggttgcactgcaccatccttttctaatatctactcctcggggacggaaattcgcatctcttgaaaaggagggacccgtatctactcgtccgggattgaaacgacaaatcgattccaatggcgatgtacgtgggccgagtgaatttgaatttgtccccggaatacgtattgaggatgggcaagttctaactaaaaaatatggtattttgcaataaaatacgttaaaatgtaa

SEQ ID NO: 4 - DNA, 645 bp, Aedes aegypti
ccagtccctgtcaaacggcgctgtctttcgttctttttccggcatctttactagtgtcgagcacacatcgaattttgctgcgagctaaacaatgtcgaagagaggacgtggaggttccgcgggaggcaaattccgcatctcgcttggtctgccagttggcgccgtcatcaattgcgctgataacaccggtgctaagaacctgtacgtgattgccgtccatggaatccgtggtcgcctgaatcgattgcccgccgccggagttggtgacatgttcgtcgccaccgtcaagaagggtaaaccggaactccgtaagaaggtcatgccagcggtcgtcatccggcagcgaaaacccttccgcaggcgggatggcgttttcctctattttgaggacaatgcgggcgtcatagtaaacaacaagggcgaaatgaagggttcggctatcactggccctgttgcgaaggaatgtgctgacctgtggccccgtatcgcgtccaatgctggatcgatagcttaagagacggattggattggataaggaagcgtttgtttttttctggagtaagattccataaatttaccgagcaggaagaacatggagaggaataaaacatgatggaaacgacagtgagaaaaggatacgttaaa

SEQ ID NO: 5 - DNA, 1494 bp, Aedes aegypti
gtgttctgctcgctaccgaactggaagaaagttttcacggatacataagtctagattgttacgtgattggataaaatcagtgatatcgatttgaaatcagtttacgatatgcggctttcagtgagttcgtataccgagagttcctccgaggaggacgatctgtcgccacgggacaaggttcagcagaactccaagggattcgccgatttctgcgtgcggaacatcaagcagcactcgttcggtcggcatgagatcgaaatcgccgaacaggaaatgcccggaattatggccctgcggaagcaagccctcgaggacaaaccgctgaagggggccaacattgtcggctgtacacacatcaacgcccaaacggccgtcctgattgagacgctgatcaacctgggtgctaatgtgagatgggctgcctgcaatatctactcgacacagaatgaagtggccgctgccctggcggaaagcggcgtgccgatctttgcctggcgaggtgagatcgaagaggatttctggtggtgcatcgataaatgtgtccacgcggaaaactggcagccgaacatgatccttgacgatggcggcgatgccacgcatctgatgctgaaaaagtaccccgtcatgttcaagatgatcaagggaatcgtggacgaaagcgtgaccggagtgcaccgcttgtaccagctgtccaaaacgggcaaactgacggtaccggccatgaacgttaaggatgccatcaccaagaccaagttcgatagtttgtacagttgtaaagagtcggtcattgatagtttaaaacgtgccacggatattatgatcggtggcaagcaggtcgtcctgtgcggctacggtgaggttggcaaaggttgtgctcaagccttgaaggcgctcggttgtattgtgtacgtaacggagatcgatccgatttgtgccctgcaggcttgcatggatggcttccgtgtggtcaagctgaacgaggtgataaggacggttgacgtcgtgatcacgtgcaccggaaacaagaacgtggtgacccgtgagcacatggacaagatgaagaacggttgcatcgtgtgcaacatgggccattccaacacggagatcgacgtcaacagtctgcggacctcggaactgcagtgggagaagatgcgttcccaggtggatcacatcatttggcctggccccgatgggaagcgcatcatcctgcttgccgagggacggctggtgaatctgtcttgctcaagcgtgtcgtcgttcgttgcgtcgatcacggccgctactcaagcgctggcactaattgaactgttcaacgcaccgcccggacggtacaaggcggacgtgtatctgctgccgaaaaagatggacgagtacgttgccagtttgcatctgcccacgttggatgcccatctgacggaattgaccgacgatcaggcgcgctacatgggtctgaacaaagccggtcccttcaaaccaaactactacaggtattag

SEQ ID NO: 6 - DNA, 1670 bp, Aedes aegypti
agtatcatttcaccgttcggcaccagcagacgacacctctccttagttaccggcgaaacgatggcaccgaagaacgagaacctctgtgctctggtgtacggcccgaacgatcttcgcttggaaccgcgccccattccggagccggccttcaatgaagtggtggtcgaagtcgacagttgcggaatttgtggaacggacatccacttcctcaaggatggtggctttggcgcccagcggttgatcaaaccgatcgttctgggtcatgaatcggctggagtggtccgcaaagtgggcagccaggtgacgaacttgaaggtgggtgatcgagttgcgatcgaaccggctgctggatgcaggacctgcgatctgtgcaaggttggaaagtataacatctgcctggatggaaagcactgtacgactcagaaacatgatggcaactgttcgaattattacgcacagtatgcggattgctgcttcaagatgccggaccacatgaccatggaggagggtgctttgctggaaccgttggccgtggctgtgtacgctggaagacgcgcccagattggtctaggtaacaaagtggtgatcttcggtgctggtcccattgggttggtgtgtttgattgcggccaaggcaatgggagctacgaggaccgtcatcctagatttagagcacgccaagcaccgattggaagttgccaagaagcttggcgtcactggagtcattggtatcaagaaggaagattcggaggaggatctggtgaagaagattcacgagattctgggtggaccggccgatagggttctggagtgcaccggttcgcagcccggaatgagaatctcgatcaaggccacgagaaacgccggaagaatttgcttggtcggattgggcaacaaggatgttcagttgccaatggtggatgctatttcacgggagatcgatataacaacgtgcatgcgttataaccatgattatccagccgcgttggagatcgtcgccagtggatacgttgacgttaagccgctggtatcgcatcactttgacctgtccgacgtccacgaggccttccgtgtggccagtcaaggcgaaggagtcaaaatcatgatccatctggttccacgtgacaccaacaatcctatcccgttcactgactgaaccaccactaagcaaggatttctttaccatctacctgtgtcgctatttctatcacaccaatcatgattacaaatatattaatgtataacaaactaggcctatacttacctcactagaaatcccaccctcggtactctttgacgatactattgttatcctttcgcattcgccggacagcactggcctctcccttgggaacggctcgcttcttctggtctttcttctcctgctgccggatgcctcccttgacgcgatccgtcaccaccgagggcgcaatcgtactggccgtggtcgagtaggagcgtgcacttcgggcatcatccagcagcttccggaccataaccatacgatactctcgcgagttgggatccagttcggccagtttatcatcctcctcgttggtgatcagttcgtttgaactgatcgaagccccatcatcatcgtctttgtccacttgattggagtgactcaactcttggtgtgaaataataggctctaggaatggaacagacgcc

SEQ ID NO: 7 - DNA, 1705 bp, Aedes aegypti
ggaatcattccaaagcagttggacggttttttcggtgttctcgttctgtaaagatagaaatcagctcaccatggctaacgcaaacccagagattaagtacacgcagcttttcatcaataacgagttcgtggatgccgtgagtggtaaagtgtttccaacggtgaatccatcgacgggtaagaagattgtggacattgccgagggtgacaaggccgatgtggacctggccgtccaggctgccaaggccgccttccagcgaagctccaaatggcgccagatggatgcctcggctcgtggaaagctaatttacaagttggccgatctgatggagcgcgatatgcaccagattgccagtttggagtcgttggataatggcaaaccgtacatgagtgcggtgtatgacgtgtacggttcgatgaactgtctgcgatactacgccgggtgggcggacaaggtttgtggtgaaactgtgccttcggatggacctcatctgacgtacactcgcaaggaaccgttcggagtggttggtcagatcattccatggaactatccgctgctgatgttggcctggaagtggggtcctgcattggccgctggatgcacgatcgttatgaaacccgccgaacagactcccctcacggcactgtacatgtgctcgctggtcaaggaagctggttttcctccgggtgtggtcaatatggtgcctggatatggtccaaccgcaggaaacgctattacaatgcatccggacattcggaaggttgcgttcactggttcggtagaggtgggaaaaattgtgatggctggtgcggcgagcaacttgaagaaggtttcgctggaactgggcggcaagagcccgctggtgatttgcgacgatgtggatgtcaacgaggccgctcaaattgcctacactggcgtgtttgaaaacatgggacaatgctgcattgcagcgacccgtaccttcgtgcaggagggaatctacgacgcatttgtgcagaaagccaccgaactggccaagggacgcaaagtgggcaatccgttcagccaaggaatccagcatggtccccagatcgatgacatacagttcaagaagattcttggtttcatcgaaacgggcaagaaagaaggcgctaagctggaaaccggtggcgtccaggtcggcgaggaaggctacttcatcgagcctaccgtgttctccaacgtgaccgacgagatgaccattgccaaggaggaaatcttcggaccggtgcagagtatcatcaagttcaagacgctggacgaggcaatcgaacgagcaaacgccactagtttcggtctggcggcaggaattgtgaccaagaacctgaacaatgctctcaccttcagcaacgcagtcgaagccggttcagtctgggtaaatacgtatttggcagtatcgaaccaggctccgttcggaggctacaagcaatccggtgtgggtcgtgaaatgggcaaggaaggcatcgaagaatacctggagacgaagaccgtgtccatcaagctaccgtctaaggtctagaacgttccatatatctggtgttggtgtcagtctcgcattttgttatcgcattcagagcacggactgctttgtaatgcaatcgagccgtatctgcaggtcatcgcggacaaatatgcgataaatttccattgtatactggtatgaataaattatctctaaaaagtcaac

SEQ ID NO: 8 - DNA, 2208 bp, Aedes aegypti
caggatcagtcggtttcggagatagtgctgagtatcagtggtgaatcaaagctacaagtgccagaaaaaaggatgagctctcgtcaggaagagatggtggcgaccccattcaagttgtggggtggccgattttccaaaggtatcgatcacgttctgtcgaaggtgaacaattcgttgacggtggacaagcgtctgtactcggaggatatcgacggcagtattgcctatgcgaagagcttgaccgatgccaaactgctgaccaagagtgagttcaaagtaatttgctacggcttggaaacgatcagaagtgagtgggaaaagggaacgatcaagttgatgccacgggatgaggatgtgcacacggtgaacgaacggcggctgatcgagatcattgggttgcagatcggcggaaagttacacaccggaagaagccgtaacgaacaggtggtggtggatatgaaactttggatgagaaactctgtgcgagacgtgatgaagcagttggctgccttgatcgcgggcttgaataccgttgcagaacgttacattgatgtgctgatgccgggttatacgcacatgcagaaggctcaaccggtgcggttcagtcattggattttgagttatgcgttctactttaaagaggactatcatagattctcggagttcctgaaacgaatgaatgtgcttccgttgggtagcggagctctggcgggaaatccgttcaacatcaatcgtcatcagttggcggaagatttaggtttcaacggagtttcgtacaacagcatgaatacggtcagtgatcgtgactttgtggtagagtttaacttcctctgcaccctggcaggagttcatttgagtcgattggccgaagatctgatcttgttctcaacaaaagaatacaactttttggagctttctgaagagtacacaactggcagcagtttgatgccccagaagcgcaatccggacagtttggagctgattcgaggcatttcgggcagtgtttttggccagcattgtggactactgatgaccctgaaaggcctgccgtcgacgtacaacaaagatttgcagtgcgataagagcggcatgtttgctgtttacgatcagattctgctttcactgacgctggcgactggagtgataacgacgatgaaagttgacgaggaacgctgcttgagtgctctcagttacgacatgcttgcaaccgacatggcatactatttggtgcgcaagggaattccattccgagaggctcatcacatttcgggagaggttgtagcgttctctgagaaggttaaaattccgattaataagctcacgctggaggacctgaaggagatcagcccatgcttcgatgagacggtaagcacgctgtggaactatgaaaacagtgtcgaacagtacaccgttgtcggaggaacctccatgatctcagtacaggaacagatcaacttactcaagggctttctttcgaagtgcgactgagatttttatctagattttaagattattttgttttattctgttgaaccataaatctgtataaatatagtatatgacttttctgctgtagagtttaatcgtgagagaaggttaaattgtttatgtatactgtaaaaaaacgaaaaaaaaactgtgccatgtcttcgtgttttgtgactaataaacacctttctttgaaaccttaagttatacacaagcctatgatcaatcttcttccgaacgtttcgtcctgtaaaattagccatttttttctattatagattagtagcgcgataatgcagaaagtaaaaccattcatgattataccaaagcaaatcgattctgtgtagcttcaagccgtggtcgaacgcaaaagtgactaatatcgttcgacgccgtttagcgaaaatcataattacaaaaaaaaaaaacaaaccgtagtaggaacacaagcgacatgtttcgtatgcttttgtaaggcaaaataataataataataatatagtagacgtttctgcgttctgcgggattcgatcgttttgatcgatgcctttcggctatggggggtttcgaattcgctgattaattatactccattcattgcttttcctttcgagatccgtgttagtttttgcgtatgtgcactgtatactgttctgtagttttgcctctcatgggcaattcactgatgggtttaatgagtctcaccgatgatgtttcttg

SEQ ID NO: 9 - DNA, 2031 bp, Aedes aegypti
gtcattcgtctttttgcacgcacactttcggtgcggtctccgcggcagtggttcgcttttccacatatgcagcaagagctgtacggcattgcaacagaaattgcagatctctgataaagttcagacccttcctttcgggagataagtgctgctgatacataaattgctatcacaaggtgcttcttgcgaatagttaaagtgagtgttctgaccagtcaacagctgcatcagaagcagaagcaaggatggagaacctaaccatacaggaaatatacacttcggacgcccgtggaagcgacgagatcggcgatggcaccgccgagaagcccttcaagacgatcctacaggcgatgcgtcacgccggcaaggaaccattcccaaccatctacgtcgatgccaaggacgagaaggcggaatctccgttcgaggtagcggccaagtcccagctcaaaaagatccagaagctgtgggtccgcgatagcttaaagtccagcgaaaagcagaagcgcgaagcggaggacgccaagaagcgtgagcaaaacctggaggaggcgaggaagatcgtcatcaaggaagatccatcgtggacgccggccaaaaggatcaagatcgtcaagggcagcgagaaccgcgacattcgagttaagatcaacggttgggtgcatcggttgagaaggcaaggaaagggactgatgttcattacgctccgtgatggaaccggtttcctgcagtgcgttttgaacgatctgatgtgccaaacctacaacgctttggttctatcaacggagtctgccgtgcagctcttcggtaccctgaaggaagtcccggaaggcaaaagtgcccctggaggacacgagctccatgtggattactgggagctgattggtctggcaccggctggcggcgccgatacgattttgaacgaggatgcccatccggatgtacagctggacaaccgtcacattatgattcgtggtgagaacacttccaagattcttaaaatgcgtgatgtgattatggacgccttccgtgcgcattaccatgatcgtggctatacggaggtcactccaccaacgctggtgcaaactcaagtcgagggaggttccacactcttcaagctcaactactttggcgaggaagcctacttgacgcaaagttcccagctgtacctggaaacatgtctgccagcgctaggtgatgtctactgtattgcccaaagttatcgtgccgagcagagccgcactcgtcgtcacttggccgaatacagccacgttgaagccgagtgcccattcatctcgttcgatgacttgttggatcgtttggaagatttggtggttgatgtcgtagatcgggtccttaagtcgccatggggccatatcgttaaagaactcaaccccgatttcgttccaccgaagacaccattccgtcgcatgaactatgccgatgcgatcgtctggctgaaggagaacaacgttaccaaggaggatggaactttctacgaattcggagaagatatcccggaaggaccggagcggaaaatgaccgatactattaacgaaccgattatgctgtgccgtttcccggccgaaatcaagtccttctatatggctaagtgcccggaggaccgaaggctgaccgagagcgttgacgttctgctgccgaatgtcggagaaatcgtcggaggatctatgaggtcctgggatcacgaagaactgatggagggctacaagcgcgaaggaattgaccccaagccgtactactggtatattgatcagcgtgtctacggatcgcaaccccatggaggatatggattgggcttggagcgtttcatgtgctggttgttgaacagataccacatccgcgaggtatgtctttatccccgtttcttggacagatgcaaaccctaaacgagtttacgaacgatgcatttctgtgcccgcatttataatctttattcaatttaacgctattatcttttcgcgattataaatgtgacttggaataaacaggctctaagtttaacgcttgcaa

SEQ ID NO: 10 - DNA, 1351 bp, Aedes aegypti
tccccgcattgttgtgttctgaaccgtcgtgatcgcgtttttctccatattacatcgtaatacactacattttccttttgttgacgcgctggaaagaaaatccaaaattgttcgagtttttcggtcgcattttcttccggattagtgcgaatttgtgtggcagctgtcggaattaggttgaactggcagtaggctaaccccttaggagccgtagcgaaggagacgagacgaaaagcaaacagcctgtggatgcgcttatacgaggattcccagcggcagcagcaggcaaggaagatcagcaccggagattcctacgaaaacatgagcgacgatgaccgggatattgatatcgacagcgatgatggcgaagattccgataacaccaaacagtcccggaatgcggctggaggccaaatttattcgcaggccgaaaaacgtgctcatcataacgcacttgagcggaaaagacgcgatcatataaaggatagctttacgtctcttcgtgactcggttccatcgttgcaaggcgaaaaggctagccgtgcacaaatactgaaaaaagccgcagaatacattcagtttatgagacgtaagaataactctcatcagcaggacattgatgatctgaaaagacaaaataccttgctggaaactcaaatccgccagctagaacaggcacgtgccaccgggaacttcggtgatggcagcgatctcgggctaggcatgaacgatagctcacgtgaatcggacagttcggacgttgacgacggtgccagcaacaatggtctaggcggaattcatcggaacaaaaaaatgaagatcaactcgaactactgaaccaactccaaggttcattgctggcacggctctaccttagatttagttattctacagaggaagtgaagaagaatatggtgagataaaagggatggaacagttgtcacagggaaaggtaagaccagtttttttactgaacacgatgataacaacacatacttttgatacaccctgaaaatttatcttcctgtattattgcatatacttttatgttaatctgtaaatggaaaattagtgatacgaattgatttgaaaactatagtgtacaaaaaagtttcaattttatttttgtgttcccatttttttacaattttgtttaaaattcgttcaagcaaaagtaaacgaatataaaaatgcaaatcaggatgagaacaaacagaatatatcataactgaaaaaggacagttagtggatttgaaactttagctttatgtgttttataaataattttgattaatcttagtttttttttgaaaatttcggatagaataaaaagaaatccctcaattattgt

SEQ ID NO: 11 - DNA, 2215 bp, Aedes aegypti
gaattcgtcaataaaaaaattcgttcaaagcaaaatattttaagagtgtttaagcatttatttgtttttgaattgtaatgggttgagttttaaaagtcttgttgagctagtgaaccaaagaagcatttaaaactagtttaaaaaagtttaaaactacgttttgtaatgagaactttaatatctcaattcaaaaccagaaagttgatacgtttcttttatctaatgcttagccaccttagttatcttttatctaatgctacaacatcaccaaatattactaaaaaaaagcccttctaactgtagactcagagtcccgaatttgtaaattctgccctgttttccatggtagattgtttaaattagaatacctgctgtgaacctatccgacttcaccctactgttctttaaggccaccatgctttgaatatcgcttattttaaaagtcaaagcgattcctatcataatcagtgggaaaaacgttaaataaaactaagaatgaatccgtcagcatggatcaaaggcagacttctactttcaagtacccaacgggagttaaatcgcggtataagctccaatgaggtaccgtagctgataagacaactatttccacttaacgatgtgctcaagcgaactataaatggcacctgattgcaattggccaggttagtgtgcagtcggttagttgggaaaatgggtcttccggtagcagtaaccgttttggggatttgtctgtgtttcggagtgacttttggaaacgaagccgctcgttatgataactacagagtttatgaggcgattccgtcgtctaacagtcagctgaaattgctcaatgagctggaacagtcgagtgatagtttgattttcctgaaaagtggaaacaatgttggagaaaagttcaacatcgttgtggcaccccataagctggtagatttcacggaagcactccaaaacgaaggtgtccgtgtcagattgctggaaacaaacatgcaaagtttaattgatgaagaaaaacagcgaatggtgtcaaagcgtgccagaggtgctttcgatttcaacgattattatgagttggaggatattcacgcatggttggacaaattggctagccaatatgatcaggtggaacttctggagggaggtcattcctttgagaaccgttcgatcaagggtgtgaaggtgtcttacaaatcgggaaatccaggcatatttgttgaaggaggtattcatgctcgcgaatggatctctccagcgactgtcgcttacattctaaacgaattgctcaccagcacggatcctaaagtgcggaacattgctgaaaactacgattggtatatgtttcccagcgtaaaccctgatggatacgtttacactcataagaaggatcgactttggaggaaaactcgtacgccgtactcgggaggatgctttggagctgacccgaatcgtaattgggatttccattgggctgaacagggaaccagcaatcgttgcaattctgatacctatggtggcccgcatgccttttccgaagttgaaacaaaatctttgtctcagttcatcgcttctttgaagggtaaaattcaagcctacatctcatttcattcatactctcaacttctcttgttcccatatggccataccggtgagcacgcctcgaatcacaacgatctgaatgaaattgcaaaggcaacgatcacatctttggcgaagcgatatggcacaaagtacaagtatggtaacatctacgatgccatctacccggcaagtggcgccagtgtggattgggcctacggaactttggacgtaaagattgcctacacctacgaactgcgacctggttccggctcatggaatggatttgttctgccgcccaagcagatagttccaactggagaggagactcttgattcgttggtaacgctgttggaggaatcggataaaaggggttattatgaaaactgtgaaggctgttgagactgtctgttcagcgatgtgataatataaaaataaacgaactgcttataacaatcacaatcgtcaatatttatttgtttgacatcaattttcgatatgaagtactttccttttgatgacgttggcgggataatgggtggctttcgatatcaagtagcattaattgttcctgttttattttcgcatgctgttctttagcactccattgaattgttttaattgttttaattgttttgtcgaa

SEQ ID NO: 12 - DNA, 1251 bp, Aedes aegypti
cggcatcgaacgggcaccagagcagtacggttccagaacgttctcaggcctggtctacggtgttgctgctgctgtgcgtgtgtgttgaaaatcaagaccgaacaaggtaaacggcacaagatggtgaaagaaacaggtttctacgatatactaggcgtaaagcctggctgttcccaggatgatctgaagaaggcttaccggaaactggccctcaagtaccacccggacaagaacccgaacgagggcgacaagttcaagcaaatctcgatggcgtacgaagtgctgtcagatccggaaaagaaagccatctacgacgaaggcggtgaacaggccatcaaaaagggcggcggcggcggtggcggcgggttccacagcccaatggatctcttcgagatgttcttcaacggcggcatgggtggacgaagcaaacgggaacgccgtggcaaggatctgctccatcaactatcggtcacactggaggaactgtactcgggcaccaccaggaagttagctttacaaaagaacgtaatctgtgatcagtgcgagggtcatggtggcaagaagggtgcctcccagaagtgcaccccgtgccgcggaaccggtgtcatgaccaaactgcaccaactggcccccggcttcgtccaacagttagaagaatcatgccgtaactgtcgaggaatgggtgaaatcatcgacgagaaggacaaatgcaaaaagtgcaacgggcggaaaacggtgcgagatcgcaaaatcctggaggttaatgtagaaaagggaatgcgcgacggacagaagattgtgttttccggtgaaggcgaccaggatccggatttgcaacccggtgacattgtgatagttctggacgagaaggaacacccgatcttcaagcggtcaggccaggatctgatcatgcacatgcaactgcagctggtagaatcgttatgtggtttccagaagataatccgaacgctggacgatcgggatctgcttatcacgtcctatccgggtgaagtcttgaagcatgaggcaatcaaatacatatccggcgagggcatgccccaatacaagaatccattcgagaaaggacgcctcatcattcagttcttcgtcgcgttcccagattccgtgccgatcgatttggttccctctctggagcagtgcctaccgggacggcctgtcgtgaaggttcccgaggacgccgaagaatgcaacatggatgtgtaccgtcgaagatttactgctgaatgctag

SEQ ID NO: 13 - DNA, 483 bp, Aedes aegypti
atgctaacgaaaggaattacgcttattctgttactagttctcgtacattcatctcatggagattctacgccaaatcgaaaattctacattcccagcattcgagctaactggttcaaggcaaatgaattctgcaattcattgaaaatgcgcctggtggccatccgatcgcaggaggacaacgatgccgtcgcacgatacgtccgaacaacctccaagtttaccgataactgcagcttctggattggggcgtccgatctagcggacgagggaaccttcgtatgggtggccaccggtgaggaagttacctatacgaactggcgcgaaaatgagcccaacaacgagggaggcaatgaggattgcattcagttggcttacattccggcgttgaattaccactggagctggaatgataacacctgcgcaggacagtcgctgtatttcatatgcgagagtgtggaatgtgattgtgtgcaaccgttttga

SEQ ID NO: 14 - DNA, 2531 bp, Aedes aegypti
ttcttcacgcgtttttcggaattttgctaattttcgctgaatttcatggaaaaaagtgttaaaaacatctgaaaaagtgtcggtaacagtttaattagtgatagacaccatggacacggaagatccgaacgttcttcccgggttttccattgaaaatgccgacctggacttcgacgacgacgacgatgtgagcgggaagaagggtaagaagaagaagggaggcggattccaggccatgggccttagcatgccgatcctgaaggccattctgaagatgggctataaggttcctacgcccattcagcgtaagactattccgttgattctggagggtcgtgacgtggtggcaatggcaaagacaggttccggtaagaccggctgtttcctgattccgttgttcgagaagctgaagcaacgggagattaaatccggtgccagggcgctggtgttgaccccgactagggagctggctattcagacgttcaagtttatcaaacagctggggaagtttacggacctgaagacgattctggtgctggggggagattcgatggattcgcaatttgcggccattcacacgctgccggatatcattgtggccacgccgggtcgattcctgcatctgtgcgtcgagatggacctgaagctgtcgtcggtgcagtactgtgtgtttgacgaagcggacagacttttcgagatgggcttcggggaacagctgacggagaccctgaggagattgcccgaggcccggcagatggttcttttcagtgcgacgctgcccaagttgatggtggactttgccaaggcgggactgagcgatccgacgttgatccggttggatgtggagtcgaaaattccggaagcgctggatttgaagtttgtctactgccggccggatgagcgatatgccacgctgttgatcttgcttcgggaggtcattccgaggagtgcccaaacggttctgttcgccgggacgcagcatcatgtggagctgatttctttgattctaacacgagccggaattccaaatacctatgttttttcgagtctggatgcttcggcccgaaagattaacaccgcaaagtttaccatgaagaaggtgaacgttttggtggtcacggacattgctgcccgtggtttggacattccttccctggattacgtggtgaatgtgcactttcctggcaagccgaaactgttcgtccatcgagtcggtcgttgtgcccgtgctggacgaagtggaacggcctacaatatcttctccaacgacgatatcgcccacatgatcgatctgcacatgttcctcaccaggccattggtgctgagtgacgcccgctgcattggagttgccccgccggatatggtcgaggcagaacatcaattggtgctggattacgtgaagcacatcgatctggcaacggcgttccgcatcagtaacaatgcctacaagcagtacattgtgacccggccggcagcttccgccagtgccaacaagaaggccaagcaattcaagatcggagagctgcaagtgctggaggatttcggcaaggtgatggagaagttggacgaagataagaaggccgacaagcagaagaaggcggatgctgctcagaaaaagcaatcgactgttaatccggatgaattccgcagtagtttcctagctcagatgaagaactaccggccgcagtcgaccattttcgaactgaacccgaagaacaacgccaaggaggtggtggtgatggccgaaaagcgaaacaaggacaccatcaaaatcgagaaacacaaacagaaacagttggaactggaactggaggaacagaaaaaggcctccgccgaaaatgtgccagacgaagacgaatatccgaagaagaagaaacgcaaaccagtcaaagatgaggaaaactttatctcctatcagtccaaggacgccgttgaagacgacggctacgctatcaatagttttgccaaggaggccaattcggcggaactttcggtcattggcgacacggccgcagaccaacggtcccaccagcggctgcaaaagtgggatcgcaagaagaagaagatggtcaacgtggtcaatcccaaggcgggtaagattcgaacggagcatggtgtctggattgcggcttcgtacaaaaccggccggtacgacaagtggaaggagcgcaccaaggttgatgagcagatggcccgtcaacggcaagacagcgatgccagcgacggagaggaggccgtgtccgttcagaagcatgattatccgcatacccactggggtcgacacaacgccaagctggatcagaagaagatgcgcgatttgggtctgaagtcggcggaccagatcgtgaaggagcggatacagaaggagaccaaacaggccaaggagaaggtggcacggctgcgcaatttggctcggaagaagaaaacgctgggcaagaagatggcgaagtcgaagggcaagtagaaccaggtaagaagttagatttgtatatcgagcactcaataagatgtcttaaaatttttgataaatt

SEQ ID NO: 15 - DNA, 967 bp, Aedes aegypti
gttcttctgcgtctcgccaagctgcctttctcttcgtgaatctgctactgctggttgaacatcgtgcttctgccaagatcggacgttttctcgtttaaatccacgcaaaaccaactaaaaatggccttcggagacgtcaagacccccaagggactgcaggaacttaacaacttcctggccgatcacagctacatcgagggatacgttccatcgaaggccgacctttcggtgttcgatgccctgggcaaggctccagccggagactacgtccatgttcagcgctggtaccgtcacatcgcctcgttcagcagccaggaacgtgctgcttggggaggacaggccctgcctcaggtggccggtggcaagccaacagttgctgccctagccaagcctgccgccgatgaagatgacgatgacgtcgatctgttcggatcggaagatgaggaggagagcgccgaggccgccaagctgaaggaggaacgtttggccgcctacaacgctaagaaatcgaagaaacccgccctgattgccaagagttccatcatcctggatgtcaagccatgggatgatgaaaccgatatgaatgagatgcagaagaatgtccgcagcatcgagatggacggtctgctgtggggtgccgccaaactggtcccggtcggttacggaatcaacaagctgcagatctgctgtgtcattgaggacgataaggtttccgtcgatgagctgcaggagaagatccaggacttcgaggactttgtccagtcggtcgacattgctgccttcaacaaaatctaagcgggatgagatggcacttagttgtttgacttataacattctaactttgagtccgttctattaaagttcccttcgataatacataatgattattttaaatttaatgctcttctaaacgaaatccaataaaaacaaaaacgtttaagtaacatacttccataatgaaaacaaa

SEQ ID NO: 16 - DNA, 3036 bp, Aedes aegypti
ctagaatcggtcgccgaaagaagtgcagaggaacgccacgccacgtccatccattcgagaagaaagaagttttctggaccgaaaattgtgtgatttgttgtgccgggaacaataattacagcacgcaagtgttgcaccggaaagggcgctaccatgaagtacctgctgcttctgattgtgggagttttcctgtttgcaggaatctcctcggtccgcgcggaggacgatgctgacatcgaggacctaccggtcgtcgagatgaacctgggcgcctccaaggagggttcccgaaccgatgccgaagccgtacagcgcgaagaggaagccatcaaactggacggcctgaacgtatcccagatcaaggaactgcgcgaaaagtcggaaaagttcaccttccaggccgaggtcaaccggatgatgaagctgatcatcaactcgctgtaccgcaacaaggaaatcttcctgcgtgagttgatctcgaacgcttcggatgctctggacaagatccgtctgctgtcgctcaccgaaccgggcgtgttggactcgaacagcaacctggagatcaagatcaaggccgacaaggatggcaaggtgctgcacattatcgacaccggtatcggcatgacaaaacaggatctggtcaacaatctgggaacgatcgccaagtccggaacggccgatttcctttcgaagatgcaggaaacgaagacggagacgcaggatgtcaacgacatgattggacagttcggtgtcggtttctactcggctttcctggtggctgatcgcgtggtcgttaccactaagcacaacgatgacgtgcagtacatctgggagtcagatgccgccagcttcagcatcgttgaagatcctcgtggaaacactctccagcgtggttcgcagatctcgttgcacctgaaggaagaggcccaggacttcttggaggaggacaccgtcaagcagctgatcaagaagtactcgcagttcatcaatttccccatctacatgtggacgagcaaggaggttgaagaggaagttccagtcgaggaagaggtcaccgaaaagcccgagaagaaggacgaagatctgaccgaggaagaggacggaaaggttgaggaagaggccgaagaagagaagccaaagaccaagaaaatcaagaagaccgtttgggactgggaagtcatgaacgacagcaaaccaatatggacgcgtaagccgaatgatgtgacggacgaagagtacaccgagttctacaagagcttgaccaaggacacttcggatccattgacgcacactcacttcgtcgccgaaggtgaagtgaccttcaagtcgttgctgttcatcccgaaggttcagccatcggagagtttcaacaagtacggaaccaagtcggacaacatcaagctgtacgtgcgacgtgtgttcatcaccgacgagttcaacgacatgatgcccaactacctgaacttcatccggggtgttgtcgattccgacgatcttccgctgaacgtttcccgtgaaacgcttcaacagcacaagctgatcaaggtcatcaagaagaaacttgtccgcaaggcgctggacatgatcaagaagctggacaaggaaacgtacgacaagttctggaaggaattctccaccaacatcaagctcggaatcatggaagaccccagcaatcggtcgcgtctggccaaactgttgcgcttccagtcgtccaacagcaagagctccaaggaatacaccagcctgtccgattacgtctcccgcatgaagcccaagcaggaacacatctacttcattgccggttccagccgtgccgaagtcgagaagactccatttgccgaacgtctgctttcgcgtggctacgaagtcctctatctggtcgaagccgtcgatgaatactccatctccgctctgcccgagttcgatggcaagaagttccagaacattgccaaggaaggtttcgtgctaaacgaatcggatgaagccaaggccaagttcgatgagctgaagaccgaattcgaaccgctgctgaagtggttgaacgatgtcgccctcaaggacaagattgccaaggctctggtatcggaacgtctgtccaactccccttgtgccctggtcgcttccatgttcggctggaccggaaacatggaacgtctggctctggccaacgctcaccagaagaccgacgatcctcaacgccagtactacctgaaccagcgcaagaccctcgaaatcaaccctcgccatcctttgatgcgggaattgctgcgccgcgttgaagccgattccgacgatgtcgtcgccaaggatatggccgtcctgatgttcaacaccgccactctgcggtccggattccaactgccggaaacggccgactttgccgacagtatcgaacgaatgatgcgccaaacgttgggagtctcacaggacgaacagccggaaccggaggaattcgtcgaggaggacagcgccgacgcggcctcccaggaagaggaggaagaggtcaacgccgatgatgatgccgagcatgacgaactgtaaaatctacacaaatcaaggatggacgtgaaggaatgactggagggcgtgaatgtgcgaggatggatgaatgtgtagaaaggactgattttaaaacgataagcgcgtcctgtaattccgagttagtcgagggtaggagcatatttttgttgctccgcttggccctacagagttaagccgtgtccgtacgttatagtgattagtaactaatttgcatttcgtataatagccgaaggacagagtgttcttttgtttagtttttctttgttttggtttattaaaatgtgtttcaaacatatagaattgtatatttattgagctgtacaaaacaagatcatcaccggagaatttttgtttggtgtccgtgcaaagcgatgatccagccgtatgaacatctagattctattcaaattgatggtagcataaatatatgtgagcggatgagttgaaaaaaataaatgatgtatgaaatatgtaacgtgtttactgattggaaaa

SEQ ID NO: 17 - DNA, 2811 bp, Aedes aegypti
cacattttggcacatgccgatccagttcttaaccgtgtgtaatccgcgcccgtgaagcctgatgtattggctaaaatcgttcaaaaatcgtagaaaattgtgctaaattgtcccccgctaacgccaggtcgtgcaccgagtgtcggttcgtgaaaaaaaagaggtcagcagtcgtgtgaacagagggatatcgaatccgtgaaaaagcccgtcgccagaaaggagagggaagtagtgaaacagttccggaagcagaacctacagaagcagcaagatgtcgttcgaggaaacatccgccgatcgcaatgtggagatttggaagattaagaaactcatcaagagtttggaaatggctcgaggcaatggcacgagcatgatctcgctgatcatcccaccgaaggatcagatcagccgagtaagcaagatgttggccgacgagttcggtaccgcttccaacatcaaatcccgcgtcaaccgactctccgtactgggtgccattacctcggtccagcaccggctcaaactatacaccaaagtgcctccgaatggactcgtgatctactgcggtacgatcgtcaccgaagagggcaaggaaaagaaggtcaacattgactttgaaccgttcaaaccgatcaatacctctttatacttatgcgataataagtttcacaccgaagcactgacggctctgctggcggacgacaataagtttggtttcatcgtgatggacggtaacggtgcactgttcggaacgctccagggtaacacccgcgaagtgctgcacaaattcactgtcgacctgccgaagaagcacggccgtggtggtcagtccgcgctgcgtttcgcccgtctccgtatggaaaagcgtcacaattacgtccgaaaggtagcagaggtggccacccagctgttcatcaccaacgacaagccaaacattgccggactgatcctggccggtagtgccgatttcaaaacggaactcagccagtcagatatgttcgatccgcgattgcaatcgaaaatcatcaaactagtggacgtttcgtacggcggtgagaacggttttaaccaagctatcgaactggcagccgaatcgctgcagaacgtgaaattcatccaagaaaagaaactgatcggtcgatactttgacgaaatttcacaggataccggcaaatactgcttcggtgtcgaggacacgctgaaggcgctggagctgggatcagtggaaacgctgatctgctgggagaacttggacattcaacgttatgtgctgaagaatcacgtcagtgcgacgtccaccacagtattgcatctgactcctgaacaggaaaaggacaagtcccacttcaccgacaaggagagtggcgtggagatggaattggttgaatctcagccactgttggaatggcttgcaaacaactacaagagttttggtgctactttggaaattatcactgacaagtcccaggaaggcagccagtttgtacgaggttttggtggaataggaggtattttgcgctacaaggtagatttccaaagcatgcaactagatgaattggacaacgacggtttcgatttagatgattattaaatttttatgtttatgaatggtatcagttatacacacacaggttagaaaatatacaaaggaaaataagagacactgcagtggaaacacacaaactttcgcctgtttttttatttgtttgcatgagaagagtaaagggaacaccattcggtatcgaatcgaaacatctgcgaagccctccgggaatccttagaaagtccgagcagaaggttgtttttcctcatttagtttactgattgatgcgtctctgtactcaacgcgcggaatcctgctcaaactatccataaaacttccggcttccgccgtgtcgacaacacttataaaatcgtgtgtagtagacgcaaaatacctacctgtaatagacaaaggcttacctagaatttccgccaaattttgcagcaataccgaattttgttcggtttgtcgtcgtacatttttagagccagcaagtctttcctgagaggatttagagtgtattgaaaggcactgtgcatccgtgatcttcattcgcaccatgtgtagactttagaaagacccatagattgaacatataaaagactttgcatcatctagtgccgttgaagttagggtgttttcgttatctgccacacactcgcatgagcctacacgcatattaacagctccgtttttttaactgaaattgagtcttttttgagaggtagagcttaagaagcaagctaaacatcgccacacaaagcacgtgatacgccacacgtgtactgcagcagccgagatcgttcaagtttaacactcctagtatacttactatagactttcgtttggcggtcttttaacgtcgttctaattgatctaattcctacttactattttactattaccactattcggaaaacttgcagacgagcagcactcggacgtacactaactataataactgcgtttagcagaaaggagagtaaactgtacgactcgctgaagtaaagggaagaagaagcaagaaaacaacaaaacacttgagaaaccaatacacacacaagtacactttgtattagttaaaaaaacacaagacaaaaacaatttcgactaaccgctacaaaattttgaatccatctgataaaaatccagagaaaccagaaaattgttattatatattataaaacaaatattataaaatgatatattacataaaaagaagatatttatataaaaaggaaatgaaaaaacggaagcaaaaaacgtgg

SEQ ID NO: 18 - DNA, 4055 bp, Aedes aegypti
ctctctttgtggttcaaacagcagcggttctgttgtggtcgtcgtgtagtgaaatattttacattcatacattgaatcgaccgagaagagaacagttcacaagtgctaagaagagaaaaacacgtttttctgttgctgctttttgcgacacgggcgcagtaaaagttggaaagttttaaattggtttttggcaagtgaaatcggatcgactgagcgcatcaaaatggttaactttaccgttgacgaaatccgctccatgatggacaggaagcggaacatccgtaacatgtccgtcattgcccacgtcgaccacggcaagtccacgctcacggattcgttggtctcgaaggccggtatcattgccggggccaaggccggcgaaacccgtttcaccgacacccgcaaggacgagcaggaacggtgcattaccatcaagtcgaccgccatctcgatgtacttcgagttggaagaccaggatctggtgttcatcaccaaccctgaccagcgcgacaaggactgcaagggcttcttgatcaatctgatcgattcgcccgggcacgttgatttctcctcggaagtaactgccgcgctgcgtgtcactgacggtgccttggtcgtcgtcgattgcgtttccggtgtgtgcgtacagaccgaaaccgtgctgcgtcaggccatcgccgaacgtatcaagccggtgctgttcatgaacaagatggatcgtgctctgctggagctgcagctggatgctgaagatctgtaccagaccttccagcgtatcgttgaaaacgtcaacgtcatcattgccacctacaacgacgatggcggcccaatgggagaagtccgtgtcgatccatccaagggttccgtcggtttcggttccggtctgcacggatgggccttcactctcaagcagttcgctgagatgtacgccgctatgttcaagatcgatgtcgtcaagctcatgaaccgtctgtggggagagaacttcttcaaccccaagaccaagaagtgggccaagaccaaggatgacgacaacaagcgttccttcgtcatgtacgtgttggaccccatctacaaggtgttcgatgccatcatgaactacaagaccgatgagatcccaaaactgcttgagaagattaaggtcacccttaagcacgaggacaaggacaaggacggcaagaacctgttgaaggttgttatgcgttcctggttgccagctggagaagctctacttcagatgattgccatccatctgccatccccggtcgtcgcccagaagtaccgtatggagatgttgtacgaaggtcctcatgatgatgaagccgctgttgctgtcaagaactgcgaccctgagggtccactcatgatgtacgtatcgaagatggtaccgacctccgataagggtcgtttctacgctttcggtcgtgtgtttgccggtaaggtcgccactggacagaagtgccgtatcatgggccccaactacactccaggaaagaaggaggatctgtacgagaaggccatccagcgtaccattctgatgatgggacgttatgttgaagccatcgaagatgttccatgcggtaacatttgcggtctggtcggtgttgatcagttcctggtcaagactggtaccatctccaccttcaaggatgctcacaacatgaaggtcatgaagttctccgtgtcgcctgtcgtgcgtgtggccgttgaacccaagaaccctgctgatctgcccaagctggtcgaaggtctgaagcgtctggccaagtccgatcctatggtgcagtgtatcattgaagaatccggtgaacacatcattgctggtgctggtgaactgcatctggaaatctgtctgaaggatttggaggaagatcacgcctgtatcccactgaagaagtccgaccccgttgtatcctaccgtgaaaccgtttcggacgaatccgaccagatgtgtctgtccaagtcgcccaacaagcacaaccgtctgttcatgaaggccgttcccatgcctgatggtctggctgaggatattgacaacggtgacgtcaactcgcgtgacgacttcaaggtccgtgcccgttatctggccgagaagtacgactacgatgtcactgaagcccgtaagatctggtgcttcggtccggacggtactggcccgaacatcgtcgtcgattgcaccaagggtgtgcagtacctgaacgaaatcaaggactccgtcgttgctggcttccagtgggcctccaaggaaggtgtgctggctgaagaaaacatgcgagctgtccgtttcaacatctatgatgtgaccctgcatgctgacgctatccatcgtggtggtggccagatcatcccaactgcccgtcgtgtcctgtacgcttcgtacattaccgccgcgccacgcatcatggaacccgtctacctgtgtgaaatccagtgccccgaggtcgccgttggaggtatctacggtgtgctcaatcgtcgtcgtggacacgtcttcgaggaagcccaggtcgccggaaccccgatgttcgtcgtcaaggcctacctgcccgtcaacgagtcgttcggcttcaccgctgatctgagatccaacaccggaggacaggccttcccgcagtgcgtgttcgatcactggcagatcctgccaggagacccagctgagcctggaaccaagccgtactccgtcgtccaggacatccgtaagcgtaagggtctgaaggaaggtctcccagatctgtcacagtacttggacaaattgtaaacactttctaattacaatatacttcttacgattaaaaacacattagaagaatgaagcgtatccagctccaatcaaactaatttaaagaaaagcgtaatttataaatgtttacaacaaatccacaatacttgacacattcgtcagccaaaacgtctgagcggagaagaggcacccaattttccatcagatagcgcactattcccattcgcttgcttcgtatcctgcgtcatcgtcctcgagctccagagaaatcgcatccgcaacaaccgtcgtgacacaaaacactatgagagaagcttaacacaagggatgaacgagaactccaatccccccaaactgagaaaatgcaagcaaacactaaagaaatggaaaagaatcatttaccaccccaataatgagaatgaaacagtgatatacacaaacacaagagaatacagaagatgagaaatcatgttgaaagaaaaaaactgaaaaggaaacgcgtgtagttttacttattcttagtttttggcgtagatgtggatcaaacttatgtggtttagacgagactttgctacctttagtttaacttaattcatactcattcggtagaggaaggaaggcttgcattttgttgttgtcaacttccgtttttcggatgatcgaagaaacacaagaaaccggttattattattttcatctattattattttgctataaaataattggacaatgataatcattacaaaataacgtttattttacataaaaaaatggtatgaacgagtcgtgttatcattccacatgattacagccaacattcctctattcagtgtagtattacttgaattgctgtcccgggcactcttcgatagatgttccgctgaccgtcgatccgtggctgatggaatcgtggacgaaccttgggagacttgttgaggtaaatatacgtttcaagtttatttctgtctctttaaaatgatgattcaactttcttatgattacttaatgattataacaatctattcaagctcaacaggtctgactgttgaacaatttcctatccataaagcgttaatttgtatgtattctaatcatatttttgttctaattttgtttcagatgtttcaaggggtcataaatctttttctttaggtaagcattggaaaaatcataatgaaatacccccatcatagaatgatgctaagaatcatggacctgttctgatcaaccatgaattgaaaaattgatttttctgacacctcttctgacgacgactcaacgagctcattcaatacgaaatggcgtttcacatgag

SEQ ID NO: 19 - DNA, 1140 bp, Aedes aegypti
cgagtgtcaacttcggtttcatcctttttctttcgcgagttgaaaatcgtgtgtgcactcgtcatcatgtccacgataaatttgcctctaaatttgaccgtgcgcgtccatccggtcgttctgttccagattgtggatgcctacgaacgtcgcaatgccgactcggaacgtgtcatcggaactctgctgggttccgtggacaagggagttgttgaagtgaccaattgcttctgtgttccgcacaaggaacatgccgaccaggtcgaggctgaactgggatatgcgtcggatttgtacgacctgaaccggcgcgtcaacccgtcggagaacatcgttggttggtgggccaccggtcaggaagttaccaaccatagttcggttatccacgagtactacgctcgcgagtgcaacaatccaattcacttgaccttggacacctcgctgtctgcggcccgtatgggaatcaaggcttacgtttgcgtttcgctgggagttcccggtggcaaaacgggttgcatgttcacgccgatcaatgtggagatttcgagctacgagccggaagttgtcggtttgcagctgtgctcaaagaccattggtgttcagcagaacgcgtctcggccacggaccgtttcgccaatgttggatcttgcccaaatcacagaagcttccgataagttgctgaccttgttgggagaagtgctgaactatgttgaggacgttttggcggagaagcaacagccggataattccgttggacgagccttgctggatctgatccactcggtaccgaacatgacctccgaccagttcgcccagatgttcaactcgaacgtgaaggatttgttgatggttgtaacgctttcgcagctgattaagacgcaattgcagttgaatgagaaattgaccagtttgacatcgttcatcaattaaagatttagaagaattgtttatgctagctactacagaaacattcgataagacgataaggtgagtgttgagccaattaaccgagcgagtaccgaagaaagaagaaacgctgttctgataatctgcgcatttggttgtactcgaagatatctgtgaagtgtaaacttcgtagtgattggaaggacgaatacaatagagacaaccccagaaata

SEQ ID NO: 20 - DNA, 3060 bp, Aedes aegypti
aaacggcgctcgattgtgattctctcactgctcgcggcttgtgcgtttctcttcgtgctctgcctttgtctgctgagtgcgctggtgctggtcggtaaaagtctgtcggaacaatcgacgccgccattgctatcctcgtatctcagctcgagcagtcacggtgccagtcaaacgtcatccgtgtcatcgagtggccacaaacaaggcaagagcatcgatcattttaatcaggacagtaacaagacggctatttatctaccgaattcagtatactccggaaagccgggtggaatgaacgtgctgaaaatgggaacgaaactgttcgagaagttgcatttccggctgccgcggcacatcaagcctcggcactacgatctgacgatgttcccggatttggagaagcaaactttctccgggcaggtcggaatcgatatcaccgtgagcgaaccgaccgattacattgtggtgcacagcaagcaactggccattaccgaaacgacggtgaagaagctgtatccggaccgaagcgagcagccggtgaaagtgctgcaggccgtcgagtacgaaccgcatcagtactgggtgattgaaacggaggccatcgggacgggcgagtaccggttgagcatgaatttcagcggcagtttggcgaaccggattgttggattctacagtagctcgtacaaggacaaaggcagcaacacgaccagaaaaatcgccacgtccaaattcgagccgaccttcgcgcgtcaagctttcccctgcttcgatgagcctcatctgaaggccacctacgccatccaggtggtgcaccccagcaccaacaagtaccatgctctgtccaacatggacgcgaaagaaaccttggctaacacgcccacggccgggttgaataccaccgtgttcaatcccagcgttccgatgagtacctacttggtggtgttcatcgtgagtgatttcgagtacgacgctgtacggattacaccttcgttgggagagcgattcgagctgcgcgtatataccacgccgttccaaatccagaatgcccgcttcgcgcgtaacacggcggagaagatcatcaaccactatatcgattacttcaacatcgagtatccactgcccaaactggacatggcggccattccggactttgtctcgggagctatggaaacctggggattggtaacgtaccgcgagaccagcattttgtacaacgaggcaacgagttcaacggccaacaagcagcgtgttgcggaagtcattgcccacgaattggcccacatgtggttcggcaatctggttaccatgaagtggtggaacgaactgtggctgaacgaaggtttcgccagttacattgaatacaagggagtggacagtgcctatccggaatggggcatcatggaacagtttgcactggataacctgcatggagtgctcactctggacgcaactcttggatcgcatccgatcgtcgtgaaggtggagagtccaaaccagattacggaaatcttcgatacgatcacttactccaagggtgcctccgttattcgcatgttggaagactttgtcagcgaaccgattttcaaggaaggtgtaaccaaatacctcaacaagctccgatatggcaacggcgaatcgaaggacctcatggaccagctggatgaactgtttaaagatccatcggagcccgacctcagtgttacgatggttatggatacctttacgaagcagaagggtttccccgtcatcactgtggcgcgatctggcaatcaattccggctgcgacagtcgcgtttccttgccgatccgaacgcgaccgatacggaggagtcggaatttgggtacaagtggtatgtcccgctgacttacattacttccgaagactctactacagtcaaacgagcatggatgcttaggggcgatgatcaggtcagcatcgacgcccccagcggttcagacagttggatcaagctgaatcacaaccaggtcgggtactaccgtgtcaactatccggaagacgtgtggcaacagttcagtgagcttctttcgaaggatatcactgcgttcagtattggcgatcgtaccggattgctcaacgatgcgtttgccctggcggacgcttcgcagttgagatatgatctggcactggaactgacacgtttcttggcccaggaaaccgaatacgtaccatgggcaaccgtgtccagcaaaatgaagaacattcgtaccctaatcttcgattaccctgcctacgatgatatccttctctatgtccgccaactgatccaacgagcttacgactccgttggatggactgtagtgggcgaagatcacatgaagaatcgcctccgaacgaccgtcttagacctggcctgttctttcggccacgacgactgcctccagaaagcccacgaattgttccgtggatggctggacagtgatgtcgccgtccatccggatttgcgcaccgttgtctactactatggcctgcagcgatcggccaacatcagcgactgggagctcgtgaaggaacgcttccgtgcagaaatcgatgcaaacgaaaaagccaaactcatgagtgccctagctggcttcccggatgcgaaggtcctgcgacgtctgctggatgacgcctgggatccgcagctggtgcgtgaacaggatcatctgacctgcattcagaacgttgctgccaacaagcacggagagcagattgcgtgggatcacgtgcgaatgaactgggatcgattggtcgagcggtacactctgggagaacgaaacttgggtcgaatgatcccgtccatcaccgtacggttctcgacgcctgtgaggctgatggaactggaggatttcttccgcaggaatccagaagcaggcgcaggtgccgcagccagagttcaagctctggagaatattggcaacaatattaagtggctggagcgcaacctagatatcgtgaccaaatggttgagcactgcgattctgccggtaccggtaaaacattgaagtcatacgtttgtgttaagtgtatcgaagtaataaattgtgatagagtcagtt

SEQ ID NO: 21 - DNA, 2484 bp, Aedes aegypti
atgtcgaagcttgccaaagaggagaaaaagtttcgtctcaacgtcaccggaactgccggccaggagcttgaactggtacaggtcgatgaggacacgcaggatgctgagggcctcaacgttgattcattggcggaggagcatgccgaacccaatttagtggagaccaccgacggaagaatgatcatcgagatgaaacccggtaaaacgtgcgacatttgcagcgttactttccaatcggcaaagatcttcaagaagcacaaggaggaatgtctcgagaaaattagcgaattcgcagatgtcctagagaaagagaaaacggcggcaatgtcggcgcaaccgggcgaagagttcttcaagtactgcaatccgaatccggaaaatccctgctattgttgtggcgaggacgtttcaaccgctcacgtcggtcacatgaagtgcaaactgtgcccaaagtctttcaaagcgtatgaatatctggagagacatttgcaggccgtccatgccgacacgaccgaattcggctgcactcaatgtaacgccaagtgcccgtcggtaaaggttctcggccagcacatgatgacgcacagcgcgggcaaaccgttctcttgtctcaaatgtggaaaggatttcacccgaaagtaccatctcgagcggcacctgaatcactccagctgcggagaaattcccaagtacttgcttccgtgcgaagtttgcggcaaggagttcaccaggctggataatttgcgtgaacatcttcgctaccacatgggcgaagccaaaaggaaacgcgactatcagtgtccgcactgcgagaaggcattctacgggtcttcgttgctcaacatccatatccgtactcacaccggggagaaaccgttcccctgtgatctatgcacgaagaccttcccgtccacaggagccttgcgaaaacatcgccgatcgcacactggtgaacgaccctatcgctgcgctgagtgttcggccacttttgctgccagggagacgctgaatagacaccggaaaactcacacaggtgaaagaccacatgagtgcaccatttgcgggaaaaagttcatccaggcgacccagcttcgcgcgcacatgttcaaccacaccggtgagaacggattcaattgcgaccagtgtgaggccgtattcaaccggaaggcccgcttggacgaacacatacgcttcgtgcaccagaaagaagctccgctgacgtgcgaagtttgctcaaagtcgttcatccggaaggaggatctgaaccgtcatcttgatacgcacagcgatgagaagaatttctcttgtaaccattgcggtaaattgttcgcatctaaagcagccttgaagatccatgagcgaactcacatcatcgaagaacctagcgtttgttccatttgtaatcacagtttcataaggagagattgtcttgtaaggcacattcggactcgccatgctggctgtccggaggcgatgtccaaaattccgccaagaaagattcaaagttcagagccaccgcgggaggaagttcttttggaaatcacagagaccgaggcaaccatggaacaaatggtatccatcccagaggaggatgaacaaatgctggaaatcgatggcgaggtctatcaaataacaccactcgaagacatacaactggtgaagatcaacactagacgcaaggacatcaaaaacgaatcacagactgtggacagtgaaatgttagtggacgaaattgaagttttgccaacgaagttggaaccccttcttccagttgaaaccaaaaaagcaatcaaaaccaaacgaagcatgtccgttaaaccaccagaaatgcttccacctccacctccgttggcggttgaacccgccgaaattaatgtcccagtagaagtggcaccaatcgaacaaccgccaaaagagaagaaaaagcgcaaacgagccaccgaaaatgcttcgatcgtgctgccgaccaaaatcaaaatcgaggaggacgattccatgccgatctttttgagcgatgccgtgctgaaggaaaaagttaacgaacttctatgtatgctgattgacgaagaggtactcacggagtttggctggccgagggctcctgtggaccgggtcctgagcgaagtgatcaaacgttgcggacacaaaccggcttccggggtggaaaccggtgactacacgacacgcatgcgggagaacaccaagatcctgttcgcgctcacgatggaagacgacagcatcaggacgctgctcaacaatcacaccatcgacgaggtgatcatgagcgttttgaagagcaagtaaatggcgacgttttgtcaggagagccgtaagtgcaattaatatccgggataacgcggaggagtttaatttatgttaaattttgcatcactcttttagtagattggcgatttgcctaacattgttgatgaaaattgaattgcagatattatcgctattaaatatagtttatagaaacgtata

SEQ ID NO: 22 - DNA, 956 bp, Aedes aegypti
gagccgtcgtgtacgtacatcgaagagaaacgcaaagcgaaaaaagtgtgtgaagaagagtgctctccatcatcatcaccaggaacttcagggtgaaagatatttccgtgaaaatcctcgactaatccgcgttccttgccggaaattccatcgtgaaccgaatctagccgctgcgtgcttcattttacgctagttcaaagcgtcgtgtttctcttgttgctcgagacgagccttatcttgtggattttaaaatcaaatcagcggcgcaaatatgttcatttgggattggttcaccggtgtcctgggatacttgggcctatggaagaaatccggcaaactgttattcttaggtctggataatgccggcaaaacgacattgctgcacatgctcaaggacgacagactggcacagcacgttccgacgttacatcctacgtccgaggagctgtccattggcaatatgcgtttcaccacattcgatttgggtggacacacgcaagcccgtcgagtttggaaggattacttcccggcggtggatgcgatcgtgttcctgatcgacgcctgggaccgcagccgtttcgccgagagcaaaaacgaactggactcattgctaaccgacgaagccctgtccaactgccccgtgctcatcctgggcaacaaaatcgacaaaccaggcgcagctagcgaggacgaacttaggaatcactttgccctgtaccaattgaccaccggaaagggtaaggtagcgcgtaacgaacttcctggacgtcccttggagctgttcatgtgttcagtactgaaacggcagggctacggagagggtttccgctggcttgctcagtacatcgactaataggagagtacagagttttgtgcgcgctagagatgtaaaacaattgacaaactaggaacaatagcagcaaagcggaaacaaccaacgattggcgataaactac

SEQ ID NO: 23 - DNA, 2690 bp, Aedes aegypti
gttgactgttccagacgcatttgcgctcggtgtagtaagaagaggttcgagaaaaagtgcccaccagaaaattcccgaattttctccggaagaaaaaaacgggtcttcttctagaaagagtgtgatcaaaggaggaaaaaccgtcggtggtttttgtgttgtgtttctagtgatccggaaggacaacaaacgctcaaagtcaagatgccggaagccgccgccgatgtggaaacctttgcgttccaggctgagatcgctcagctgatgtcgctgatcatcaacaccttctactcgaacaaggaaatcttcctgcgtgagttgatctccaactcgtccgatgccctggacaagatccgctacgagtcgctgaccgatccctcaaaattggacagcggcaaggagctgtacatcaagctgatcccgaacaaggaagccggcaccctgaccatcatcgacaccggtatcggaatgaccaaggccgatctggtcaacaacctgggaacgatcgccaagtccggtaccaaagcgttcatggaagccctgcaggccggagccgacatcagcatgattggtcagttcggtgtgggtttctactcgtcctatctggtggccgataaggtcgtcgtcacgtccaagagcaacgatgatgaacagtacgtgtgggaatcgtccgctggaggttccttcaccgttcgccaggacaccggtgaaccccttggccgtggaaccaagatcgtcctccacatcaaggaagatcagctggaatacctggaagagagcaagatcaaggccatcgtgaacaagcactcgcagttcatcggatacccaatcaagctcctcgttgaaaaggaacgcgagaaggaagtcagcgatgatgaagccgaagagaaggacgaggaaaagaaggaagaagacaagaaggacgaacccaagatcgaagacgtcgaggatgacgaagagaagaaggacaagaagaagaagaccgtcaaggtcaagtacaccgaagatgaagagctcaacaagaccaagcccatctggactcgtaatgccgacgatatctcccaggaagaatacggcgaattctacaaatcgctcaccaacgactgggaagaccatcttgccgtcaagcacttctccgtcgaaggccagctggacttccgtgcactgctcttcgtgccccgtcgtatgcccttcgacctcttcgagaacaagaagaagaagaacaacatcaagctgtacgtccgtcgtgtcttcatcatggacaactgcgaggaactgatccccgactacctgaacttcatcaagggtgtcgtcgattcggaagatttgcctctgaacatctcccgtgaaatgttgcagcagaacaagatactcaaggtcatccgcaagaatctggtcaagaaatgcctggaactcttcgaggaactcgctgaagacaaggaaacgtacaagaagttctacgaccagttcagcaagaacctgaagctcggcatccacgaagacacctccaaccgtcagaagttggccgacctcctgcgcttcaacacgtccgcctctggagacgagtactgctccctgggcgattacgttggccgcatgaaggagaaccagaagcacatctacttcatcactggcgaaagcgtcgagcaggtcaagaactcggccttcgtcgagcgcgtcaagaagcgtggattcgaggtcatctacatgactgaggccatcgacgagtacgtcatccagcagctgaaggaataccagggcaagcagctggtctccgtcaccaaggaaggcttggaactgccagaagatgaggaagagaagaagaagcgcgaggaggacaaggccaagttcgagaacctgtgcaaggtcatgaagtccgtgctggacaacaaggtcgagaaggtcgtcgtttcgaaccgtctggttgattccccatgctgtatcgtcacctctcagtacggatggtccgccaacatggaacgtatcatgaaggctcaggccctccgcgattcttccgctatgggctacatggccggcaagaagcacatggaaatcaaccctgaccactcgatcatcgaaaccctccgccagcgtgctgaagccgacaagaacgacaaggccgttaaggatctggtcatcctgctgttcgagactgccctgctctcgtctggtttctccctggatgaacctggagtgcatgcctcccgcatttaccgtatggtcaagctgggtctcggaatcgatgaagatgagccagctagcgccgaagaatcagcacctgctgccggcggtgatgccccaccactagtggacgacgccgaggatgcctcccacatggaggaagtcgattaaacgctcgatcgtgccgcctgggtagacatccacacacttttgttgaaagagactgactaccttgtttggtttttgccgtgttttaacggtctgatgagagcggaagacgattgcattggatcaaaagctttttttttacctgaaacatttaccatttagaaacatgaaccaatgaagcattctcttttgacaagagggttctaagctaaactaataaaaaaacaagcattacattgtaaatgtagttggtagatcgtacttacgcttcgtgtatttaacctgtttaaaaatcttactctacatcggatacataataaaaaatgatactggtcagaata

SEQ ID NO: 24 - DNA, 2602 bp, Aedes aegypti
cggtaacagttaaccaaaaaccagcaagcgagttagatcgaggcaagcaacgtgaaatattctgcaagtgcaagtgcatcatcagtgcaaaagtgtgatagttttacaagtgaaaagttgaaagttttacaactttgctattgaattttgtttttggagaaaaagcagttaaaaacaagcaagatgccggaagccgccgccgatgtggaaacctttgcgttccaggctgagatcgctcagctgatgtcgctgatcatcaacaccttctactcgaacaaggaaatcttcctgcgtgagttgatctccaactcgtccgatgccctggacaagatccgctacgagtcgctgaccgatccctcaaaattggacagcggcaaggagctgtacatcaagctgatcccgaacaaggaagccggcaccctgaccatcatcgacaccggtatcggaatgaccaaggccgatctggtcaacaacctgggaacgatcgccaagtccggtaccaaagcgttcatggaagccctgcaggccggagccgacatcagcatgattggtcagttcggtgtgggtttctactcgtcctatctggtggccgataaggtcgtcgtcacgtccaagagcaacgatgatgaacagtacgtgtgggaatcgtccgctggaggttctttcaccgttcgccaggacaccggtgaaccccttggccgtggaaccaagatcgtcctccacatcaaggaagatcagctggaatacctggaggaaagcaagatcaaggccatcgtgaacaagcactcgcagttcatcggttacccaatcaagctcctcgttgagaaggaacgcgagaaggaagtcagcgatgatgaagccgaagagaaggacgaggaaaagaaggaagaagacaagaaggacgaacccaagatcgaagacgtcgaggatgacgaagagaagaaggacaagaagaagaagaccgtcaaggtcaagtacaccgaagacgaagagctcaacaagaccaagcccatctggactcgtaatgccgacgatatctcccaggaagaatacggcgagttctacaaatcgctcaccaacgactgggaagaccatcttgctgtcaagcacttctccgtcgaaggccagctggacttccgtgcactgctcttcgtgccccgtcgtatgcctttcgacctcttcgagaacaagaagaagaagaacaacatcaagctgtacgtccgtcgtgtcttcatcatggacaactgcgaggaactgatccccgactacctgaacttcatcaagggtgtcgtcgattcggaagatttgcctctgaacatctcccgtgaaatgttgcagcagaacaagatcctcaaggtcatccgcaagaatctggtcaagaaatgcctggaactgttcgaggaacttgctgaagacaaggaaacctacaagaagttctacgaccagttcagcaagaacctgaagctcggcatccacgaagacacctccaaccgtcagaagttggccgacctcctgcgcttcaacacgtccgcctctggagacgagtactgctccctgggcgattacgttggccgcatgaaggagaaccagaagcacatctacttcatcactggcgaaagcgtcgagcaggtcaagaactcggccttcgtcgagcgcgtcaagaagcgtggattcgaggtcatctacatgactgaggccatcgacgagtacgtcatccagcagctgaaggaataccagggcaagcagctggtctccgtcaccaaggaaggcttggaactgccagaagacgaggaagagaagaagaagcgcgaggaggataaggccaagttcgagaacctctgcaaggtcatgaagtccgtgctggacaacaaggtcgagaaggtcgtcgtttcgaaccgtctggttgattccccatgctgtatcgtcacctctcagtacggatggtccgccaacatggaacgtatcatgaaggctcaggccctccgcgattcctctgccatgggctacatggccggcaagaagcacatggaaatcaaccctgaccactcgatcatcgaaaccctccgtcagcgtgccgaagccgacaagaacgacaaggccgttaaggatctggtcatcctgctgttcgagactgccctgctctcatctggtttctccctggatgaacctggagtgcatgcctcccgcatttaccgcatggtcaagctgggtcttggaatcgacgaggatgaggccatgagcaccgaagaatccgctccggctgccggcggtgatgccccaccactagtggacgacgccgaggacgcttcgcacatggaggaagtcgattaagcggcgatctctcttcccccacactagcgctagattaatttattcaaattgacgcccccggttttaactaatttcaaacaggatttttagtaagcgtgggtataacttttacgttactttccaatttttgttccgcgttctagcggctgcaaggaacaacaaagatgtacattcttgtcatttattagcagttaacggacgaatatgcattcgaactgattatctttaataaaaagtgaattttcaaataaatcgttagtaaaatgtaaaa

SEQ ID NO: 25 - DNA, 2499 bp, Aedes aegypti
gttgactgttccagacgcatttgcgctcggtgttgtaagaagtggttcgagaaaaagtgcccaccagaaaattcccgaattttctccggaagaaaaaaacgggtcttcttctagaaagagtgtgatcagaggaggaaaaaccgtcggtgatttttgtgttgtgtttctagtgatccggaaggacaacaaacgctcaaagtcaagatgccggaagccgccgccgatgtggaaacctttgcgttccaggctgagatcgctcagctgatgtcgctgatcatcaacaccttctactcgaacaaggaaatcttcctgcgtgagttgatctccaactcgtccgatgccctggacaagatccgctacgagtcgctgaccgatccctcaaaattggacagcggcaaggagctgtacatcaagctgatcccgaacaaggaagccggcaccctgaccatcatcgacaccggtatcgggaatgaccaaggccgatctggtcaacaacctgggaacgatcgccaagtccggtaccaaagcgttcatggaagccctgcaggccggagccgacatcagcatgattggtcagttcggtgtgggtttctactcgtcctatctggtggccgataaggtcgtcgtcacgtccaagagcaacgatgatgaacagtacgtgtgggaatcgtccgctggaggttccttcaccgttcgccaggacaccggtgaaccccttggccgtggaaccaagatcgtcctccacatcaaggaagatcagctggaatacctggaagagagcaagatcaaggctatcgtgaacaagcactcgcagttcatcggttacccaatcaagctcctcgttgagaaggaacgcgagaaggaagaagaatacggcgagttctacaaatcgctcaccaacgactgggaagaccatcttgccgtcaagcacttctccgtcgaaggccagctggacttccgtgcactgctcttcgtgccccgtcgtatgcctttcgacctcttcgagaacaagaagaagaagaacaacatcaagttgtacgtccgtcgtgtcttcatcatggacaactgcgaggaactgatccccgactacctgaacttcatcaagggtgtcgtcgattcggaagatttgcctttgaacatctctcgtgaaatgttgcagcagaacaagatcctcaaggtcatccgcaagaatctggtcaagaaatgcctggaactgttcgaggaactcgctgaagataaggaaacgtacaagaagttctacgaccagttcagcaagaacctgaagctcggcatccacgaagacacctccaaccgtcagaagttggccgacctcctgcgcttcaacacgtccgcttctggagacgagtactgctccctgggcgattacgttggccgcatgaaggagaaccagaagcacatctacttcatcactggcgaaagcgtcgagcaggtcaagaactcggccttcgtcgagcgcgtcaagaagcgtggattcgaggtcatctacatgactgaggccatcgacgagtacgtcatccagcagctgaaggaataccagggcaagcagctggtctccgtcaccaaggaaggcttggaactgccagaagacgaggaagagaagaagaagcgcgaggaggataaggccaagttcgagaacctctgcaaggtcatgaagtccgtgctggacaacaaggtcgagaaggtcgtcgtttcgaaccgtctggtcgattccccatgctgtatcgtcacctctcagtacggatggtccgccaacatggaacgtatcatgaaggctcaggccctccgcgactcctctgccatgggctacatggccggcaagaagcacatggaaatcaaccctgaccactcgatcatcgaaaccctccgccagcgtgctgaagccgacaagaacgacaaggccgttaaggatctggtcatcctgttgttcgagactgccctgctctcgtctggtttctccctggatgaacctggagtgcatgcctctcgcatttatcgtatggtcaagctgggtctcggaatcgatgaagatgagccagttagcgccgaagaatcagcacctgctgccggcggtgatgctccaccactagtggacgacgccgaggatgcctcccacatggaggaagtcgattgaacgctcgatcgtgccgctggggtagacatacacacacttttgttgaaagagactgactaccttgtttggtttttgccgtgttttaacggtctgatgagagcggaagacgattgcattggatcaaaagcttttttttacctgaaacatttaccatttagaaacatgaaccaatgaagcattctcttttgacaagagggttctaagataatctaataaaaaacaagcattacattgtaaatgtagtttgtagatcgtacttacgcttcgtgtatttaacctgtttaaaatcttactctacatcggatacataataaaaatgatactggtcagaatatgcaaactgtttc

SEQ ID NO: 26 - DNA, 1680 bp, Aedes aegypti
atgtcggaagcaacgcagcccaaacccatctcggcgatggttacatccgaggtgcatccaccggaatgggattctccggaggccaccagtggatcgttcacgctgaaccacgaagcgggccccgtcgaggacggcgccatctccggacatggttcgtttgtgctgcgggaagaagaaccggtcatcgtggatacgacaacgacaaatggatcgtttgtgctgaaggagaccgtcccgatcgtgtccactgaagagggagatgggtcttttgttctgagggaagacgtgccgatcgtgtcactggaggaaggcgatggatcattcgttctcaaggaagaagtccccatcgtgtcgactgaggaaggtgacggatcattcgttttgagagaggacgttccgattgtttcgaccgaagaagaccaaaacggatcgttcgtactgaaagaagaagttccgatcatagacaacgcaccgatggagttccctgcgttcatcgaagaatcgatagcgagcatagctccacaggaaggtttcacaccgggagagttttccatcacgatcgagaggctttccgagtgcgaaggattgatcggtgagctgcataaggccaccattgcagagggagaacgtcaactcgaggtcctctgtaagataccacccctggatccaatgcgcaggcaacagttcaactcgatggctttgttcgaccgagaagtgaacatgtactccaacctgcttcctgctatgttcgagtttcaacgcgagaaaggccttaccgaagagctcaacagtgggtttttcaatgtcccgaagtgttatctgacgcacttcgacgcggaaagcgagcaggcgttgatcctgatggaagatctgcgcaacagggagttctgcatgtggaacaagttggaatcggtcaattatgaacacgcaaagctgctgttggttcagctgggacgtttccatggtctttcattggcgatgaaagagcaacgtccagatctgttcgaaccgttcaaactgccggatgtgatggttcttgccatggaagagaatgaacaattgatgggtatgtttacgactgctctagatgctgccatctcggtgctggatccaagcgaggagaaagcctgcttcaagatggaaggtctgcggaacgagttctttaccacgctgcagagctgcgtagatcccgaacgagcggagccatttgcggttctgaatcacggcgattgctgggtcaacaacctcatgtacggatatcaggacggtgctccccgagacgtgctcttcttggactggcaattggtccgctacggatccccggtcctggatttgctgtatttcatattctgttgtactgatgaggcacttcgtgagcggcattacgacgaaatgatacgcatctactacactgcgttgaaggacctgctggagaaggtgggcagcgaagccatggatctgttccccttgacggccctgttgcgacagatgaagacattcgggaagttcgccgtcatcatggccgccctggacattccgattctgtgtaccgatccggcacaaattcagagccacggagacgctgcagcagcttttgccgcttcgccagaggcccaacggcgctacggctatcgcatgggcggcgtcattcgcgatgcgattaagtacggatatttgtag

SEQ ID NO: 27 - DNA, 3236 bp, Aedes aegypti
ggcggtggtgtgtcattacttttgcttgtgctcgtcggaaatcttatcgaagccgaatcgaaaattctggtgaaattttgtccgctttcggaaggaagtaaacagtgcgtttggtttctgttttgttgtggtgaaatttcgtgtagatctccgtttttttacggtgaaaatattgatttccatcggaagcgcggtggcagacaggaaaatacgggaacctaaacggtcaagaagaagaaacccggcagtgtatttttgtgtggcggccccccggtttcgaaacgaccacagaaagagtcgtgtgtgtctctaacttgcggttgtgtttgtgcagggaagaaaacagtgtttcacccgaggatttgaaatgtctcagaaaacgaagagatccggcgtttcgacgcccgtcccggtgacggccagcactccggtccagggaactactcccggaattggagcgcgcccttcgagccctctgagcccaacccggctcacccggatgcaggagaaggtggatctgatgaacctgaatgaccgtctggcttgctacatcgaccgggtgcgtttcctggagcaggagaattcccgcctaacgatggaagtacgcagctcacaagaaaccgtcacccgggaagtgtccaacatcaagcagatgtacgaccacgagctgaacgatgctcgcaagctactggacgaaacggcccgcgaaaaggccaagcttgaaatcgatgccaagcggatatgggaggagaacgaggacctcaagaagagactggagcgaaaggccaaggaagccgcagactatgaacgcaatgcccgcgcccaggaatcccgcgccaacgaattgtccgccaagtacaacacagtcctgtccgagcgcaagaaggcccaggatgaacttaaggaactggaaaaggaagtcgctcgcctgaagaagcaggtcgaaacactccggaagaacctggaagaggaaacgctggcccgagttgatctggagaatgccgtccagagcctgcgcgaggagctcaccttcaaggaccagatccaccagcaggaactgacggaaaccaaatctcgccggcaggtcgaaatcagcgaaatcgatggcatgctctccgagcagtacgaagccaaattgcaacagactctgcaggacctgcgcgaccagtacgatggccagatgcgcgccaatcgggatgagatctccgagctgtatgaatctcgtctgcgtgatttggaactgcagctgaacgccgaacgtcagcgccacgccgaagaaaagagcaagctgcaggatgaaatcgagcgcctccgtaaccaaatttcgcagcaactccaggaatatcaggatctcatggacatcaaaatttccctggatatggaaattgccgcctacgacaagttgctttcctccgaggaagttcgtctaaacattacccccggaagccagaccaccatcttccagacgtcgtccagcagctccagcacggcccgttccggagcgatgcgccgtactcctcagcgtgccgcggccaaacgcaagcgtaccgtgctggaggaatcggacgagcgcagtgtgtcggacttctcggtcacttcgtccgccaagggagacatcgagatctccgaagtcgatccggagggcaagttcgtcaagctgcacaacaagtctgctaaggaagtacaaattggaggctggacgctagtccgcaaggtcggcaccaacgaaaccgtgttcaagttccaccgaaccctgaaggtcgatggcggttccttcgtgacggtgtggtcttcggatctcggacagacgcacgaacctccgagcacgatcgtgatgaagggtcagaagtggttcgccggcgataacatgaccactcagctggtgaacggcgaaggagaggaagtagcagcgtcggaacgtgtcaagcgtattgtttccaccgccgcttcacgccatcgggagtacctcggttcttacagcggagaagagctgtatcaccaacagggggaacccaagggcgaggagaaatgtcgcatcatgtgaaactaaggcgttagtgcatgtgccccaatcctaaatgaaaaatgaggtagtgttgaatcccgtaatacataaaccaacacacggtacggacagtctcgtgtgacactctgttgtattaccctgaccgttaggagtaatacaaagaagcgagcgtacgagagagagactagcgtgaacaaataatagatgtagtaagaaagaatggatgagtccaatttaccaatcactactaaaatcatatgaacaaaattcttcaccactgatggtactgatgatactaactatcgtatctggcaagaaaagcagttaacaagatgaaactaatcaataatgcaaacttgaaaataacggaagcagcacaacgactactatcctacacttatcagaaaatgacgtacttcgtctaattgaaagttaaaaactcgatcacttataatagcatttttaaatttataccttgcaaagctgatgaagcctctgaaataaaagaatcaataactaaaatgccataattgtaaagaacaagagaatgaaatttctttttttaattttaacatattggttcaccgaaatatttgttcatcatacatatgaaagcagagcaacatcgaactaatgcaccgattccaatcggtggctttattgatgctttaattttaagaaagtaacctttttcagtgttctgtccgttcgtagcttatttatgattgttttcagtgttccacagtgaaaatcaaaactctgaaagtcgcgagtaaccttgcagtgctgcgcgttcgttgccttttgtaatcatcataatatacagtgtactactagcgtgagaaaacagagaactgcatttttgattttgccgttttttctttttattattgtaaagaagataggtaaaagagatatatttttaaaagataagagtaaaacacgttcaatcgtatagcttccgatgaaaatgtcccatcaatgttattcaaacaaactcacaaatccatttagtttgtaaaaacgacttaacccaaaaacaagtgtcatgactattccctatcggtaatttcctttcatttatatttggtagaatggttttctattgatttgaacaagtaatccatcgataaatttgtttctgttgtaccaacataaatacgaattattcaatcattaagcagagaattttaaataaacacaaacaccc

SEQ ID NO: 28 - DNA, 1953 bp, Aedes aegypti
ggaagaacttcgttggacacttgaagtatcatcagctcacagttgcgttgcgtgttacccactagaagtgccgaatcaacatcatccccctagaacgcagatggccggcttgatccaacgacacggttctgtcctagtgcgtcgatttctcaccaatggaaaacggattaccaacagggcactcgcggtgacgcaattccacaccagtgcccaactggacaagaccgtttcgttcaacctgtcggatatcggggaaggaatccgcgaggtaacggtcaaggagtggttcgtcaaggagggcgatgtcgttgagcagtttgacaacctgtgtgaagtccagagtgacaaggcgtcggtcacgatcaccagtcggtacgatggaaagatcctcaagctgcacaagatggtagatgagatcgcgttggttggtaagcctttgctggatttcgatgtcgaagatgaagagggcgaggatagcagcagcagcagcggagagagcagctccgatgaagaagaagttaaggtacaggctgtggccgctggtggcgcagctgccgcagcgacagcagcatctgtgatctcaagtgggaaggtgctggcaacgcctgctgttcggagaatcgctatggaaaacaaagtggatctacgcgaggtgaagccatccggcaaaaatggacgcgtccttaagggtgatgttctggagttcttgaacatcattccacagggaaccgtcaaacctcatcctactttggcccaagccaaacccaccacagctgcaccgtgtccaaagtctatggaaactgttgtgccattgaagggcgttgccaaggccatgtacaaatcgatgtctgaatcactgaaaattcctcacttcgcctacagcgatgaaattgacgtttctcagctggtgaaagtccgcgaagctctcaaagccgaagctctggctcgcggcgtcaaactaacctatatgccgttcttcgtcaaggctgcttccaacgctctcaaagagttcccgatcgtcaacagttcgttcgatgagcccaacgaaagcgtcgtctacaagtcctaccacaacattagcattgccatgcacacccctcaaggactggtggttccaaatgtcaaaaacgtcgacagcaaatcgatcctccagatcgcggctgagctgaacgcgcttcaggaacgcggcgctaagggaactctcactccagacgacttcgtcaatggaaccttctccttgtctaacattggaatcatcggaggcacctacacccacccctgcatcatggcccctcaggtggcaatcggagccatcgggcaaacgaaggtcctcccacgcttcgacgcctccggcaatgtggtcccggcgcacatcatcaacgtaagctggtcggccgatcatcggatcatagatggcgtaaccatggcctccttctcgaacgcatggaaacgtcagctggagaatcccaacctgttcctgctgacggcgcagtaggcctagccaagggaaacccatatggaaaggaaacgaatgcatttacatacactaggataatggtgattcctctcgaacgattcaaaacgctaccagattgcatttattttgtctcactcagtagaaacgcgcgtgcaatgattgcatctcttattttaaccaattagaagccatacgcggaacgtgaaacgttttctaagaccaggtctgtgtatatattgttagaaatatattgattgaaacaaacgcccgatcgatttgacaactttatttaatttattacaatatcataaccttaaaaaaacgaacaatagttgtacattctgagggtaaaaatcccgccctaaaatataaacgctacaaacacacaaaaattactttggcctacgtccgggtgagcactctttttcttctcagttcggtcaacaggtgtgatgagttgtacggtccagcggtaa

SEQ ID NO: 29 - DNA, 2510 bp, Aedes aegypti
atggcagccaaagtttgcaactacccaagcagcaagagcttcatgaatggtagataccagcctgagagcgcctcggcgaaaacgcacaccacagcaggcatgatgaccagcggcagccacagtgctgcgtcccgtggcaatgccgcggcagtctgcagtgagctgtcaaacggcaaacaagcacccccgacgagttgggccaccaccggaacgcaatccgcttgtaaatttagttctaccgccaacagcaacaacaccatgagcgagtgtagccgcgatcgtttgggccagtggccagtcgagtccgacagcgaagtcgccggaggagtatccggatttggacggctacacaacggccggttcaataagggtttggcttttaccattgaggaacgtcaagcgttgggtcttcatggcttgctgccggccaccgtacgttccgaggaggagcaggtccagcattgtctcaccttgctgaatcgttatgaaaatgatttggacaagtacatctacctggttggcttgttggatcgcaatgagcgattattctaccgggtattgtcgtcggatattggaaacatgatgccgctggtctacaccccaacggtaggattggcctgtcagaagtacagcatgatctaccaacagccaaaaggcatgtacatcactatcaatgataagggtcatgtttatgatgtgctgaagaactggcccgaaacggacgtgcgtgccatctgtgtaactgatggcgaacgtatcctgggattgggagatctaggtgccaacggtatgggcattcctgtcggcaagctcgccctctacacggctttggcaggaattaaaccccatcagtgcttacccgtcactctggatgtgggaaccaatacccaaagcattctggatgatcctctgtacgttggactccgacataagcgtgtgaccggtgaggcgtacgacgaattcattgaggaattcatgcaagctgccgtgcgtcgcttcggtcgcaactgcctgattcagttcgaagactttggaaactccaacgctttccggtttttggacaaataccgtgataactattgtaccttcaatgatgacattcagggtactgcttcagttgccgttgccggtttgcttgcctcgctgcgtgtcaccaagacaaagctgagcgaaaacacggttctgttccaaggtgccggtgaagctgctcttggcattgcagagctctgcgtcatggctatgcgacaggatggaatgagcgaagaggacgcccgcaaacgaatttggttggtggacagcaagggtctgattgttaaggatcgtccgaagggaggtatctctggccacaagcaccgatttgctcacgaccatgccccggtcgatacattggccgaagccgtcaaggacatcaaaccaaccgttatcattggcgcggctgccatcgcgggagccttcactccggaaatcatccgcaccatggctgatctgaacgagcgccctattatctttgccctgtcgaatcccacaagcaaagctgaatgcacggctgaacaagcctatgaacacacggatggccgctgtgtgtttgcttcaggatcgcctttcccacccgttacgtacaagggaaaaacttattaccccggtcagggcaacaactcgtacattttccccggagtggcccttggagtgatctgcgccggagcggacaccatccccgaggatattttcctcatctccgctcaacgcttggccgaaattgtcaccgaagacgatctggaacgtggcagcttgtacccaccgctggaaactatccaggattgttccatcaaaattgccgtccgtattatggagtacgcttacaagaacggcctcgcatgcacaaaaccggaaccaagtgataaggaggcattcatccgcggtcagatgtacgacctcacctacaaatcggccctgcctgtcatgtacccatggccgaagttgtaaatgtcgactggaaggtcgtgattgttttgtacatttttttttttcgtttttaaacatgtctttcaattacattattacacattaaaaagcaacgaatgatttcatgcgggtttaaggatttcatgctttcaggttttctaaaagaaaaaaaatgaattctttctctaagagatattgcaattttatttcaactttcataggcaatatttttagctaaattctatgtgtggaaaaactccgcattttttataagttgcttttgttttattttctgttggcgcatataaaactgtccgtgtcgatcaactaatcaatgtgcttgtcggtaggtattcgtattcttacatcaccttttcatcaaaaatcatacaaacaagaagaaaaaagtttataaatgtaatttattcgaaccaatattatataagacaatgttgatttataaatagtatgtatgtatgatcaacagctagctgatgtatggtactacaaatcaataaatgtaagtggctatcgagctggtggagaaa

SEQ ID NO: 30 - DNA, 3306 bp, Aedes aegypti
atgcatagcatgtggtgtgatttgttcgatctgaacaagaagctgaatggttcagtgaaaccgatcccaccgccccgcgatcatctgcgaatagagaaggatggtcgccttacgaatcgggctccggttccagcgccacaagtgccagaccggaagctgttgccaacgactccccagcacattggacaggtcgtggaaccgacgcccgatcaactgaatagcatcaaaaaattcgaggaacaactacgccgccgacgggaggaggaagaacgaatagcagctcagaatgactttttgcggaatagcatcaggggctcgcaaaaattacgacacctgcaggacaacccggtcgttgaaaaatccaccataggtgttgacaatgaggcctatacggaagacgaagaacccgaaaaaatcattgggtatggtgagctagtatcggccttgcagcgattacagggacacctcaacaagcatggcttggccgcactcgctggtagagtaacagcggcccaaagccttttgttgggtccaggtattgcacgtgccctcgctgctcgcactgctgttctagagaggaggcgaccacgaatacaaaaccccatttgctcaaatgctcaggcactggctaaggactgcgtcgaatccctggcccagtcaagtacaccagctgcaatagaactatgtgatctgctctcgacttatgaaatggaaggactgttgctggcgcacgatcggattgcttcaacgaccgatcgctcgccggcatacggagttagtgcagtcagtcagaatcccgcggtgccattgccattgaacaataatacgatgaccagcgctactccggtcaaaccgacatcagttttgccatctattccaaataatactagcttagttaataacaataacaataatatagcaaagcgtgaacctatgagtgttcctctcggtgttctacgggacggtagtcaggatcatataagaatcatacagattgaaaaatcttcggaaccgttgggagcgaccatccgaaacgaaggagaggctgtagtgattggtcgagtggtacgaggaggagcggcggagaagtccggcctgttgcacgagggcgatgaattgctcgaagtgaacggtatcgaaatgcgtgggaaatccataaatgacgtttgcactctgctcagtgcaatgaccggtactctcacgttccttgttgtgcccgccagtaggcctccattggatccaactatacgcggtgggacacgtaccgggtcctgtgcggtactgcacgttagagcacactttgattacgatccggaagatgatcgatacattccgtgccgtgagcttggcatcagttttcagaaaggagatgtattgcatgtgatatctcgtgatgaccctaactggtggcaagcgtatcgagaaggcgaagaagatcaaacattggccggacttatacccagccaatcattccaacatttgtgcgagtccatgaagttggccaatgctggtgaagttggtttaagagcacgcagggatgccaacggtaaagcgggtggattcactctgctttgcgccaggaagggacagaagaagaaaaagaaagctagtagtgaacatggctaccctctgtacgctacagctacagctgaagaccctgaaccggaggaaatcctaacatacgaggaagtcgccctttactatccacgtgcgtctcacaaacggccgatagtgctgattggaccaccgaacattggccgacacgaacttcgacaacgattgatggccgattcggaaagattcgctgctgccattcctcatacgtctcgtcctcaacgcgagggagaaattcctggacaagattatcacttcatttcgagacaacagttcgaagcagatatactcgctaggaaattcgtcgaacacggagaatacgagaaggcttattacggcacatctttggaagcgatccgcgcagttgtggccagcggaaagatatgcgtcctgaacctacacccccagagcctaaaacttctacgttcttcggatctgaagccctacacagtattggtggcaccaccaagtttagaaaagcttcgtcagaagcggatacgagccggtgaaccgtataaggaagaggaactgaaggagatcattgccactgcgcgcgacatggaagcacgatggggccacctgttcgacatgatcatcatcaacaatgacacggaacgagcctatcatcagcttctcgccgaaataaactcactcgaacgagaaccacaatgggtgccaagtagctggctgcataactaattgctaggtcagtgatccattttctacttaaatttcttttttgttgtttgtaaatgaaagaatactatcgtttaagtctgatatactgattagtgagcgtacacagataaattatcgtaatttatgtaagtagatacttagacagaagaacaaaacattccaaacagaagagcaaacatgtccacgcagattactacacttggaatgacgaaacttgatgattactgaaaatcaaaacgcgtttataggagtatgcaaataaaacccaattaatagttaagcaaagttgttattttcgtttttaaaaacagagtataaaagatttattttatatttagatcatttcctgtataaaaagaatacatagaaagattgttttatatgtaaattttatttatctgtccatattcctgtacaattatggaggaaaaattgaacacaataaaagcaatttctaaatgtttaaaaataaatctaaaatagtcagagtcaaaaatcccttacataattcaataaacgtaacgcattacaatattcagactaaacaaaaaaaaagaaacgcaaaatcgaaatattcattgatccggttcgaaaaaatatgagaataacaaaaaatattcgtgttcacaatttactctagaaaaaaagaacatcatactagcgataactagcagtaacaaattgaaagaaaaggaaaaatacaaacacataaaagacagaaaaaccagcttaaattcatccacaaagagttaaaaaattgatatttttgatacgtattcaaatgaagtcgagaatcgtttgcagttagctgccgattagtttgcgacattaaaagtacattctctccggtccgataaaaccgccttcgaaaacaaaaacaaaagaaaagaaagtaaaggaatcaagaaaatattattacgctcaatattattgcatgtatagtcgtaataacgaataataaaccaccagagaaacgaggaaaagatgataacc

SEQ ID NO: 31 - DNA, 1653 bp, Aedes aegypti
cgcgaaagttgaaaaatttaatacgtgcgaggaataatccaattttttgtaagaatttggctgcctgataatcacaatgagtggccagccgacaatatacggcatccagagcacggctggggctatcccagtccgtaacccgaaaggtgaactctccatgcaaaaggtgaaggttcatcgatatgtgtcgggaaaacgtccggaatacgcccagcattccagcagtgaggaggaatccgatgaggaggatttcatcgacaacagaagaacggcggaggaatcctatcgggagtcacgtcgtcgtcgcgaagaaacggatgaagaggaggacgatcttccgggagatgtggacgatccccggattcgacgcctgcaagcaattcgtgctgccgaggcggaagaaattgagcgggagcgtcgggaacggcaccgggtcattcacgaaccggaactggtccagtcggaagaggaggaggaggatgaagctgaagcaactatggaagaggaagaacccggacagcatttacgccatcgacgccggccgcaggaatcggacgatgaggaagacgaggacaactcccagcaaggggaggaaggtcccacaaggacacggcgcatttccatcggatcggaatcggagtccgatacggagctgagcgattccgagatcgaacggagaagaaatatgctgcggcagaaaatgatgcagcagaagaaggaagaggaagtgctgcagaaggaggatgaaggccaatcggacacgtctgagtcggagagttcggagtacgaggaaacggagagtgaggaagagaatgaaccacgactgaaaccattattcgttcgtaagaaagatcggactacggtcattgaaaaggagcgagaggccaacaagcagaagcagcttgaatatgaatccaaaaaagccgccaaggaacgtcgtcggcaaacgttgaagcttgttgaggacagtatcaaaaaggacatggagaaggccaaggtcgacaacgagcccaatttgaacgatgtcaatacggatgacgagaacgatgaggttgaatatgaagcgtggaaactccgtgaattgaagcgtatcaagcgagatcgcgaagaaaaggaggctcttgagaaggagaaactggaaatcgagcgaattagaaacatgacggaagatgaacgccgtcaggatcaacgtctcaacccgaaacaggtcacaaacaaaacggtcaagggcaagtacaagttcctgcagaagtactaccatcggggtgccttctatctggaccaggaggatcaagtttacaagcaggacttttccgccccaacgctggaagatcacttcgacaagacgatcctaccgaaggttatgcaagtcaagaactttggacggtgcggtcgtacaaagtacacccacctggtggatcaggacactacgaaagccgaatcgccttggtttgctgattcggcgaataacaccaagttctacaacgagagggccggagggatgcggcaggtgtttgagaagccgtcgtcgtacaagaacaaacgcgacatttagggtggtaggaaggatttgtgctaggttttaagattttagttctattgtgattataattgaaataaactatgaataaataataatattatttaggtgaa

SEQ ID NO: 32 - DNA, 1997 bp, Aedes aegypti
atgacgtcgaaatttggcgataccgaatgggaggcacgagagtcccaacgtcaacgtgagctggaggaagctcgtgctagggctgctcagatggagaaaaccatgaaatggtggtcggattgtacggccaactggagggagaaatggagcaaggtccgtacggaacggaacaaggcacgagaagagtctaagcaattgcgtagcagtttggaagcggccatcaaagagtcaaactcgtacaaacgggaaaaatgtgaactggaaattcaaatcacccagcttaagaaggaaatggaaaaggtccacatgctgatgatgaaacacgccggtcagttcaacaaggccagtctggacgcggccgacgaaccagaacgagatgggcgggataacaactgctcgccggacatttcctccgatgggctgaagaatgtgaacagcgaagatggcctggtaacgaaagtgaacaatttgccagacgacagcggccaggatgatttggatattgaggagtatatcctgcagggtggggccatgcccaaacattccgtagagtttaaggacaagactgacgtgatggccgaagagcgaagactgattcaacaactgtcgaaggatgattacgacgaagattatctcctgcagaagatatcgatgctgcagctgaggttagatgatgctcagaaaacgatccagatcgaacgggaggagaagaacagcattcataaaagtttcgaaaagttccgacaggacatgcaggaactgcgagataaatgcgaagagctgcgagccgccaagcaagatgcagtgcgggagttgctaactctacaagaacagcatcgagtggagatgaggattaccaacaacacgttgcaggaagaggtggctgcccgagagacactggagaggcggctgtgcgagctgagaactgagttagagcgaatgcaggctgaaaatgctgccgaatggggcaaacgggagcgtctggaaacggagaaactgaatctcgagcgtgaaaataagaaactgcgagcggaatgtcaagatctgcaggaacgcttggaacggaagggccggggaccagtcagcaacaatgatacagaattccgtgcgcttcaacaagagctgctcgataagaataaggaaattagtgatatccgtcactcgcacagcaagatgaaaaaaatgctctccgaagcgaacacggaactgggccatgcggttcgacgagccgagcagtacgaaaccgaggtaaagcgtttgcgatcgcgtgtcgaggagcttaaacgcgagctagccggggctgaagatgagttagattcggcttgcaaccatgttcgccgactgcagcgtaccaacgaagagctttccggtcaaaccgaaggacttcaggttcagattcaacacttacaaacgagactccgtagttacggatcgaccagtctcctgtcggccaatgacgataatagtgacaacgactgagggtcgtcgccatgtgcgccattaatcctcaacaaaacatattggaagcaaaattgaaccatctgacaatgagtagttttgctgtaggtatttcctaagagataaaaatgcatttatcttacacgagtaagtatagctcatagtattagtattcgtttaatgcatttagtcgtgtcgtgtttaattgtacttcgtgatatacataaagactactaagtatcagagcatcacagatatccgtatatagagtatagacacggatcgagtattcatagtattttcgaccagttctgatggaaaaatggcgctagttcaacaacacttccgaagaattcaaacggaaaacttctctattagatctcttaatcagagttctataaatgacgtatcgatttttatccgactttattttctagatttgttgattttacttaaagagtttagaacaaccagaaatttataatttcgaagctcaaatagatcgtgcaacatatgtacttagcttgtgagacaaacac

SEQ ID NO: 33 - DNA, 1704 bp, Aedes aegypti
atttaccttttcgttcgcggagtcacttcgccgtggctggcggacgcagaaaatcagtgagtttcggcgttttccggagttacaacaacaccaaatcgtttacagattgcgtggaaaagatcccgtatccggaaggaagccagtcgcgatgggtgactatcttggatcggtcgctctgccgagcatgaaaatgcgtcagcgaaaactttgccagatcaagcaacagccacgtgcggcacccgtctacaatgattcgagcaacttcggtgtgcggatgctggagaagttgggctggtccgagggcaaaggtcttggtaaacgcgaagacggcatgtctgcacccattctgcccaagatgaagcaggacgctgaaggatttggctatgctggcgagaaggacgaccactggacccaacatgatcaggacttcaaccagctgttgaaatcgctgaacggcgaagaagctcctcctgtggacgaggtagatatggccaaaatgaaatccttggaggagaaatctaagaactcgcgcgcccgtgttcactataagaagtttacccggggtaaggatttgagcagggctagcgagaaagatttggcaaacattttcggtaagaagtcgttggacgaggtgaagaacaacaaactggccgttgaagaagctgacgataaggatgacgtagaagataaatccgattccgatgaaaccaatgtcttaggattaactacgattaaagcaagtatgtccctgcaggattacttcaaaagtaagatgcaggaaaaatttggacaggcgaaacagaattctgtgattgaaccggagttggaagcagagacggaagataccacgtctaaaaagaagtcaaagaaatccaagaaaagcgcggaagctgaattggatgaaaccgtggcaaatcctaccgaagatgtagccgagtgcagcgaagaacctacaaaaaagaagaaaaagaaaaagcgttcagaattagaaggtgtcgatgcaacacaagaatctaatgttgagctcgctagtcttgaggatgaacccctactcgaggaatcctccaagaaaaaatctaaaaaagctaaacgatcaaaagctttatatgaagaaccggttttggaagaaactcaaacagaacccacttccagtaaaaaatcaaagaaagaagaatctgaacagttggaagataatgagcctacagaaataggtaaatcgatatcagaggaatcagttactaaaaagagcaaaaataaaaagcgaaaacgttccgatgaacagagcgattcgactgaaatccaacttccatcagaggaagtctttgtcgaagaaacctcagttgaaattaaaagcaagaagaagaaaaagaagaagaccgaaaccgagcaggaggtcacacaggaggaggacgaaataacgtgccgcgtgaaggttagtgtgttaaaacagctggatgaaaccggatttccaggatctaactttggagatattgtaggctacggactgtcgcaggacgtgaaactcatcaagcgcgaaagcaaaaatctgaaacaagtgatggagaagcatcagttcatccagcagaagcagacctcggttcagcggaagagacagatgctgaagaaggtgagtgcattcaaacgattatgagtttcagacagtcttttgtaatatacgtcgatagttaagttccgccacatttg

SEQ ID NO: 34 - DNA, 1398 bp, Aedes aegypti
agtcgctcaggagcttcggccaagttaagtcgctctagttaagaaccaaccacccaagcaccatgtctgagaagccaaagaagaccaagaagaaggcctcctccaaggaagagactcccgccgatacccctgcgccagctgagactccagcggcaccaaccccctcggactctggctcgcagcgaggatccacccgcggctcttcctcccgcaaggctaagaaggccccatcctctgtcttcgtcctcttctcccagaagcagatcgccgaattcaaggaggccttccagcttatggacaacgacaaggatggtgtgatcggcaagaacgatctccgctcgaccttcgatgctctgggtaaactggtatccgataaggaattggacgaaatgcttggcgaagcacagggcccactcaacttcacccagctgctgacgctgttcgccaaccgcatgtccggcggaggccaagatgacgatgatgtcgtcatcaacgccttcaaggccttcgacatgaacggcaagatcgatggcgagaagttccgctacgcactgacccactggggctccgataagttctccgaggatgaggttgacgatgccttcgaccagatgatcattgacgataagggcttcatcgacactgctgccctgatcggaatgctcaccggcaccgaagagggagaggaagaataaactcctcgcctcccccttccacatcccctcatcctcccaaccccaaaacccatttaaaaaacaatcctttttctatttattttaataccaaacttaaacttgtataaaaaagagaaaaacaacatctacaaaaaagaacaagcagtgacaacaacaacaacaacaatacggagaacatcttcatgttaatcacaattccatttgcttacatcatctgattctaaattattaatttttattttcttatgataagacatgaatttttaagctataagaagaataaagttatatagaaaactgaaaaaaacctaaaaaataaagtgaaaaaaagtgcaaaagaactctcgtaacgaggagaaaaacttacaaactcgattgcgtctttcttacagtgtcacagcagggtagcgtagtcagatcaccgtgtagcgaacacgaaaaaacaaagtgagacaggaggaatgcacgcgtaggagaagcactttgactttttttttttgttctaatttgcaaaaataaatgtgttttctgttaaatgaaaatcacactaacacgagtgaaagtagtactggcattcctggagcaagagaaagagtttgttttcgttctctcgatctttccagttaagaaagagtggtgatggtgatttatgtgattcggtttcgaatagtagaatctcgttctaacgagacacgaaacaaga

SEQ ID NO: 35 - DNA, 6200 bp, Aedes aegypti
actcttttcaatctatctccccctcaggacgcccgcgtctggatcccccacgcagagaacgtatggcagggtgcggtggtgctgcgcgactacaaagaaggtgacaccacgttggaactaatcaccgatcgcaaagaatcacacaccgtgcagctgaagtcgcccagcgatctgccccatctgcggaaccctgccatcctcataggacagaatgatctcacggcgctgtcctacctgcatgaaccggatgtcctgtacaacctggaggttcggttttgcgaccgtcacaacatctacacctactgcggtatcgtcctggtggcgatcaatccctatgcggaacttccgctgtacggagcggaacttatacgagcctatcgaggtcactcgatgggcgaactggaaccacatatctttgccgtggcggaggaagcctatgccaaattggagcgtgaaaagtgtgatattagtattattgttagtggggagtcaggggcgggaaagaccgtatcggccaagtatgctatgcgatactttgccgcggtcggtggtagtgaatctgaaacgcaaatcgagaagaaagtgttggccagcagtccgatcatggaagcgatcggcaatgcgaaaaccacccggaacgataacagttctcggttcggcaagtttaccaagctgctgtttacgaataacctctcgatgatgtcgctgaccggtggcaccatgcagacgtatctgctggagaagtcgcgagtggtatttcaggctcctggagagcgaaactaccacatattctatcagttgtgtgcggcgcggcaacagtggcccgagttggtgctggatcaccaggataagtttcactttctgaatcagggcaaatcgccggatattgcgcgagtgtcggacgaagatcagtttcgagagacgataaatgcgttcaagatattgggtttcgatgatggagagatcagtgacataatgaaagtgttggcagcggtgctgcatttggggaacgtcgagtttacacacaaattcaagaagcaatcacaggaggtggaccaggaagcatgcaacgtttcgtccgatgacctgcacgtgaacatcttcagtgacatcctgaaactgaaccgggacgaactgcggaagtggctcatcacgcgccaaatcgaatccatcaacgacaccgtgctgatacctcaaagcaaggcccagtccgaagcggcccgcgatgcactggccaaacacatctacgcggaaatgttccagtacatcgtacacaaaatcaaccgcaatttggccggtggcaagaagcagaactgcttcattggtgtactggacatctacggcttcgaaacgttcgaggtgaactcgttcgagcagttctgcatcaactacgcgaacgagaagcttcagcaacagttcaatcagcatgtcttcaagctggaacaggaacagtacctgaaggagggaatcgagtggaagatgatcgatttctacgacaatcaaccgtgcatcgacctgatcgagaccaaactgggcattctggacctgctggacgaagaatgtcgaatgccccgggggtcagacgaatcctgggtggggaaactgttcgagaagtgtagcaagtacaaacacttcgacaagccccggttcgggacgagtgcatttctgatcaaacacttctccgacacggtccaatacgaatcgttcgggtttctggagaagaatcgggacacggtttcgaaggagttggtgaacgtgctgcggttgtccaagatgaagttgtgccataaactgatgacggcctcggatgaatcgccacagtcggaggatggagaagtggggaagtccggtgtgaagctggtggtcagtgccgccaggagtcagccgggtgatagaaagcgaaagccaatgacccagaagcaacagaggaaaacagtcggttcgcagttccgggagagtctgaccctgttgattacaacgctgcacaatacgacgccacattacgtccgatgcatcaagcccaacgacgacaaggccgccttccagtgggaggctccgaaaatcgtacaacagctgagggcatgcggcgtcctggaaacggttcgcatctcggcggccggtttcccatcccgttggacgtacgaggacttctacgaccggtaccggttgttgtgcaagcgcgtccaaatcgtagactggaacgtgaaggccacgtgcggcaacattgtgcgcaactggttaaccgacccggacaagtaccggctgggcaacacgcagatcttcttccgcgctggtcaggtcgcttatctggaacagttgcgaagcgatctgcgcaagaagcacatcatcaaggtgcaatcgctgataaggagatttatttgccgcaacaaatatctgcgactgaagcgcacggctctggggctgcagagacacgcccgaggcatgctggccaggaagagagcggacaaccttcggaagaatcgggcagccatcaaaattcaacggtacgttcggggatggttacagcgcaccaagtatcgacgaatccgtcgaacgattcgtgggcttcaaacctatgcccgcggattactcgcccggcgaacgttcaagcaagtgctggacaactacaaagcgacccagattcagcggttctgccgaggctacctggcgcgagaaagagccaaacagcgtctggcgaatatcatcaagtgtcaggcaacgattcgtcgattcttggctcgtcgtatgttcaagcgattgaaggcagaagcccggaccatttcccacattcaaaagatgtacaaaggtctggagaacaaaattatcgaactgcagcagcgttacgatcagctgtcgaaggagaatgctgctctgaagaaacaaaatgccgaaataccggagatgcggcaaaagttggtcgccatgaagcagcaagagaacgacctgaaggcactgaaactgcagctggaacaaaaggacgaaaaattgctggtggtgatcaagcagttggagaacgaacgagacgagaagatgattctgttggaggagaagcaaaaggaagaggaagatcggatgaaagaacgggcggccatggagcaagacctcgcaaaaatgcgagagcaggtcaatgaaatcagcgacgtcacgaaactggaacgagatcgactactttcgcaagccgattccaaagagattcacgtagcttaccaacggatggttgaagacaagaaccagctggagaatgaaaacagcaatttgcgaaacgaattgcgccgattgcagcacattgtcagcaattctcacgaactgaaaacgcactcccgatcggtgagcaacgcttccagcaccaacgaagaggactacggatacaattcgggcaagaacacgctggagattcgacgatcaccgcagtccctcagtagcaattctccagagaaggaccaaacggccataatcttaaaaatgcgcaagctcttcgaggaagagaaatccaaaagcgatcagctccgcaaggaaatcgcccgattccgcaagagcgcttccttcagtacggaggactcgattcgcgcatcggaactggaggtggagatcgaaaagcttcgccaagattacaacttgctgaggaacagcatcaaacgcggtgtcgaggatcgtgaactggaggcacaacacaacgccctgcaagaggaactgaaacggcgacgagacgagtgcatatcgctgaaggccgttttggcacagcagagccactcgctgaggacactgggacaatcgcaggttaatccgaatggagacagcagcttacgaattcacgatgaaggagaactgatggaagcgttccaagcgcagaagttggtcaataggcagctggagtccgaactgcgcgccatgatggatgcaagcaacgaaacactggtcgagaacaataaggtcatcgaagcacttcggaaggaagttcaggaacttcaaatgatcctgcaaggaagacttgatacttcaaacgaggataatctggaagccttgcggcaaagtgatcaatatttgaggcacgagttgaagaaatccacggcagcctatgtggacctccaagaacaggtgaacgagctgctggcgaagatcaacgaactgacgaagaaaaataatatcctgtcgaatcggttacgagacaacggaataaacgaatccatcataatgaatgaagagttccagtccatggttgtagtgaaaaagaaggagcagtcattccaaggtattctaaaatatcgacatgaagatgagaacaagatcattcaaaggttggtgaccgaccttaaaccaagggtagcggttacgttgatcccaggtttaccggcctacgtggtgttcatgtgtattagatatacagattcggttaacacggaccaacttgtacgatccctgttgacacggttcgtgcagatgatcaagcggttgtacaagctgcccaacgttgccgaagttcgagtcatgtggctagtcaatacccttaccctccacaacctgttgaaacaattcggtggctatgcggagtacatgcagtacaacaccgaggagcagaaccagcagcagctgaagaacttcgatctgtccgagtaccggcaggtcatctacgagctgatcatcctgatgcacggcgtgctgctgcggcaggtacaggaatcgatcaagcagtacatcgtgccggccattctggaccacgacgaaacggcccggggcaagagccgggggcggacgatgtcgctggacatgtcgccggagcagagccgggaaccgaagtcgttggtacagcagttggacaccttctacaagcacctgagcagcttcggcatggaaagcaactacatcgagcagatcttcaaacagctcatgtactacatctgcgccgttgcggtcaatagccttatgttgcgaggtgacctatgtgtgtggaaaaccggcatgaagatccactacaacgtgggctgtttggagcggtgggtccgatcgatggccatggatccggacgtgttcaaaccgctggaaccgttgtatcaaatttcacgcattttacaagcccgcaaaaccgttgaggatgtcccaacgttactggaactcagctcgtgtctgacgacggcgcaaattttgaagatcatcaaatcgtacaccacggatgattgcgagaacgaaattacgccgctattcatcgagacgctgacgaagcagttgaacgagcggtccagccaaagcgaggcggacacctacatgatggacgaggagatcgtcagcccgctggttgtggtgtacaagtacagcgagatcaacctgaaggaaatcgaccttccaggggagctgaacctggatggtttggtcaccaaaatctaaagaccgagggtacaacaagtagcattcatgttttaaataggataattgacatatttacagatgtattccaaagtagaatggaatggtcctaagggcccaacttctattacagaccaagagcgagaagttcgatctaagcattgttatataattcaaatgagagtttatcgttgcatatttacacggtattcgtttgttaaaaccaatacgaaaatataaaactattttgcatctctatatgctgttaaaaagtcatgagttacttgcgtacaagtatgacactgattggccttcatcatggttcattttgaatcacaaatcaacggtttctatcgttttttgaatacgttaagtgcatttatatcaacccacgcgcatttctcgcaatttgtatcatacgttacgttttctatttcccgttaagcctagctattacataagttgttcaattgttatttattgctgaaatgagtaagtctgaatccgtgtgtgaacaaaaaaaggcggtcaaaatatatatatttattcaaaactgaccctaacaaaacagcacctagcaaatagagattacacatttcaccacagcaaagcgaagcaaggaatggaaacaataatcatgttactgaaattagaaacgaaagtacatattatgccgttaggaaaactaaatagtacacacatacacctgttaaagcaagtatttctccttgttagagcatttatcgtgatatagatgaaatttacctaatgtacttacaaaaaaaagtgagtatctattgagctaagcgttcgtcagcaaataaatatggatgcctaaatgc

SEQ ID NO: 36 - DNA, 2084 bp, Aedes aegypti
tttttacccgcttggttggttgttggttgtgtgagactaggcaagagattcgagcttttcttggcatgtaaaataccttctaggaagtacccgtgttttaagcgaaggcaatttacaaattttgccagacccgactgtttgccagtgcttccgtccatcgggcagcgtattgaagtgaaggtattcctgtgatccggccataaatttccctaagaaggtttacggttttgttccaaacaataatcaacaatgactggtacagagaagaacgcagtcaaagctgtggaatctaactccgatggcgaagatcagatgccagacttcttagatgacccggcttacatgtgttcggcatcgcgccgaatgatgatgaaggaagtaattaaaacgctgccagggaatgttcaacacaaaattaacgccctgaagcatctgcagaagaaatatctcagcctagaggcgaaattttttgaggaagtttacgctttggagtgtaaatatcaggctctataccaaccgctagttgaccgccgaaaggccgtcatcgccggggaaactgaattagaagccggtgaagcggattgggaagatgagagtgatgatgaaaaggagatagatgccgaagtgaccgaacggttcaagcgtatggcgctgaactacaaaaatcagcactcgaaggtcattaaggaatcgcaaggcatcccagctttctggttgactgttttcaaaaacacgcaaactatggccgatatgattcaaccgcatgacgaaccccttctggaacatctaaccaacgtgaacattgtgtataaaacagacccaatgagctacgtgctcgagttccacttttcaccaaacgcttacttcaaggacgcgattttaaccaagacatattttatgcgctgtcaggtagatgaggaagaaccattcagttttgaaggtccggaaatctacaagtgcactggttgtacgatccagtggaatcctagcaagaacgtgacggtcaagacagtcaagaagcaacagaagcacaaacagcgcggagtgattcgcactcttaccaagacgctgccaaatgattctttcttcaatttcttcagccctccgcaagtgcaagatgatgacaagaatgtcgatgatgagactcaaatgcttcttgcctcggacttcgagattggacatttccttcgggcccgtatcattccgaaggccatcctttactacactggtgaggtgatggatgaagacgatgatggtgaggaagaagaggaggaggaagaagaggaggacttggaagatatggaagaagaagagggcgaagaagaggaggaagaagaggaagaacggccggcaccgaagagtcggaaaggtggacgcggaggtggtggcaagaaacccaaggacgggcagaatccagccgaatgccaacaacaatagaagcattacattcgctatgtaattgttttatttacacattagcttatttgaaataatatgttccattgttcgcaagtttaaactcacacgcaacccacgaatacccagaaacgtgcttaaatatagacctgcatgatgattatattcaacgaaatcaatacatattgaggattgctcgaatcatttaattggaaatacatatttttttatgatttgattctaaaccgaaataagccatactcgatatgtccagtgttaatacatacagcattggtatagctaagctgcaaaaattaaaacggaactattcgtattcaatgtagcagctgaaaggtaatatttttcacaagatcaaacgctacaacagcagatacggctgcaaatatttgagagtataacctttcaacatcattggttcaattccattgaggcaacgtgctcaatatagtatggttagagcataaatttagactatttgcagtcagtaccatgtatatcgaacacgaatcatgttaacaaaatcataaatatttccatataaatacttcaaaaacagttttactgagacggcacctgctacgtgttctcttctttgattaagttaaaatggtaagtttcgaatatagacattaattttagctagtatt

SEQ ID NO: 37 - DNA, 1239 bp, Aedes aegypti
atgagtgcaccggaagtggaaaacaaaccagcggacgccccggaacactgtccgggaacggagagcgaaaacgcaggcaaggcttccgcttgtgccggctgtccgaatcagcagatatgtgctactggtccgaagggaccggatccttcgattgcactggtgaaggaaaagctgaaggaggttcgtaataagattctggtgctgtcggggaaaggaggtgttggaaagagtacggtgacggccctgttgagtcgagcgatggcacagctaaatccggaacgtaactatggggtgttggatgtggacatttgtggaccatcgcagccgcgagttttgggagtgctgggcgagcaagtgcatcagtccggatccgggtggtctccggtctatgtggaggacaatttgagcctgatgtcgattgggtttctgctgggaagtccggatgatgcgattatttggcgtggtccgaagaagaacggcatgattcggcagtttttgaccgaggtcgattggggacagttggattatttggtgctggacacgccaccgggaacgtccgatgagcacctgtcggcgaccacgttcctgaaagagacagacggaaactggggagcggtgcttgtgacgacacctcaggaagtggccctgctagatgtgcggaaagaaattacgttctgcaagaagatgggaattccggtggtaggagtggtggagaatatgtcggtatttgtgtgccccaagtgcacgacagagtcggacatatttccagccaagacgggaggcgcggagaagatgtgtgaagagatggaagttgcctatctgggtaagttgccgctggatccgagattggccaagtgctgcgacgaagggaaagatttcataacggagcattccaaaagtccaacggtaattgcgctgcaccagattgtagccaaggtgcaggatttcttcgacaagattggctcatatccgcttccggtccattgcgattccgaatcgtatatccgaaatgtatcaaaattgttcaacaacatcgttggcccttcccagcagtcagcctttttacttcgcttgccattcgctcgtgacggtcaaattggagaggggtttctgccacccgtccactcccgatcgcttatctacttccggatgagtacgacgatgacgacgacgatgatgtccccctttctacgaattgtgctttatttttggaatcgatccagactggtagcgacatag

SEQ ID NO: 38 - DNA, 3776 bp, Aedes aegypti
agtcagctgcagtccaaacgagtggatatagtgcaaaagggcgattaattatccgagtggaaaaaaggggcgagaaaaatgggtagttttcagtcaacgcagcatgaccgggaaagcgtagatgatggaggaggtggcgagaccacgagacaagaacatgaaaccgatgttggtagcagcagttcggatatgtttgatggtgaaagttgtgcaacaataggccgtaaatcagagggacacgcgataaataacgaaactccaaatgaaagtcgtaaacctagtgaggactcgagtcctgatgggtttgagtcgtgcgatggatcagaaaagtgtcgagagttggccgagttccgcgaggaactgggtaaaaaacgtgaactgcgaaaatcgaaaatggctgatatcaaacgagagatggataagctgagacaggacttggcagaggagaaagccaagaaccgtgctctcatacgattcatccaacagaatcaagagcaaacaaagggcgcatcggaagtcacaacaagcggcgtcgaggaaattaccttctctgtaaacgaagccacggaatcgtgtcacaacgacacggaaaatcacacagaacaaagcaattctagccctaactgcagcactaccacaccaccagcccaagatgatctacgcctcggattaaaatgtgatctggctgagtcacagctacagcttcaagaagcaaacagtcagatcctgtcgcttcagtccgtgatagaccagctaagaacgcagattcaaacacttcagacgcccagcgaagaagaggaagccgcccgaactgcacggaacaaagaatttcgccatctacaggccgaacttgcagactcgcagttccagctgcagatagcgaacgccgaagtgctttcgctccagaccgatattactcaactgaaaaatcaaatcaaaggactaaaggacgttatcaaagccggcaaagagatcatccacatcagggaggaccaagtggaacaacttaaggcgaagttgcgccagatcgaggactcgctgcacgagcgggaggtgcaaattatgtccaccgatcttcgccgcgagtacgaacgacaaatggccaacatccgcaatctgcgcgaactttacgaggaacgggaacgtgtctcccgaatggagcgtgacaatctgctgcgacagctggagctgcgtaaaaacgacctggaagccgaacaggaaaagaacaaaaatctcgaatcacatgtcgccagcctgcaaacagacttggaaacgatgaaaaacgagctggttcaaacacaggaaaagctaagccaatccacgctagagtccgagcagctgcacgccgaaatgaccgttgtaaatcaattcatatccaagtttcttctggggatgaaccgcaagcaaacgaccaatagcgttaagctagacaagctgaccgaagtgctagccgagaatcgcggtctgctgatagacatgaccaaagaggaatcggaaactatcgatttgggcgcgttcttgccacgagccctctacgatctggtggccgaagtggacgaagagtccgccgctactgatgaaagcgagtgctccgaagaggatggggcattcaacgaagtgcagactgcttcgccggaacagattgctgacaagctgccaaaagtttggcgggtgctgattgagttggtgaatcaccaggaacgggtgcaacaggttccattcgtggagaatggcgaaagcgaagaatgcctcaagacagaaccaacgaagaatggatcgaaaacagtggttagcgtcagcaaaacgtatcttaaattgaaggatctaattctggagaaaaaggctctcaaaaaggaaacgaaccgcttgaagacacttaacacccacctggaacgccgtttggaaacgcaggaaaagcgtctcagtgcagtgagtttggagttgactaaaacctggcacctggttggcaagatgcagcgccaacatcgtcaactgcacactcaggagcaaatcctacgctatcacctgcagcaaaagcgacgtcttctcagtgaactgaaggaagaactggaatactgtcgcctcaagtggagtgccgctcgccagaagaacatcgaatccgaagaccaatggaaaacgttgaaggccgacttcgccgcgcgcaagaagcaagattcgtcgaacaattcgggtgagagcggctacagcgatgagcaaccgaccgacgacgaagacgaagattatctgcacggagataagccgtcgaagaaacatctgagtaggatgatcaatttcgaacggtgcagaagttcctcgttaacgaacgttttacaagtggcactggagttgagaaagtgctacagcgagtccgatatgaaatcgttgcataatgttgagagagccaatcagttttgcaatgagaagatcgaagatttgccaatatttccggaggagatggtctgcccagtgaagaagaaagcaaagaaacctaagaagaagaaagataagcgaagtggaccggaaaccgcggaggatatgtttaggagactggctggtttggatcaggatactaatgaagaggaagatgatgatgatgaagaagatgatcaggatgagatcagcgatgattccgaatgttctgagatagaaaaaatcgaacaacgagaatccagtccacctaaagaacccgagatgagtagtgaggaattgtttaacatgaaacgggaagctcgactgaaacgaatggcagagttaaactccagacttgatacttattcaaatccgagttctgtaaaagatgtcgtaagcggtattagcgaagaagatcaggtagaagcggggccgtctagagtacttaccagcactgaggaagactatcttcaacgaagagctgctcgattggaaagactcgagagagaagctagagaatttagaaacaaattatctcgcaccgtaaaccgaggaagtgctatttcagctcaaatcgatgaaattcacaacggtttcatagctagacaatctgaatctcccattcctgggagctcctcagagaacagatctgcgacagcgaaatcgaacgatgttcctccaacagatttaacggttctgagtgatcgggaaagagaatacactcagaatagatccgatcgtctgcagtcattagaagatcagagccaagccttgcttcaacaaatgaatcgagcgttgaagagaggttctagactcacaacgcaactagatatgctgcattctcgatatagcagtagtgatcaaaataatgctagtacatcggcagaagctactgctagcgatcaaccatgtgcctcaacgagtccagtccagaatgtcgaagaaaatttgcttcccgagccagaaacgatcgacacgcttctactggaaaattctatcgttatccctgcaaatggtcctcttgaattgattctaatctctgatgaagaaatactcgaagaagtagatgaacttctgcctactcccagtagcgctacctcaacccaagaaaatcaacacgaagacaacgatcgtgattcacaatcataattacactacataaattgcgctctacccataagaaatgtcattcaacctatcccatcaaaaagacatgtccaccagaatgtcgtcaaaccttagatagatcgtttcaattgttcgcactttgtaccaatgtcgaaactactactgtgttaaaaatgtataataatatgtaataaataaaatatgtgaaaaaaagataagactcgcttaacagaattcgc

SEQ ID NO: 39 - DNA, 720 bp, Aedes aegypti
atgatgaaatttgttgcctcagagatttcgagcattatggagctgcagatgaggagtgagccaattagtagtagtaatcgtgccaccaagcgcacgatttcttcttcctcttcctcctcctcttcgtcggcaggcttcgactcctactgtgtttcgttggctgtaggaccgctgtggtgggatgtcccacaatcccgaacggaccacgatagggcgtctcccttgaaagaatacaatcgcaagacatctatcgattcgacaaccaccgcttcgtctgagtttaccgattatgacgacaccgagtcaaccgtagagttcatgaaccaacatgaagccgctgtcatccaggaagtgctgaaccagcccacgccaacgcaaatctcgctgaagctgttcgtcactccgcagaagtacagcgtctgggaaacggtcttcaacccgttggacaacatcctttatgtgaacctgccgtcgaccatgacgcacgaggcatcgaagcattcgttcatctctctgctggaattcgccgaagagaagctcgagtgtgacgccgtagtcctttgcatccgcaaggaccgcctcgatcgtccaaatctggtgcgtacattctcatttgtcggtttccaacctgtcagccccaagtcaccattggcgccacctcacattgaagagcagcagaagaacgactatctcttcatgatctacaacatcgaggagtga

SEQ ID NO: 40 - DNA, 3659 bp, Aedes aegypti
ctgccggtggaaagtgaatctgaattgttcctggaaaagaaaggattcttcagcggttgtgtggttgtctctcgctcgttgttaccctcgtctcattcgccttccccagtcaaggctcaaggaagcgaacttcgtcttaaactcttagtgaattcaatcagtgtttgccgagtgctggaattggtttttgagtgctagtgaaaactgttgaaaataaggagcgaaaatgtcgtcctctgccgttactactaaaacttcgaaatatacctacaaatccactggcggtggaactgccgatgtcagcatcgaatacagcgctgaccttagcgccttgtccaggctggaggacaaaatccgcctgctgcaggaagatctggagtcggagcgatgcctccgtcagaggatcgaacgtgaaaaggccgacctcagcgtgcaagtcatccagatgtcagagcgcctcgaggaagccgaaggtggtgccgaaagtcagctggaaatcaaccgcaagcgcgacaccgaactgaccaaattgcgcaaactgctcgaagatgtgcacctggagtcggaggaaactgctcacattctgaagaagaagcaccaggaaatcgtgaacgattttagcgaacagatcgaagcactgaccaaggctaaacagagagttgagaaggagaaatccaaattgcaagccgagatctacgaacttctgtcccagatcgagagcgtttctaaggacaagaccgtcagtattaagaccatcgaaaagctggaagtccaggtgaccgagttgaacattcgcatcgaagagctgaaccgcaccatcgtggacatcacctcccacaagactcgtctgtcccaggaaaacatcgatctggtcaagagtgtccaggatctgaagatcaacatcgagagcatcagcttctccaggacacagctcaacacccagctggaggatgcccgtcgtcgtctggaggaagacgatcgccgccgttccatcttggagtcaaccctccatcaggtcgaaaccgagctggaatctgttcgcctgcagctggaagaggaatccgaagctcgcttggatctggaacgacaactggtcaaggctaacggagatgccggtgccttcaaatcgaagtacgaagccgaatgcatggcccgccacgaagaggttgaggaaatccgtcgcaagtacaccgttcgcatccaggaatcggaggaacacattgagtccctccaggctcgcttgtccaaactggagaaggagaagagccgtttgtccagcgagatcgaaatcctgattatcgacttggagaaggccaacaatggcatccgcgagtacaccaaacgtatcgaaattctcgagaaaaccaatatcgaaatcaagactcgcctggaggaaaccattaccctttacgaccagtcgcaacgcgatctgagacagaagactcaggactaccagcgcctgagccacgaactggatgcgacccgtgaacagaaggaccagctggcccgggaaaacaacaaaatgcagaaggacttgcacgaagcccgctccagcgtcactgagctgacacgtcgccttcatgactatgaagtcgagctgcgtcgtctggaaaatgaacgcgaggagttgacggccgcctacaaggaagccgaagccggacgtaaagctgaggagaaacgtgcccaggctctgtctgctgagtacggccagttccgtcacgacaccgagcgccgtctgctggagaaggaagaagagatcgaagtcatgcgcaagcagaccagcattgaaatcgagcagctgaatgctcgcgtcgttgaggccgagaccaagctgaagagcgaggttcagcgcatcaagaagaagctgcagatccagatcactgagctggagatgtccctggatgttgccaaccacaccaacattgaactgcagaagaccatcaagaggcagtcggctcaactgactgaaatccaagcccactacgaagaaatccaacgtcaactgcagtctaccgttgaccagtacggaattgcccaacgccgcatccaatcgctcactggtgagctggaagagatccgcgtcaattatgattcgtctctccgctctaaacgccaggttgaagtccaactggaagaagccacctcgcgcatcaacgaccttaccgtcagcaatgccagctacgcatctctcagaaccaagctcgaacaggaactgcaggttctggcctccgactacgaggaagtcacacgcgaactgcgtgtcagtgacgaacgctaccagaaggtccaggttgaacttaagcacactgttgaactgctccatgaagaacaggaaagaattgtcaagatcgaaactatcaagaagtccttggaagtcgaagtcaagcaactttcagtccgtcttgaggaggttgaagttaacgccgttgctggtagccgtcgcatcatcggtaagctggaggcccgccttcgtgacattgaagtcgagcttgaggaagagagaaggaagcacgccgaaaccatcaagatcctgcgcaagaaggaacgctccgttaaggaagtgttcatccagattgaagaagaccagaagaacattcagattctgcaggacgccctggagaaggccaaccagaagattgctgcctacaagcgtcagctagttgaacaggaacaatgctcgcagcaatgcgttaccaaggttcgtcgcttccagcgcgaactggaagccgccgaggaccgcgctgatgtggccgagagcaacctgcacttggtccgcgccaagcaccgtaccttcgtgactacctccaccgtgcccggatcgcaagtctatctggttcaggagaccaccagaaccgtcaacgagacgtcgtcgtcctaaattcttgaggaagggaacgacctccaagaaatttccgaaagccagctttagcccaaccatcacggcccgacgtagtggcgaaacgcaccatatgatctttcatttcaatcatttccgtttgtattttgttctgtccgtttattaatttctgtttcgcaacttcgtattcgtctttagttccattaacttataatttttcgtacactcttccacaccaacgaacttatgaaacataaaatataatctctttatcttgaaaccaccgtacatcctggtggtttcggtcgcaaacaaaatccgagaccacgcataaaaccgcccgacctgaagaaatgcgaatctcttacattaatattgaaataaagataaaacgcattaccactagccgctctttttgattgaagctgaaactagatgtgtcgagaaagaaaggaagaaagaacagcaatataccgccctttttataaatgctagtaaatctaccaactgcaagcagtactagttatccaaagaagatcaaatcattatatttcttttgtatgatataaatctttgtaataaataaatattattaaacaaataaaaaataagaaaaaatgagaagatagtgaaacaaatcggaatgagaaattgtccatgcagctttcaatgtatgtcaaaataaatcgcgttcaaaatgctggtcagttacaattgattctataaaggcaattgaaggaaaaataagccataattaaattattaataaaatatgtttaaaaaaaataaaaaagcatatgaa

SEQ ID NO: 41 - DNA, 1329 bp, Aedes aegypti
atcgagatcccatcaaacggagaggaagccatcgcgcatttttgtttgccgaacgaggttcaccacggtagcaagtgtttgggtgaaaaatttcgcatcaattccgctgagattctgcacaaaagcttcctttccggttgccgaaaggattttccaacgcgggtgcgataaattcgtttggatcgccggagcgactggtttgcttgtctcgtcgcttgccactaaaagcgccaccatcgattttatcctcaacatttcaacgctttgaagataaaaaatgggcaaagctaaggataacaaaccgaattcggatagcgagtccagcgaggaagaggagtatgtcgtggagaaggtcgtcgatcggcgggaacggaagggaaaggtagagtatttcctgaaatggaagggatacgattcctcggcgaacacttgggaacctagggaaaatctcgaatgcccggaactgatcaaggcattcgaagatgcccgagctgcggccagaaaagaaagtgccacaaaggagaaagagaaggagaaggacaaaaagaaacccggtaaaccatcgtccactagcagttcaaagcgaaaggccgattccgatggcgatgacggttccgatgacgacaaggatgattccgcttcgaccaagtccaacaaatccaagaccacagccgcagacaatgatgcagcggccagcgatgacggcatgaacggattcgagcgaggatacgtgccggagaagattctcggagcaaccgaagcaaacaacgagcttctgttcctgatccagtggaaggacaaggacaaggcccagctcgtttcatccaaggaagcacgcaagcactgtccgcagctggtcatagacttctacgaagaacgtctcatctggcaatcgtccgattcagcggagtaaatttccacccctcgctctgctttttcatttccctgcatttctccttccgcttgtgatgcataaggcggggttgaacgttttccttgatggatgattataagtttaggatcttcgttttaagtacgccaacaaataactgatatgaccggaaatatgtatgtccgtagtaagtttttatttactgatattgattgacttgaactgtatcgatggataggatctaagaaagaagctcgtttgaagtgaaatactaggccatagcgcaacaaaaaaaacaggacaggacaaacaacaaaaactacaaactctcggatagaagcaacatccactttacgacctgtaattcaatacaacagaacatattttcatgaataataaagattttggaaaattagtattacgtctcaataatgatg

SEQ ID NO: 42 - DNA, 1123 bp, Aedes aegypti
agaaataacctaacagcagcaccagcggattgagacagtgagcagcacccatcaacgatggcggacggaaacagctccgacgaagattttcccgacgattggactctttacgcgaaccgcccggagtggagcgatatcgagccgctgaagcaggatgacggcgaaaatccggtagtgatgatccagtacagcgagaagttcaacgatgtgttcagctacctgagggcggtcatctccaagcaggaaaaatcggtgcgcgcccttgggcttacgcaagacgctgcgagactgaatgcggccaattacaccgtgtggcagtacaggagggacattctgaaggcgttgaatttcaatctgtacgacgaactggactacatcgagggggtgattgaggataatccgaaaaattaccaagtttggcaccaccggcgtgtcattgtggagtggttgaatgacccctcgaaggagctggagctaaccgagaacattctgaacatggatgcgaagaattaccatgcctggcagcaccgccagtgggccatcaagacatacgatctcttcgaagatgagttgcagtacgtggaccgactcatttcggaagatatgcgtaataattcggcatggaacgagcgctttttcgtgctcaagcacaccggattcagtgcagatgtactggaacgggagataaactacgtcatgaatcgtattcggctcatcaaaaacaacgagagcccgtggaacttcctgcggggactgcttcagcagggtgacggcaagctcggtcagtttccggaggtggtcgatttctgcgaggatctgtacgattccggcatccgatcgccgtatctgttggcatttttggttgacctgtacgaggagaagtacttcgagaccaagcaggccggtaacgatccggatgagtacaaggtcaaggtgcaggacctgtgcgaatcgatggccacccagcacgataagatccgatgcaaatactggcggtacattctggagaacttcaggaggaagatcgatgccgaaggaaaccaaaatggactgtaaggtcgtttttttatgtctacttaagtaccacatattcaatcaaaatttaatgaagctttgaaatgat

SEQ ID NO: 43 - DNA, 862 bp, Aedes aegypti
gtgcctgtcaccgccggttggggagctcttttctattcaagtgttcgctcggttcagacgccattacgcagaatgggtaaaccacgtggaatccgtaccgctcggaagcacatccgtcaccgccgggaccagcgctgggccgataaggactacaagaaggcccatttgggaacgcgctggaagtccaacccgtttgccggagcgtcccacgccaagggaatcgtcctggaaaaggtcggcgtcgaagctaagcagcccaattctgccatccgcaagtgtgtccgtgtccaactgatcaagaacggcaagaagattacggccttcgttccccgggatggttgcctgaactacatcgaggaaaacgacgaggtcctggtggccggtttcggtcgtaagggtcacgccgtcggtgacattcccggagtccgcttcaaggtggtcaaggtggccaacgtttcgctgctggccctgtacaaggagaagaaggaacgtccacgatcgtaagaaggggaagaaaacaaaaaacggaatccgctggtcgaactttcggattctctaggaatataacgagttagatttacggataagtatgcgtctctgtaaacaagtggaggaaaatccaaatacaagcttctgtgaaagttgaacctaccggaatccggaatttgttggcgtttgtgtttgcatcggagagaaatatggccctgttttggaacggtcaggtgagagggccggatacctgaagcggcattcgccttggggttctggtgaatatttgtgtggtcgtcggaaatcgcaagtgcaagtgattgtttacaagttagacggatctttaaggataaatctattgtgggagctggcc

SEQ ID NO: 44 - DNA, 1528 bp, Aedes aegypti
atggcaaacggcttgtttttggacaacagcttcgacctgaacccgacctatgaaaagtttgctgaaggagtataccaagcagaagtggagagattgcaattttcacaaaatgcagatgaggccaccaactatataaacacatgggtcaaccgtaacacccacggaaaaattccggagatcttctccagcgcactaggatctaacacggtcatggtgattgctagcgcattatatttcaaggcattgtgggagcagatgttcatcgaaggagcaacaagaccccgagacttctatcccaatggacgaaaccaaacatcgatcaaggtggaaatgatggctcatggaggctgttttccgtactacgaatcacctgaactcgatgctaaaattctgggaatcccatacaagaacaatcaaaccactatgtacgtcattaaaccgaataactccaaccgacaagttcttctggatcttatcgccaatcttaaagccgatgtcctcgatgaaatgatcaacaaaatgagacaggtcactgccgttgtacttttccccaaaatgcacgtatccagcacattgaatctgaagaaaactttgagacatctgaacgttcgctcgatatttagcgcccccaaaagcaacctttcggcgatttctggagatacggcttcgatacgaccgacacctagcagtgaaaccattgtaaagcgaccgacacctaacgaacttgcgatgcgcccagctgtaaatctaccaatccacatcaacaaaataacctcgcagtccactgatttcaaagatagactaatagtatctcgttatcagaacgaaacttcaatcgaagtctctaaaagcacggagccttctaataccgacatgccgacaacgctggacacaaccttcgaaaccgatccagatgaaaatcccacaactgccatcctttctagctctacagaacaacctccatccgcaaggaacaaacgagacgttacgtacaaagtaccctccgaggccaaaaacaagccagaccccctcaccagcaaggactttttctccaaaaaacgtatcttcaaaaccacccccggtaagaagtcccaccgaacgcgacgcgatgcccagaatctgtacgtgagcgatgcgatccacaaggtcgatctggaaatccacgaacgtggcaccgagggaggcgcagccacggccatttccctgaaccggtccggaacgagtgccgtcatgcgggctgatgaaccgttcttgatcgtgattcgaaacgacaagaccaaactgccgttgttctacggggccgtgtatgaccccagcccatgagggcgatccttcgggtttagaatttgtattctatcgagaaaattattgtttgcagatttccctttctgcattcaagtgacaacaggataagcggacaaaacggccaatatagtttacgatagaaataatcatgaatgttccagtgttacgtcgttttgtccgtgatacactaataacataaattattctcactactaaaacaata

SEQ ID NO: 45 - DNA, 1897 bp, Aedes aegypti
aaatcattttgcgcaaaccgcattcgatcaccttcgccacgtttagagcggacggaatcacgcagcagtgcccttttctcaaactccaggcaaaggattccgatttcatcatccaatcgcgagttttgtttgaattagtgcttcgtcaaaaatcagcgtagcgccacataatggttctggatttggatctgttccgcagcgacaagggccacgacccggccaaagtccgagcgaatcaggagctgcgcttcaaggatgtcggcctggtggacacggtcatcgagcaggacggcgagtggcgcaagtgtcgcttcaacgcggacaatttcaacaagctgaagaatctgtgcagcaaggaaatcggcgagaaaatgaagaagaaagaaccgcaaggggcggaagatgaaccggtgccggaagcggtggccacggatttactcgggttgaagagtgaagatctgaaggcgttgacggtaaatcagatcaagaaggttcggggattgattgattcggcgatggttgaaaatgaaaagaaattgagcgaagccgaagcgaaacgaaattccgccctgcgggaagtgggaaatcatctccacgagagtgttccggtcagcaacgatgaggatgaaaataaggtcgagcgtacgtttggagattgtgagaagaagctgaaatactcgcacgttgatttgatcgtgatgattgacggaatgaatggcgagaagggcgcagtcgtttccggtggtcgaggatacttcctgaccggtccagctgtgttcctcgagcaggctctgattcagcattcgttgcaccttctgtacggcaagggatacactcccctgtacacgccgttcttcatgcggaaggaagtgatgcaggaagtggctcagctttcccagttcgacgaggaactgtacaaagttgtaggaaagggtagcgaaaaaacggaggaaggcgtcagcgatgagaaatacttgattgcgacttcggaacaaccgattgctgcctatcacagagatgaatggatcccagaagcttccctaccaataaaatacgcgggattgtccacttgcttccggcaggaagttggctcgcatggacgtgatacccgtggtatcttccgggtacatcagttcgaaaaagtggaacagtttgtgctgacctctcctcacgataacaagtcctgggaaatgatggacgagatgattggcaacgcagaacagttctgccaatcgttgggcatcccgtaccgtgtggttaacatcgtttccggtgctctaaatcacgctgcctcaaagaagctggatctggaggcttggtttgccggatccggggcgttcagggagctggtatcgtgcagcaactgtttggactaccaggctcggcggctgttggtgcgctacggccaaacgaagaagatgaacgccgccgtagactttgttcacatgctgaatgccacaatgtgcgccacgactcgagttatttgcgccatcctggagacgcatcaaacggaaacgggagttaaggtcccagagccactgaagaagtacatgcccgagcagtaccgcgatgaaattccgttcgtgaaaccggccccgatcgatgtggaagcggctgcggccgctgcgaagaaagagaaaaagggcggcaaaaaggaaggtgctggcgcataatcaacttgcaacaataataagaatcctagtaagacacagcaatggttgaaagcatttacgaatgacatacgacggtacttttgctagttgcataaaatttatccgcagcaaccgatcggagcgaaagttcattaatttatctcaattcaccgcagcataagatgtacttttaaatcagttaataaattcgaacgcgcatgcttataaggctgctttctgaaacg

SEQ ID NO: 46 - DNA, 1564 bp, Aedes aegypti
aattgctgtgggcaacaaaagcagcttgtgtgtaaaattcgcttcggaacggcagcagcgatggaaaaccgatagggacgaaaaagtgtgtttttccgctgcggaggagtgacctaacaacaatttcatcggaagaggaggaaggtggcggagcaccagcagctgagaaaagtgtaattagcttttctaatcaaagtcaatttcgatttgcgattacggtattctagcttcggagtgtgattagggattttttctggtctgggtggttcctaaaacttcggaagaccacttggctgacattctgccaaagggaaaacaaaaatgtcgaacaagacaaacaacccgaaaagacgagaagtgactggctcgtcttcatcaaattcctccatttcatcggtcggagctggtgataatggaatttccgcagatttggcctccttgttcgagtgtccagtttgtttcgattacgtcctgccgccgattctacagtgtcaaagtggtcacttggtgtgcaccagctgccgatcgaaattgacctgttgtcctacatgccggggctctctgggcaacatacggaacctggccatggaaaaggtggcatccaatgtaaaatttccctgcaaacattctaatcacggttgcaccgtttcgttggtctacaccgagaaaacggaacacgaggaagcctgtgagttccgtccgtatctttgcccgtgtccgggtgcttcctgcaaatggcaaggatcgcttgattatgttatgccccatttgatgatgtcccacaaaagcattacaacgctccagggggaagatattgtatttctcgccacggatattaatcttccgggcgccgtagactgggttatgatgcaatcctgcttcggtcaccactttatgctggtgttggagaagcaggagaaatatgacggacatcagcagttctacgcaattgttcagcttattggatctcgtaaggaagcggagaatttcgcctaccgattggaactgaatgggaatcggcgccggttgacatgggaagcgatgccacgatccattcacgagggtgtggccagtgcgatcctcaactcggactgtctggtgttcgatacctccatcgcgcaactctttgcagacaatggaaacctcggaataaacgtgacaatttccgtcgtttgaaaaggttgccccttttgttgactttcaccctactttattaatctatacaacattaatttatcgatcgcgaaaacaagcatcattgcacattcatacatttaaactgacgttgatagtgattattgtggtgacgaaattacgaaaattcgatatcgatcacaatcatccccacattacattacaatacaaattgtgtagatataaacgcaatatcggtagggttctcgataagaaaaaaacgcgtttcagggatccaccctgcagatagaggaaagacagtgcgaactcaacgcgattatagcaaagattttcggtttgcgtgcatattagctggtagtgtcaggatgtaacattttcaagtcaataaacaaattttattgaattaatc

SEQ ID NO: 47 - DNA, 3519 bp, Aedes aegypti
gtttcagactagttggaagagtcatcgtttgttcggtcggtttttctcatcagcaagtttttcgacgggtgaagaaaagaaagctcatcagcggaaacgaaaagaaaattccattgtgacgattgatttagcagttgaacaggatcaagttcagattcgtcaagtgatactcgaagtagcgatctagttccggataccatggccgaaggaaagaatgaggatttggcgaccgcgattctgaagcggaaggagcgcccgaaccgtttgatcgtggacgaagccggcaacgatgacaactcggtcatttcgctgtcccaggcgaagatggacgaattgcagctgttccgtggagacaccgtcctgctgaagggcaaacgccgcaaggaaacggtttgcatcgtcttgtccgacgacaactgcccggacgagaagatccgcatgaaccgcgtggtgcgcaataatctgcgtgtgcgcttgggggacgtcgtgtccattcagtcttgcccggatgtcaagtatggcaagcgagtgcacatcttgcccatcgacgacaccgttgagggtctgaccggtaatctgttcgatgtgtatctgcgtccgtacttcctggaagcttaccggcccatccacagcgatgacacgtttatcgtgcgcggaggaatgcgtgccgttgagttcaaggtggtcggagctgatccgtcgccatactgtattgtggccccggaaacggttatccactgtgagggtgatccgatcaagcgcgaagaggaagaggaagcgctgaatgcggtcggttacgatgatatcggtggctgccgcaagcagttggcccaaatcaaggaaatggttgagcttccgttgagacatccttcgctgttcaaggcgatcggtgtgaaacctccaagaggtattcttatgtacggtccacccggaacaggtaagaccttgatcgctcgtgccgttgccaacgaaacgggcgctttcttcttcctgatcaacggtccggaaattatgtccaaattggccggagaatcggaatccaatctgcgtaaggcctttgaggaagctgaaaagaaatctccggctatcatcttcatcgacgaattggatgccattgcaccaaaacgtgagaagacccacggtgaggtggaacgtcgtatcgtgtcgcagctgttgacgcttatggatggtatgaagaagagttctcatgtgattgtgatggcggccactaatcggcccaactcgattgaccctgcattgcgtcgtttcggacgtttcgatcgtgaaattgacatcggaattccggacgccaccggacgactggaagtgctgagaattcactccaaaaacatgaaattggctgatgacgtagatctggaacagattgccgccgaatcgcacggtcatgttggtgctgatttggcatccctgtgctcggaagccgctctgcagcagattcgtgaaaagatggacttgatcgatttggaggatgaccagatcgacgctgaagtgttgaactcgttggccgtttcgatggagaacttccgttacgctatgaccaaatcgagcccgtctgctttgcgtgaaactgtcgtcgaagttccgaacaccacctggcacgatatcggaggtctggagaatgtcaagcgtgagctgcaagaattggttcaatatccggtggagcatccagacaagttcttgaagtttggtatgcaaccgtcgcgtggtgtgcttttctacggaccacccggttgcggtaaaaccctgctggccaaggccattgccaacgagtgccaggctaatttcatctcggttaagggacccgaactgttgaccatgtggttcggtgagtccgaggccaacgttcgtgacatcttcgacaaggctcgttcggcttcaccttgcgtgttgttcttcgatgagttggacagtatcgccaaatcgcgaggtggcaacgtgggagatgctggtggtgccgctgatcgtgtcatcaatcaaattttgactgaaatggacggtatgggtgccaagaagaacgtctttatcatcggtgccaccaatcgtccggacattatcgatccggccatcttgcgtccgggtcgtctcgatcagttgatctacattccgctgccggacgacaagtcccgtgaggctatcctgaaggcaaacttgcgcaagagcccggtggccggcgatgttgacttgacgtacgtggccaaggtgactcagggattctccggtgccgatttgactgaaatttgccaacgtgcctgcaagttggccatccgtcaggcaattgaagccgaaattcgtcgggagcgggagcgcaccgaaggacagagctcggcgatggatatggacgaggatgatccagtgccgaacatcacccgggcgcacttcgaagaggcaatgaagtttgcccgtcggtcggtgtccgataacgatattcgcaagtacgaaatgtttgcgcaaacgctacagcagtcccgtggatttggaagcaacttcagattcccaggcggtcagagtggttccagctcacagggacagggatcaagtcaaccgacgagcaatccagccgacaacggagatgacgatctctacagttagactgctgcatgcgccatttgcgttagacagcaatttttgatccgtagaatatcaaatgagcgagaatgtccatccgtaacgcgcccattcccaattgctagcagcagatcagatatccatcaaaataacataaaacacaacacacacaagcaaacaacccgcggaggtcgatcaactattgacttgtacactctctagctctgccctcatttccattacccggctggaatcggccagcaaaatggaacgccaatcttacatgggcgacagagggccatccgttataaatgattgcatacaaccagattgaaaaattctaatctttcttaaaatacgaatatttaccgtaagggaagttatctttttttatcaaaacagtaaaacttaagcaagatctagctgaggaagagaaacaatatggttggtcaagtagagaagtccttgtctttctgtctaatctatcctgtttatatttattggatcattaaataacaatcccacccctttgttgaactctacttacaaaaattttaagttttacttcacctcaatgcgtatttttctccccgactacctacagttttccttttaaacaaactcgttcaatgatatagtactttagcataattcgaacacatattatccaatcatcgagcagaaggggaggtgaacctgttctgaacacattgatgctttggtagactgtcgtggatataatggggagatatcgttggaagatctcttttccgaattcgacgccaaagcgtcattgattatttctatttaggaaccacactctattcttacttaggatgcgcattagctctaggtatagtagtgactattggtcagagagtctggaactgtaaggtgattaaatatgaaaacatgaaaaaaaagataataaaa

SEQ ID NO: 48 - DNA, 1639 bp, Aedes aegypti
ctgtcaaatcgttcgcatcgcgtttcgtgttttcggtaaacaaaagttaattagtgaaaagaaaaatccaaatttccgcatcgaaaaaatggaaacaattttcgaaatccaacgccggctgcacgaggagtgcgaccggctggtgatggccatgtccgaggagctgcagacgcccaagaaaacgaccaaggacaaagtgctggccgaccatcggatcaaaatctacctggagcggtaccaaagttgcagcaaatcgctgctggagctctaccaggacaaggacggcgagcgcaagcaggaaatcaccaacatgagcgtgaacgagttcaaggagttttacagccagttcaattcgctggtggagttccatcagaaccacgggaataatgtggccattccggcgtcgattgagttctccaagctgcgggagcaactgaacgatccggcctatctggccgaggtggtcaagttcagcgacgtggagaactacggccagtatttggatctgcacgagtgtttcgataattacgtcaatctgaagggcgtggacaaaatcgattacattacgtatctgtcggagtttaaccggtttgcggacgttccccggaagcagaagaacgtcaagtacaagaagtacctggagctgttgcacgactatctgcaggggttcataacgaggagccggccgctgtttttcgagctggaacatacggtgaagcggaacgagttgcagttcgaggatttgtggaagaatggggaggccccggggtgggagcgcgggaaggatgtggaggaggacgcgatgatcaatttgaacgagttcgggaagtgggaggatttgacgtatttggggctggatcggcttaagtcggcgctgcaggcaataggaatgaaatgtggcggaaccctggaggaacgcgcccagcgtctattcgcctgcaaggaggacaagaacaaggagaacgaacacaaacggctgatgtacaaccagaaggacaaggacatcgccctgctggagtacaaaatcaccaaactggccgaactggtcgatgatcagatctacgaaacgaagatcaacctgcagcggaagcaggcccgttacacgctggacgaaagcgacgaggacagtatggacgaagtagaatccgatgacgacgacggaattccctacaatccgaagaatctcccgctcggatacgatggcaaaccgatcccttactggttgtacaagctgcatcagttgcactttacgtacgagtgcgaaatctgcggcaactacaagtacaacgggccgaaggctttccagaaccacttctcggagtggcgacatgcgcacggaatgcgatgcctcggaattcccaacacggcccactttgccaacattaccaagattgaggacgcgctgatgctgtgggacaaggttaaggagcagaccttctccaagatgtgggtccctgccaatgaggaggagtttgaggattcgaggggcaacattctcagcaagaaggtctatctggatctgcagaagcagggattgctgtaggtgggcgtttagatccggtaagaatcattgtgtatgtgcatttctaatctaataataacggatggtgtggcgccaacattactaaagagagaggaa

SEQ ID NO: 49 - DNA, 1688 bp, Aedes aegypti
atgcatattttgctagctttgactgtccttgtacgaaatttggccgaaaagaacttgaaattaatccgccttccccccgtttcaggtatcgacacattcggactggggttgttcctgcagaagcgcatgatcaaacgtatgatcgcttcgtacgtcggtgagaatgccgaattcgaacgtcagtacctgaccggtgagttggagctggaactcactccccagggaactctggcggaaagaatccgcgccggcggtgccggtgtgccagccttcttcacacccacggccttcggaaccctggtgcacgagggaggtgctccgatcaagtacggtaaggatggaaccgttgaaattgccagccaaccgcggcatatgcagatgttcaacggaaagccatacatcatggaggaagctattactggggacttcgctctaatcaaggcgcacattgccgacgaggctggcaatttgattttcaacaaatcggcgcgaaacttcaacccaactatgtgcaaggcagccaaaactaccattgttgaggtggagaagattgttccggtcggtactctggatccggatcaggttcatatgccgagcgtgttcgtacaccgtatcatcaagggagccaagtacgagaaaccaatcgagcggttacgaattcgtgaaccaaagaaagtggcctctgttgtggcgtccactccagcagcgaaacagcgcgaacgcatcgtgaagcgtgttgccctggagtacaaggatggcatgcacatcaatttgggaatcggtattccagtgctgtcgtccaactacatcaagggaatcaacgttctgctacagtccgagaacggtattctgggactggggccgttccctgaaaaacacgaagtcgatcctgacctgatcaacgccggtaaggagagcgtcaccgttgtgcctggagcttcctacttctcgtcggacgacagttttgcgatgatccgcggaggacatatcgatattactgtcctcggtgccatgcaggtttcgcagttcggtgacctggccaactggatgattcccggtcgtctggtgaagggcatgggaggagctatggatctggtggccgcccccgacaccaagtgcatcgtgacaatggaacacaccgccaaggacggttcgcacaaaattctcgccgactgtacgctcccggtgactggtaagaactgcgtcgacatgatcatcaccgagaaggccgtcttcgacgtggaccaggaacggggcttgatcctgaaggaaattgccgacggtgtcagcgttgaggaagtcatcaccagcacggggtgcaattttgaagtgtcgcccgatctgaagccaatgggacaggtcgaagaataaggtcagagatcgtgagtgtttgtgtgtctgtttttatggaatgatattctatatacacgatagctgtttgatggtatctcaagaagaaggttgtaatcgcgtctagattacaaatatttttagggactcaggaaaaagcatttgtttctttgaacagtgtcgtctacctgttgctttggttgcctcacaaagattattatagtactagggtgtaacacggagtgtttaaaactcatttctgctgttacaattgttaagttatccgtacggccgaattgaacatagtctctttttaatacacagtatgctgaacgctg

SEQ ID NO: 50 - DNA, 21640 bp, Aedes aegypti
atggacgagaagatcaatctgccgtcgacgccgttgcgagatatcggtgaaccaggcaaaccagcggtcatcgttgacttccaggagagctactccgccgttgaagatcaaaccggttacatctcggtgcaggtcgaaggtaatcccgctccgacttggaagttcttcaagggtatcaccgagctcatcgatggcggtcgctacaagcatcacaccgatggcgaaagcaacaccatcacgctgtgcatccgtaaggtcaaacccaacgacgaaggcaagtacaaggtcgtggtttcaaacccgcacggtgaggattcggccgaggtgcaactgtatgtgtctgactccagcggtatggacttccgtgccatgttgaagaagcgaaagtacgccaagtgggccaaggagaaggaagaaatggtcatcgatctcaaagaggtcgagaaaccgaagccacagttgaagaaagtggaaagaaaacaagataccttctccaggcctctggtggacatcacttgcaaggaaggtcgcgaaaagaaggtgatcttcgaatgcgcctttaccaagccgaatgccaaggccaagtggatgctgcgtaaggatgaaatcttcaccggtcccaagtacaagttcaagaccgaaggagacgtgtacagctgtcttataatcaatcccaaggtggaagacagtggtaagtacacgatagagattgctggcatctcctgcttcgcctacctgaccgtcgaggaagctgatccggtgtacaagttcacgaagactctcaagaagaacgaaaagggcttcatcacgcacgacacccacctggagtgtgccgttgataactcgttggcgccgatctcctggtggaagggcgaaaccaaactggagaacgacggcgagaaatacgtcatcggaaaggatctcaacggtacggtcactctgatcatcaagaactccgttctggaagatgccgacacctacacctgtaagatcgaaaagcaaacggataaaaccgagaccaagctcaagatcctggagtacaactacaagttcaccaaagtgctcaaaagccaacagctgttcgtcaaggatacggttacgctggcttgcgagttagatcacgtcctcggcacagtcgaatggtttaagggagacgaaaagatcgtggagagcgacaaggtacagatcatcaaggatggtcgcaagcacaaattggtgctgaaggacgtcgccaaggccgacagtggaatgtaccgatgtgtgagcaatgccgacaaaaccgaagctgaaatctttgttaaacgtcccaataagttcatgaagaagctcaaggataccaccggagacgaaacgaaagagtgcgtgctcgacattcaggttcaagacgaggaggctgatgtacaattcttcctcggcgaaactgaaatcgtcaagaacgatcgcattgacatcgtttcgcccggtgacggaacgtggaagctggtctacaaaaagctggagctgggtgacgctggtgagatcacctgcgtctgcggtccactaaccagcaagtgtacgctgaaggtcaacaagaaggaaacgaaaccaaaattcgaggtaccacctaaggtggaaacacctgccaaggtggagaaggtcctagaggttccattcacaaccggtgagtcccgccaatctaaggtcaccgccaaagtgttcaaagttggtaagccggttacaccggctgaagttgatatagttgtagagaatgataagctcgtgctgaagttcaaaaagaccgagttccaggactcgggtgaatttaagatcgtgctggaaaatgctaccggcgccgaagaacataccaccaatgttgtattccaggacaaaccgcaagcgccgcaggacatcgagtgtaccaacatcttccagacgcgatgcgtggtcaagtggaaagcccccgtcaatgatggtggcgctccactgaccaagtacgttctcgaacggcaagatgtgttcaaacgatccggctgggacaaacttgaggacgtacctggtgatcagaccaaattctccgtcacagatcttacgcctggtcgacactacaagttccgtgtcaaggccgtcaacaaaatgggcgaatcagactactgtagcatggaggaggacatcatcgccaaggatccgtggaatgaaccggatcctccaagagacttggtgatctccaattgggacaaggaattcgttgacctcgcctggaaagtgccgaaatctgatggtggagcaccaatccaaagctacattgtcgagtacaaaccgtacactgcagccaattggaagcaatatgaaacagttgggccaactcagctgaaaactacagtcaagaacctaactgtaggcgaaacgtttgaattccgtgtgaaagccaccaatcagggaggcgagagtaagccaagcaacagtaccgagccactcaagatcagagatcgctacgtcaaacctttcattgagggcgatggtatcaagccaatcactctgaagaagggtcagaccattcgatactatgtacagtacggaggagaaccagaacctgaggtcgtttgggagaaggacgacattctcattatctgtgactccgagaagcgtaagacgatcgatgttgaatcatgcgctacgactctcaatgttcgacattccgtgcgtgctgattccggcacctacaaactgaaactcaagaacagtagcggagaattcgtaacggcagccaaggtgttggttctggatgttccctcacagcccgttggtccgatcaagattgaaaaggcaagatccaatcacgtggtcatcagctggcagcctcctgaagataccggaggttgtccactaaccgggtacctcctagagaagatggacgttgagaacggaacctggctccaggccggtgaatgtggtcccgaacaactcaccttcgacttccagcatttacagaagggaaggaagttcgagtttagagttaaggcctacaacaaggagggtgaatctacgcctttggagactttgctagcggtaaaaacggtcaacccgtacgatcccccagaagcacccggcaaaccggccgtcgatgactacggcgtggactttgtcgaactcaagtgggcagcgccagagaaggatggtggacgacccgtcacgcactacatcatcgagtgcaaaaacaagttcatgacagactggggcgagtgcgccaagaccgaaacacccgacaccgtctgcaaggtgcacggcctgaaggagaaggttgtctaccagttccgggttcgcgcagtcaacaagggtggcacttccaagccttccgaacctagcgaaaaccacaccgtcaaacacaagaacctgaaacctcgcatcgaccgaacgaacctgaagaacctcaccatcaaggttggcaagtccatgctttggtcggttgacgtgaagggtgagccagagccggacatctcctggagctggcgtgataacattccactcactgtgagcgagaacatcaagatcgagacaggcaactaccacacgaacttctcgatcaaggatgccaagcgtgccgatacgggcaagtacaagattctggctacgaacgcctccggaaaggatgaggctgaagtagagctggttgttcttggagctcctgggaagtgccaaggcaagttggaggtatccaacgtgaccaagaagggtctgaagctgaagtggaagaaacctctggacgatggtggttgtccgatcaaggagtacaagatcgaaaagttgaagaaccgcaatggcaaatgggtccgctgtggcacggtcaagggaggaccggaaatcctcgaagccgacatcaccgggcttgacgagggtgcaacctacaaattccgtgtgttcggtgtaaacgatgaaggagaatcggaaccgctggaatcggaggaggttgtggccaagaatccatttgacgagccatggaaaccaggtcaacctgagattgtcgatttcgacaacaagtccgtcaagctcaagtgggctccaccgaagtcggatggaggtgctcccattactcagtacgtcattcagaagaaggaacgcttcaaggactgggaagacgtcaaggaagtccctggacacgagacaacggccacggttgaggatctgaaagagaacaccgagcttcagttccgtattgttgcagtcaacaaagctggacgctctccagaatcggatccgacggccactcataaggtgaagcaccgtgcactgaagccacgtatcgatcgtaccaacttgaagccgattgtggtccgtggaggcaagatggttcactacgacgtcaacgtcaagggtgaacctgagccggaaattacttgggtactcaaggaaaagccagtatttgctgacgatcattacgagatcatcaacaaggattacaacacaaagttcaccattaaggacagcatgcgtagcaagcacagtggcgtgtatgaaattatcgcaaagaacgaacatggtatggacaaggagaaggttgagatcacggtactggcaagcccaagtaaaccaaagggaccgctggaagttaaggacgtcaccaagaacggctgcaaactcaagtggaagaagcctgaagacgatggtggtaaaccaatcactggataccagctggagaagtacgatcagaaggttggccgctgggtgccgattggaaagactccaggagacaccgaagagttcgacgttaccggattacaagaaggacagcactacaagttccgcgtcaaggccatcaacgacgaaggcgaatccgaaccactggaaaccgaggagtatacagttgcaaagaatcccttcgataaaccaaaggctccaaccgatctggttattaacgattgggataactcaagtgtaacgctccagtggaagcgtccaagctcggatggtggagcacccatcagtggatacttcatcgagaagaaggaacgtggcgaaaccaaatgggagccagcgctcacgacgtacagtccagaatgtcaagccaagattcctgatctgccagagaaacgtacctatcagttccgcgtcagtgccatcaataaggcaggcactggtgaagcttcggatccaactggcttccacactgtcaaacatcgttacttgcgtccacgcatcgatcgtaccaacctgacaccgatcaccatcaaggccggtctgtctgtgcagtacgacatcgatatcgaaggtgaacctgccccgaccgtcaagtggttccacggagacaaggaagttgtcaccgatgccgactacaagatcgacaacgtcgactacaacaccaagttcttcatcatgcgtggccgtcgcaacctgagcggcaaatacacgatcgttgccaccaactcgcagggtgaggaccgtgccgaagtcgagattaccattcttagcaagccaggaactcccgaaggaccactggaagcaagtgaagtgcacaagcacggatgcaagctcaagtggaagcctccactggacgatggtggtatgccgatcgatggctacgagatcgaaaaactggatccactaacgggacaatggattccgtgtggccagagcagtactccggaggccaacatttccggtctgcaggaaggcaaacagtacaagttccgtgtcaaggcgttcaataaggaaggtgacagtgagcctctggagatggagaccattgtgattgccaaggatccattcagcgagccaagtaagccgggccgtcctacgcctacagactggggaaaggactttgtcgatttggagtggaccaaaccgaaatcagatggtggtgctcctattacggagtacatcatccagaagcgagacaagtctagccgtaaatggcaggacgcagctaccgttagcggtgatcgaactcgtggcaccgtcgaagatgtcgaagaaggccacgagtatgagttccgagtgattgcggtcaataaggctggaccatcggaaccgagcgatatctccgatagcgtagttgctaagccacgcaacttggctccaagaatcgatcgcaagaatttggacaagaaggttctccgtttcggtcagctcctgaacgtagaagccgacgttacgggtgaaccagcgccacagatcacatgggagctcaagggcaaacctatcactggaaaggaagacgaacgcatccggctagataacgaagattacaagactaacttgattattagaaacttgaaacgttccgattcaggcatttataaagttactgctaagaacaaaaatggtacggacaccgtcgagatggagttggtggtattggcaaagccttcgaagtgtatggggccactgaaggtatcggatgtgacggcagagggttgtaaacttgcctggctgccaccggaggatgatggaggtgagccagttcaagcatacgtcgttgaacgtatggatgtcgatagcggccgatggattcaggtctgtgaaacacgtttccctgaagctgacgtgagcggactgcaagaaggcaaggactacatgttccgcgtgaaggctgttaacagtgagggcgaatctgaaccactggaaaccgaaaccagtactcgggctaagaacccctacgacgcgccaagcgcacctggaaaaccgaaggcaaccgactggtccagaaaacacgtcatgctggaatgggctgaaccggaaagcgatggaggtgctccaattaccaagtatattatcgaaaagaaggatatcaacagcactaagtggatgaaggccatggaaaccgatggacccgtcaacaaagctaaggttcaggatctcttcgagggtactacgtatcaattccgcgtaaaggctgttaacaagggtggaccaagtccgtactccccactgtccgatccagtgttggtcaaggatcgcttcgctccaccaagaattgatcgttcaacgctcaagaatatgacactgaagggtggtcaatcgctgcgtcttgactgcaagatcagcggagagcccgctccgactaagtactggttgttgaacaaggctcgggtggagaaggataatcctgaaatccgtgttgaattcgaagactatcgagccaagcttacgatcggaggtgttactcgtgcacacaacggcacctatgagatcaaggccgaaaactcttctggctatgatgagcaccagttcaccatcactgttctggacaaaccaacagctcccgaaggtcctctcaaagtatcgaacgttcacaaagaaggctgttcgctcaagtggaacccaccactagacgatggaggtgtaccaatcgatcattacaacgttgagaaattcgataaggaaacaggacgatgggttccagttggacgcactcccgatacgcacatggacgtaaccaatctggaacctggacaggaatatctgttccgtgtttctgcggtcaacgatgaaggtgtctctgaaccattgtctactgaacagttcatcatggcaaagaatccattcgacgaaccaggcaaaccgggtactccggaagcctatgattgggaccgcaacttcatcgaattgcggtggactccaccagtttgcgatggtggctctccgatcaccaagtacatcgtcgaaaagcgcgaacacggtaccatcaagtggatcagagccgctgaagtcattggcaacaagtgcgaagctaaggtcaccgagttgaacgaaggcgaggtgtacgaattcaaggttcgtgccgtcaacgaagctggccccggtgtctggagtgaccacagcaaaccgatcaccgccaagcctaggaagctccctccgaagattgaccgtcgcaacctgaagaatctgagtgttgccatcggtgagccgttcggatttgacgtcaaaatttccggtgaaccggctccggatgttgactggacgatcaacgatcgcatggtcacggttacgactacgcgcaccatcgacaatgtaccgtacaacagcaagtttgccaacaccaatccggatcgtcgcgattcgggcaagtacgtgatcaaggcaaccaacaagttcggtaccgatcaggtcgaaatcacagtgactgttagatcgaaaccaagtgcgccggaaggcccattggaggttaaggatatgactaaggacagctgcagactggagtggcagaaaccgaaggacgatggtggtgttccaatcgatcactacgttgtcgagaagttcgatccggacaatggcatttggatgacagctggaaaggtcgagtggccgttcacagagttcccggtcgagggtctaatcccaggccatcggtacaagttccgtgtcaaggccgtcaacgcggaaggtgaatccgatccgttggaatctgctggaacctatttggcgaaggatagcttctccgttcccgatacgcccagcgctccgacggtcgttgattggtctgagaaccatgccgtgctcaagtggccagaaccagatgatggtggcagcccaattactggatacatcattgagaagaaggacaagtacagtccaatctgggaaaaggcgtgcgaaaccacttcgccaagcccaacggctactgttggaggcctggtagaaggcaacgagtaccaattccgcgtcattgccgtcaacaaggctggacagtcggatccatcggatgccagtcggacgtttactgccaaaccacgctttgctccaccgaagatcgatcgcagaaccattcgggatatttctatttccgctggatcaatgctcaagttcgacgtcaatgtgtctggtgaaccggcgcccaagtgtgaatggcgcgtcaacaaggccacagtttcgagcgatagacgcctggagatcctcaacacggactacaattccaagttcatccttcgtccggccaaccgaaatgattctggagattatgaaatcacggccaccaactcttcaggacgtgattacgtctgcgttcaggtcactgtcactgacaaacctggagcgcccgaaggaccattgcaagtgtcggatgttacaaaggaaacttgcaagcttaagtggaaacgtccacgcgacgatggtggttgcgatattgaatactaccagatcgaacgctttgacgaagatgccaacgcctgggttccacatgctcgtagcgtagaaactaatgctgacatcagcggactgcagaatggcaagaaatacaagttccgtgtcagtgccgtcaatgctgaaggagagtctaagccactcgaacaggtcggagacttcattgcaaagaatccattcgacgaaccatctgcgcctcagaattgcaaagctaccgactggggtccagacttcgtcaagttggcctggttacctccgatcagcgatggaggatctccgattactggatacgttgttgaagtcaaggacaagtacggcgaatgggaaaagaaaatgcaagtacccgccgatgctacagcggctgaagtgccagatctaatggaaggacagaaatatgaattccgtgttcgtgctgttaacgatgctggtccaggtgctccaagcaatgctactccaccaattatctgcaagccgaagaaccagccaccgaagatcgatcgcaccaacttgatcgatgtgcgtatcaaggctggaaacaatgttgtgtttgacgtcaaggttacgggagaaccaattcccacgaccaaatggttgctgaacaagcgtgaattgaaacagaacgaacgcttcaagattcaggattacgactacaacaccaagatcaccattcgttctgctactcgtggtgaatctggcacctacacaatcgaggctgaaaatgaaaacggcaaagatacggcaactgtatttgtcactgtgttggatgttccaagcccacctggaggtccactgaaggttccagagatcactgccaatggagcaattctggaatggcgtgcaccagaagacgatggtggattgcccatcgataactacatcattgaaaagttggatgaagccaagggaacatgggtgtatgctggagactccggtagcagcaagtgtcaagcggagatcgatggactcatcgaaggacactcgtacaagttccgtgtccgtgctcaaaacaaaatgggcaaatccgaacctctgtcgatggctaacgcagtggttgcaaagaatccattccgtgcaccacaacgaccggagaatctcaccatcacagattacgacaaggattacgtcgagctggaatggaaggctccggagaacgacggaggtgctccaattaccggttacgttgtcgaaaaactcagcaaatactccggagattgggagaaatgcgctgaagttgaaggtgacgcttgcactgccaaggttccagatctgatcgaaggaactgcttatcaattccgtgtcaaggcgatcaaccgtgctggagaaggtgaagccagtaaaccaacggactcacacattgctcgtagcaagaaccaaccaccaaagatcgatcgttactcgttgtccaatgttaagattcgagctggactcacgttcgagtttgacgttcctgtacaaggtgagccagtcccagctaaggaatggacgcacaaggacaatatgatcatcaatactgatcgtgtcaaggttgtctacgaaaactacagaaccaagctgcgtgtgatggatgttaaacgttccgatagcggagtctacaccctcaccgccaagaacaagaacggtattgatatcgctgatgtgaatgtggttgtgttggacgttcctgctccaccagagggtcctatccgtcacgagaacctgtccaagacaggagtcacactgatgtggcgtccaccgaaggacgacggcggttcggagattctgcattacgtcgttgagaaacttgataccgatcaactgcgctggattccggttggcgagaccatttcgaccaaaattcgtccggataatctgatcgagggacattcgtatcagttccgcgtccgtgcggttaacaaacagggtgaatctattccgttgtctacttcgcaaccaattacggccaaggatccctacacgaaaccggacaaacctggcaaacccgttgttgttgactggagcgacaattacgtcacccttgaatggagcattccgaagaaggatggcggatctcctatcaccagctacgttgtcgaaaagaagcctcgctacggagactggaaattcgctggagagtttactgagctattcaagccccacgccaagatcaccgacttggtcaaggacgaagagtatgaattccgtatttgcgcagtcaataaggctggcgtaagcgatcccagcgaatcgtccgatccaattgtgtgcaagtctcgcttcgtgccgccacacttcgacaagaacgctctgaaggatctgatcgtaccggttggcaagaagattgcttataacgtaacggtagaagcatcgccaaacgtaaccgccacttggaaacgcgatggcgttgttattccagaatcccaaagggtcattcgcgaagcttataacaatgaggtttcgctggagattccgttctcgattcgtgaagactgtggtatgtacacgttgatcgtgaagaacagttgtggtgaatactcggcgtcaggacatgttacggtgctggataaaccatcgccgccggaaggaccgctcagaatcaccaatattaccacagagggatgtcatctggaatggaaactgcccaaggacgatggcggcagtccaattacgcactatgtaattgaaaagatggacatgtctcgtggcacgtggtctgcagctggaatgagcacctcgttggccaacgagatttcacgtctaattcacaacaagcgctactcgttcagagtcaaggccgtgaacgaaattggagagtcggagccacttgaatcctcgcatccaattgtggcgaagaacgatttcgaagaaccatcacagccaccgaagccacaggttgtcgactgggatgccaactcggtcagcttggaatggaatgcacccaaatccgatggcggtgctccgatcaccgagtacattgtgcaaaagaaggagaaggacagcccatactggagtactgctggacgcgtgcctggaattcagcgcaacctcaaggttccagatttggccaccgagaccgaatgggagttccgtgttattgctgttaatgctgctggagagtctgagccatcggacgcttcggatgccgtacttactcgatcgcgcttcattgctcccaagatcgttactccgctacgcgacatggttgtcaaggctggtcttatcttccacttagacgtgaacttcactggagaacccgcaccagaagttgtatggaccttgaacggtaagccagtggagagcgataaacgcacaacaatgaccgctgttggccatcacaccattgtgcacaccgttaactgcaaccgtggcgattccggcgactacaaactgaagatcagtaactcgagtggcacggatgaaggtagtttacacttgacagtgctggatcgtccagatccaccagagggcccaatgaactacgaagaaatcacggagaagagcgttacaatctcatggaagcctccaaaggacaatggtggctcggagatcaccgggtatgttgtcgagaagaaggatcttactcacggaggtggatgggtaccggctgtggcctacgtcagtccaaagtatactcacactgtggtgcctcgtctgaacaagggcaacaagtacgaattccgtgtcatggctgaaaatctccaaggacgctcggatggtttgatgagcaagcacccagtcgtggccaaggatcaattcgttgttcctggaccaccaaccaagccagacattacggatagcaactacgactttatcacacttagctggaagcctccgatcagtgatggcggctctagaataagtggatacaacattgaacgaagagatactgccactggacgctggatccaagccaacaagtatccaattccgaacattgagtttacagatactggagttatgcgaggacatcagtacgactaccgtgtatcggccgtcaatgctgctggacagggtcaacctagcgatccatcaagcaaatgctgggctaaaccaatgcaacaggctcctaaactcaatcttgacagctttggcaagcgtacaatcaaggttcgtgctggagaaccaatcatcattacaattccattggttggagctccaattccgactgttgaatggttccgcaacggagttaagatcccggagacctctcgcactaccatcgataccaacagcgaacataccgtcttccgtgtcgagcgtagtgaacgcaaggactcagacacctacaaaatcaaagcatccaaccagtacggagaagacaccagagagttcgaagtcatcgtcgtcgatcgtccacaaccaccacgaaatgtgttcgccttggaaactacccaagataccgttaccctcaactgggacccaccaaaggacgacggtggctcagaaatcaccggatacagtatcgagtacaaagagttcccatccgacaactggaagatggtctacggcactgttcctcgctgtgcgcatactatcaagcatctgaccgaaaatcacgaatacatattccgagtccgtgcagagaacatctacggagcgtcggacccaaccgagagcaagaccatctcgccaaagagccccgatccaccacaaacagtcgacaaaccagctgtggaagattatactccaagctcgtgtaccatctcgtggaaacctccacgtgtgcaaactcgcccggtcactggctatatcgtcgagaagcgtgaacgtggtacaggcgaatgggtgcaagtcaacaactatccaactgtcaacaccacttacactattcctgatctgatggaaggcttccgctacgaattccgtgtcaagtccgtcaatgatgttggtgtcagcaagcctagcgaaccaacagatccaatcactgcacaataccaacgcaagcgaccaaatcaaccagatccaccatcgatcgataagatctcgcgcaacaacgtaaccctctcgtggcgtacgctacgtagggacgctaaggagaagatcaagggctatttgattcaataccgcatcaaggatgaagacaaatggattgattccaacagtgctgccgatttgtgcagcgatcagtcgtaccgcgttgaaaacttggaagagaacaaagaataccagttccgtttgattgccgtcaacgacatcggttcttcggatccatcacggccaagtatttcggtcatcctgcaggaacagcccaacaagccaatgatggatttgcgcaacgttcgcgatattaccgttcgtgcgggtgaggacttcaacattcacatcccgtacacggccttcccgaaaccagtcgccacttggttcgccaacgatgaacaactggacgacaaagatactcgtgtccatcaacagctcaccgatgaagcggccatcttcgttgttaccaacagcaaacgcactgactccaagcagtatcgtctcatgcttaagaacccatctggctatgatatcgctacttgcaacgctaaagttctggaccgaccatctaagccggagaatattggcgttgaatcttacggtggtgagcacctgacgctatgctggaatgcaccactggacgatggcggttctccagttaccaactacgttgttgaaaggaaggagaagaactcatccaactggaccaaggtcagcagctactgtacgaccacctacctcaagattcgcaacctgcgtattaaccaacagtatgaattccgtgtctatgctgaaaacaaatacggaatgtcagagcctgcgcaatccgacaccattattgccaagcatccattcgacgtcccaacgcaacctggaaccccaactcgcgtcgagaccaccgaagattctgtcaccatcacctggatcaaaccggcaagcaatggaggctcaccgatcacgcactacatcgtcgagaaacgaccggctgccgaaggaacctggaccaaggttcaacaaggtaccctcaaggatctcatgtgcaaggtgtctggactcaccgaaaatcgcgaatacattttccgcgtggctgctgtcaatgctgccggacagtcaccattcagcgctgcatcggatccgatcatggtcactgctgccttcaccgctccgaagatcacttcggatattggaatgcgagacattctggtcattgctcgcgatcctttcaagatcattgttccattctcggcctcgccgcgaccagacgcgttctggttggtcaacggaaacgaggtatccagaaacgaaagaatcgaactgcaggtcaccgataccgaagctatcttcaaaaacgacaatgccaagcgcctggacagcggcagctacaccattcatttggtcaactgtgttggcaaagattctgcctcttgccgtgtgctggtggttgataagccaactcctccaattggaccgctggaagtttcggaaatcactccggagtcatgtaccctatcctggaaggtcccgctggacgatggtggcagcccgatcacgaactacattgtcgaacgctacgaaccgctgggttattggaccaaggcaagcagttttgtacgatccactcattacgacaatatgggaatggaaaataacaagcagtatagcttccgcgttcgtgccgagaatcagtacggcattagtgatcctcttatcttggaagagcccatcattgctcgatatccattcaccgtgccagatccaccaaatccaccacgcgtttccgactgggatgccagctacgtcaccgtcacttgggaacgcccactcatggatggtggatctcgtatccagggctatcgcttcgaataccgcgacgttaccgacagcacttggatcgtgtgcaacttcctcattaaggacaacagctaccaagtgtacaaccttgtacctggcagagaatacgaattccgtgtgcgtgcgcagaatgctgctggtgtgagcaagccatcggcttcgtcgaagagattcaagatccatggcaagattacaccgccgtcggcaccaggagccccggccgtcattaaggttggaaagagcttcgttgatctcagctggactccaccggcaagcgatggtggttccagaattactggctactatgtggaacgtcgagacatcggaggagcacgctgggttaaatgtaacgaatcgaatattccggttactgaactcactattaccaatctcattgagggtggagtttacgaattccgtgtctatgctgtcaataactatggagtttcaccaccatcgactgaaacacgctcggtgcgtattggtgaacaactggatactgagaaaccggaatgggtcaagaggctgaagttcagcttggtgccactcggaaaatcggtacaactgacttgcgaagctcacggaaaaccagaaccgacctgcagatggttgcgcaatggaaaggaaatcacccacggaggacagtttgctctggaaagcaagaacggtgtattctctttgcacatctcgaatgttacgtatcgtgacgagggtgactacacttgcgaggcactcaacttcgtcggtgcaattcacacaactgctgcggtgaagatcggagttccaccgaaactggtcaatattccatcggatgtgtacttgatcaagggcgataatgccaaaatcaagcttggtttcagcggagaccacccgatggaggttaacatttccaaggatcgcgagaagctcgtggaaaccgaacatatcaagtacactgtgttcgacgactatgcggttatctatattcgcgatgttgaagactccgataagggagtgtacttggttaacttcaagaacgacagtggcagcgtatcgtgcaatgtgaatgtacatgttactggattgcctggaccaccaactggaccgctgctgatcagccacgttacgaagaacatgtgcaccgtgtcatggaaaccaccgaagtacgatggaggtcgcaagatcacgcattacgttgtcgagcgtcgtgatatcaaatcgcagcactggctaatcgtttctaactacatcaaggaaacgcagttgatcatcaagggactgattgagttctcggaatatctcttccgcgtctcggctgtaaacgaaaacggaatgggtgctccattagaaggagcggatccgatcaaggcccgtggaccatacgatttgccatcgccacctggaattccaatcatccacgaagttggaggcgatttcgtcaacctggaatgggataaaccattctcagatggtggtacccgtattttgggatactggatcgaaaaacgcgaacagggaacggatacctggcagcgtgtcaataccgtttcttgctcgatttgcacgatcaactgtccgaatctggtcgaaggtcgcttctacgagttccgtgttgccgctcagaacgaagtgggatgttccgaattctcgaaggcttcgcagctggtgaaggccgaagatccagacatttgcaaaccaccagaggtcgtgaaaccattgaacacattgacttgtgtccagaacagaaatgtcgagtttgtgtgcaagatcaccggtgttccacgtccaaagatcacctggcacaagggagcccgcgaaatttgctccggatctcggtattacatgtacagcgacggagacatgcaccacctggctatcaacgatgtgttcggcgaagatgcggatgagtacacttgccgtgccgtcaacaagggaggagtcaagtctaccaaggcctcactcattatcaaatcgccaccgaagctcaacgttccaccacgcttccgcgatacggccttcttcgacaatggagaaaacatcgagatcaagattccgttcaccggcttcccgaaaccacgttgccactggaccctcaagggcgaacagatcgagtccggtagccactatcacattgagactcgtgaacgtcatactgttctgactattcgcgatggatcacagatggactcgggcacctacacgatcacgatcgaaaacgaactgggacaggatacggcagacatcaagattcagatcagcgattgccccgataagcccaggaatctcaccgttgatcaaattggactggatcacgttacactcagctggttgccaccgtcttgggatggcggcgcaagcatcaccaactacattgtggagaaacgagaagtgccattatctacatggattcgtgccggaactacacgcttcaaccagctcatcattccacacctgtcgcctggacatcagtacgagttccgtgtgtttgctgagaacgtatatggacgatcggagccatctgatcagactgagcttgttagcttgaaggacttgggcatcaagcctgctaagcgtgtcaagtacgaactggacgaaaatggcaaaccgaaacgtcaaggcaagcgtgaaccaatctctgactacgacacgtacgtatttgacatctactccaaataccacccgaaaccagtggaaatttccaacaagagtgtatacgatctgtatgaaattctggaagaaatcggcacgggtgcgttcggtgtggtacatcgttgccgtgaacgtaagaccggaaacgtgtttgctgccaagttcattccggtgtcacagaattcggaacgtaccttgatccgcaaggaaatcgatatcatgaaccagcttcaccaccgcaagctgatccacctgcacgatgcctttgaagacgatgatgaatttgtgctgatttacgaattcttgtcgggcggtgaattgttcgagagaatcactacagagggttaccgcatgtgcgaacaggagattatcgagtacatgaagcagatctgcgaagccgtcaaatacatgcatgagaagaacatcatccatctggatatcaagccagagaatgtcatgtgccagacgagaaatagcaaccaggtgaaactgattgatttcggattggctacgcgattgaatcctaacgagatggttaagatctcgacgggaactgccgaatttgccgctccggagattgttgaacgtgaaccggttggcttctataccgatatgtgggccgttggtgtgttggcttatgtgttgatcagtggattgtcgccatttgctggtgagactgatattgacaccttgaagaacatcaagcaaggaacgtgggagttcgacgaagtggctttcaaggatgtgtccgaggaatgcaaggactttatccgtcgcttgttgatcaagaacactgaaaagcgtatgacagctcatgagtgtttgatgcatccatggttgagcgacagctataacagctcgacttcattgatctcgatcgagagatacaagaccattcgcgatcacatccgcagaaagtacgacgactgggcatcgtttgtcctgccgctgggtagactgtccgagtactcggctctacgtaaactgctggttacgaagtacaagattcacgagacatcgttcgatcgtcgccaggctgctccacgattcgtcatccgaccacaatcggcattctgctacgaaggccagagctgcaagttctattgccgtgtcattggcgttgctactcctgttgtgacctggtatcataacaaccaagaactgaagcaatctgttaagttcatgaagcgttatgctggtgatgactactacttcatcatcaaccgtgtcaagttggacgaccgaggtgagtacatcatccgtgctgagaaccactacggagctcgtgaggaagttatcttcctgaacgtccacccgatgtcgaaacaagtgccagtctacaaaccggaaacccacaccgttcgtaaacgcgaaccaagcccacgtccattgtggcaagaggaatcggatgctgctccggtgttcacctttgcactgcgtcctcgcgttatgcagatgagagatacttgcaagttgttgtgttgtctcagcggcaaaccagtgcccactgtcaagtggtacaagaatggacgcgaacttagccgatatgaatattcgatgacccatacagatggcgtggtgaccatggaaattatcgacaccaaggttggcgactcgggcgagtacaagtgcgttgctatcaatccactgggcaaggccgagaccagcagcgtagtgatcgtagaggatcggcgtcaccagtcggaactgcctcaggttgaagtaacaaagcccacaatgaagataccggaacctaagccattgccaagtgcttctaagtcattgggaccgccagatgcacgatcgcgacaatctacccgcgaattgatgcctttgcaatcggacgccttgatgcacccaccaaagttcaccaaggagttgaaggatgtgatcgcatcggatggtgaaccactgcagctgaactgccacgtcagcggagaccctctaccgcagattgtttggacaaagaatggcaagaagctcacatcttcggacgttatcgacatcaagtacaaatcaggaattgccagcctacgaatcaacgaactgttcccggaggactccggcacctatgtgtgcacggccaagaactccatgggcgaaacgtcgactcagtgcaagctcgatgttaaaaaagtagccggctcgacaggtcgatcaggtgacaagaagggatcgatggtgaaggccccgatcatcaacaaacacaccgactccggctactacaaggacggatcggaggtggtcatcaagtgtaacattacctgtccggatccgttcaacgtgatctggctgcacgacaaccgcgaaatcaagaacacccccgactttgaatatctgaacgacggagatgtgtactcgttgcacatcccagaaatcttccctgaggacgctggcacgtacacgtgtgaagcgttcaacaagggtggcgaaagtttcagttcctgtaccattacggtgttaggtgagcagaaggaatcgccgaccttcgccaagttcccggcctctttgagtgtgctggacggtgtgaaggccgtgttcacttgcgagaccttcgacgccccaaccaaactcgaatggtacaaggacggtgagccgatcaacgagtcttccaaccgataccgattcgtcaagaaggacaacaagtacacctttaccattgccaagtgttcgttcgaggacattggccagtaccaggtgcgggcggtgacacgccaaggagacgccctggcctccttctcggtcaatgttagtgcgtagggaacctcccccgaactctcaactctctattttagctcgtaaggttgttaggatgttagatagctgcaaccgagaatcaaattttttgtaacttggtttaggatttttgtacttgactttttttttgttagagtctaatgatttttgataagctcaaatcgaatgtcttttgcgtctccatttgtaagtaatatttttgtaaagtattatttatttcttgactaaaaatccgtatgaaccgcgtaagaatccttgagatataggcagtgactttttattgttgatataaaaatgacgaaaaatctacaaaaataataaaaacgacaaagttaattgt

SEQ ID NO: 51 - DNA, 4405 bp, Aedes aegypti
atggagcagtttgaacaacttttaacgtgttgcgtgtgtctggacagataccgcaatccgaaacttttaccatgtcagcactcgttctgcatggagccgtgcatggacggcctcatcgactacgtgaaacggcaggtgaaatgtcccgaatgccgagcagaacaccgcatcccctaccagggagtgcagggcttcccgacgaacgtcacgctgcaacgcttcctggagctgcacatcgagatcactggcgaactgccggatccgacgtctggccaaatcatggaacggtgcaacgtgtgttcagaaaaagcgtactgtgcgtcgtgcgttcactgcgacaagaagatctgcccggactgtaagggagcccacatggacatcctgcggcgcgaaatcaaccgcatcaacaatcagatccggcgcggtttgcatcgtctgaaggaagtccttgcggtggtcgagaagaacgcacagaacctgcagaacaactgcggaagcgtgtcggaggaaatcgatgagatctcccgccggctgcagaaggcactcaaggacaggacagattttctgcgtggcgaaatggacaagtacatatcgacggagctgaagaatgtattgaccatgaaggagaatctggagctggagattgccaacatccagagcaattccgatctggccgagaagttcatgaacgaaggaacggtcgagtgggatgactgtgaactaatggatacgaaggagatattcttgcgaacggtagatttcatcaggaattttgactgcgaaactatggactacagcagaaaggtgcgattcattatgaacattgacccgaacaagctgatcatggaggtttcatcgtacgcggatctgaaactgccgacggattcatctggaacaagccaaagtcagagtatgctgctgcagcctccgtctggtccgggactgatgcgatcgaagagtgatcatcgattggcagctcagttccgccagcaggaagctcaaggatggaatccagatgatgaacctctgcttggtggacgtaagtttggtgaacgaccaatcaaacctgtgcaagagaaagagaagtacggaaatgaatcacggtatggtcgtggaaacgattacgactatgatgatgagccgtccactagatcgaagggacgctttcgatcgaggtttgcccgtagccatcagttggacaacgactcagacaacgagtccaagcaggtccgtttcaacgataaggaagacaataagtcgaacaaggttaccagcactgaagacgtagccaagggtcctctgagtggaatcttccgtcttatggattcgcctcgagtgatgaagcgtttgcaagattcggagaaggggaaaacgaaaaaggccgcacccgtaccaactccaacggttccaaaacccgttactcctgtttccgtgaaaccaaaagtaacgacagccagacaactctctgaagatgatgaaattgcaaagatcaaaaggcaaaacaagggagcatcgacgagttcaacaactacgacaactccaactccagtctctccagtaactaccgaaccggaacgtccagctgccgagcgagtttccgcactgaaggcccgtgtaacagcagctgcagcagccgctgccgccgccaccagtgatgaaagtgacagttctcctgcttcgccaactcggcgatcgtctccgcatgtcgaggcagcaactcccgccccatcgcagcagaagaaacccacccgttcggctagcagtgaatcgagcgaatccagtgaatcgtccagtgcttctcccgttccgacgccaacccgtgtcgaggaaccagtccgaccaaaaccatcgattctgaaaaatgccgaaccggctcgcaataccgcatctccgacccccaaccgctcgtcacccacggagaagaagcctttccagagccgattcctgccacagactcaaactcagcaaccagaaaagaaggaagaatccgaaagcagtagtgaagaggagagctcatcggaagaagaatcctccgaagaagaagaggaagaagagaagccagcacctagaccaactccaacggtcacttcaacagcttcgctccaccgaaccgaacagccaagttcccctctgctgagtcgtgtgcaagcccgggaagctgcagccgctgatactcgaaagacctcccgcgaagaaacccgccccagtggttactccagtccaaccagttaccatcgtagcacgagcacctacgaccgggacgagagccccaagtacggatctccatcgtcctcgtccgctttgcgatctcgaacgaccgcccacgtggaaccggaaccggagaacaaatacggcagctctggatacaccagccggttcctgaacaagagcaagagtacggccgtggtcgcggatgatgatgccaccggagacgactccgacagccgactgggcagcaaccgtagccggtttagcgcgttggccgatcggaggaaccgtttggcccgcagccgctcgtcccacaacttcggcaacgaagacgaggaagacgaaccggtatcgccgaccacctcgtcaccgtcggcctatctcgcttcgagatatggtgcctcttcctccctggcatcgcaaccggccgacctgtcccgcagccgttcgacccacgctctcaagtcccgagaaccatctccagaccgcaacaccggcagcgataaggatggagccgctctcagttcgtgggctcgctacctgaagaacaagtacggcaaccgctccaccaaggacagcaaagacaccccgtccagttcttcactctccgcaacgtcctcctcgttggcctccccgtctacgtcatcgtccgcgtcgtcctcggcagctgcccgacgactcagccttggcctccccctgcgccaaagcgacatcctcagttccgatgatgattcaaaaaacggggtaggctcccctacctctcctacggcaacagcagtagtcggtataccaggggcagcaggtatgtcccctaggactcagtacctgcagaagcgccgacagctgttccagataggaggtcgggggagcgaacccggttccttcacgtggccccgcggcatcgccgtgggcccggacaatagcatcgtggtcgcggactcttccaaccatcgcgtccaggtgttcgattccaacggtatcttcgtgaaagagtttggccagtacggcaatggggacggcgagttcgattgcctggcgggtgttgccgtcaaccggatcggacaattcatcatagccgatagatacaatcaccgcattcaagtgctggatccggctggacgtttcttgcgttcgttcggtagccagggtacggccgatggcaagttcaactatccgtggggcatcaccaccgatgccttaggcttcatctacgtatgtgataaggaaaatcatcgtattcaggtcttccaatcggacggcaccttcatcggtaaatttggcagcggcggcaaggaggaaggccaactcgaacatccacactacattgccgtctccaacacgaatcgtgtcatcgtttccgactcgaataaccatcgtattcagatcttcgacgtcaacggtcgcgttctgactacgttcggaagcgaaggctccgatgaaggccagtttaagttcccaaggggcgtcgcggtcgatgaccagggctacatctgcgtggccgattccggcaacaatcgtattcagatcttccacccagacggcagtttcctgcgggcgttcggttcctggggttccggtgatgccgagttcaagggcctggaaggagtggccatcatgtccaacggcaacatcctggtttgtgaccgggagaaccatcgcgttcaagtgttctaggacgttcgggatttccgttttctgatacagacgtcaattacttcacggaaatctcggatggaattcaaaatcgaacggaaaagttcaatgcgtgccttactcggaatcaatttgcataaaatactgttgggcaatcgagacgacagagacgaatcatgagaagcccgaacgcagcccggaatgccgttatatttcaggcgtcagttgttcggaattattctttggaatcgcgcccaaaacagatttcacaatttacttgttctagtccagtgaatgctttggtaatcattttcttatctattattaatttgcaaacccccgtctataagacacaagttatgttgatgttgttttgcgattttacgctgattggatcgaagattttttgcccaataaaaaattgtaacgatacttattgaatcaaatgtagcgaccgaagtggaaaaatatgagctattgaatctggataatgaaaatgttttagaataataataaagattttgatttttgtgtttgaacatct

SEQ ID NO: 52 - DNA, 1111 bp, Aedes aegypti
taatcatgaaacgcgtagcggctgtggtggcaacaaacgaaatttcagagtttaattaaatttattcctaaaaatcattatatattatcgtcaaaatgagctcaattcagtgccagttatggatgggaagtctggaatcttacatgacggagaacttcattctggcggcattccggaaaatgggcgaagatccccaaacggtgaaactgatgagaaacaaatatacgggagatccagcaggatattgctttgtgagtttcaaaacagatgaagcggcgattgatgccatgcacaagctaaacggcaaaccgattcccggtaccaatccattagttcggttccgcctgaatagcgccacaaacaatcagaacaaagctctgctggccgatcgggagttcagcgtttgggtgggcgatctgagctccgatgtggacgattacagtttgtaccgggtgttctctgccaagtacacttccatcaaaacggccaaggtcatcctggatagctctgggttctcgaagggttacggatttgtcaagttcggactggaggacgaacagaagagcgccctttacgaaatgaacggtttcattggtctgggatgcaaaccgctgaagatttgcaacgcagtaccgaagcctaagaatgaactgggtccagcagggccgacaagttcgacaccaagcgcggccagtctgctaggatacggcactgccacggattattcgcaatactatgacccgtccacgtattggcaaaactacagtgcctggcaaggatactacgacgcaaccggaacggcagactactcagcctatcagatgccagcagcagcggcagtagatgcttctgcgtatcacgcatatgaacagcagcagcagcatcatcatgctcacagtcaggtcgaggatgaagaactaacgctggtggatcacaagtataccctggacgtggagaagttaaaccgagaggttatggaacgggatcggaatttatacgacgccctggaaagctccaagtggatgccggttgaacagctggagattttttaattatgaaccgattgcattttagtttttgcgtgtgaataaaacttctgaatgactttatg

SEQ ID NO: 53 - DNA, 1539 bp, Aedes aegypti
aaaaacgccgtggaccatcgctcatatttgaaacaactataaaatgtagtgccagcagagagttgcaccgtcgcgcactcaaaccatcgtgaaaaacctcaaaaagtgcacagcaaaattgcatcccttgggggctcctctcggtgtgttggtgtacttgtgcaaataaattggcgaaatttaatagtaccttttacctcagtgccagtctaaaccgaggattcgagattgtgtggtccctttcgatataatttagaccgaacagacggccagtcggtcaaacctagttctagatccatctcgccaacagagaatcaagaccgcagtgtgctcaggtgcaaaaagtgctgataaaagttccgtccgttcgaaccacccctcactcttaattcggaaaaagtagcaatggaggatcttgacaagcagcagctggaactgttgagaaacgccttcaacgcgttcgatcaggagaagaagggatgcatcggcacccagatggtgggcaccatcctgagcatgctgggtcaccagctggacgacaagctgctcaaggaaatcatcgacgaggtggacgctgacggttccggagagctggagttcgaagagttcgttaccctggcagcccggttcctggttgaggaggatgccgaagccatgcagcaggagctgaaggaagccttccgtctgtacgacaaggaaggcaacggctacatcaccacccaggtgttgcgcgaaatcctgaaggaactggacgacaacctgaccaacgacgatctggacatgatgatcgaggaaatcgattctgacggttccggaaccgttgatttcgatgaattcatggaagtcatgactggcggagacgactaaaccaactcgcctcgtggtcggttcccccgtccaactcagtgtaccatccaacttttgctagcttaatgttcgttttaatatttaattaccttctactctatctcgttaatgttagcttaaatttccaccttgctctctacttaagcaaagaaaaaaccacgttaccaagtaaacgcagtagcacagaagtcagtatagctagaaacagagatatgaatgtacgtgtagtagacagtgaaaccgttgttaggaatgggcgagagcaaagcttttatttgctaccaccgagggagaaaatcggaaaaataaaacagaagaaaatccattcgatgcacacagtaccagagcttcagcggccggaagtgggggggtggtttgaaattaaacgcgtggccagcagtgtttattgaatcataaactttaatactgaaactcagactattaattgcaaactatctcctcgttcttcgtttccactatcatctatcgaagcgatttaaacttgtaaactcttctgccaccacacccaaaagcagttattctcttgaataactgcacagttcctgggctacgtccggctccgacaggaagctagttttccaactttttcgaaaacagaacttgtattgttgtacagaataaaatcaatttgtatcggataaaatctaacaa

SEQ ID NO: 54 - DNA, 1740 bp, Aedes aegypti
atgcgggaggggctattcatcaaaaccaacaacaattattactgcgccctgtgcagtgccaacggaggcccttctacagctcacaatgtgaaaaccgttgccattcatctgaagaacgatcacaacgagaagatcctaatctgcgagcactgcgatgctgtattccgccggcggacagaatacaatcagcatttggatcagcacgtggcccaggaactgactgacttccggtgtgacgtttgtcaaacgaaattcaacaacattcgagcgcttcggatgcaccggaagaatcacgtcgccacgcccaaagtgtggtcatgtgaggtgtgtcagaaaaagtacagctccaagaatttgctggatgagcatatgaatatgcattcgggtaaacgaccgttcaagtgctctctatgtccgaaggacttcgcttccaagtacaccctcacggctcacatgaaaatccaccaggatcgtgagcgcttgtatagttgcaaggagtgcggcaaaggattctacagtcagaacaatctcatccaacacgagaagattcattccggcgttagggactatcgatgtccggattgtgggaaaacgttcatgtcccagcacaatctggatatccacaaaatcgttcacctcaactacaagccctttatatgtcggacgtgtggcaaagggttcgctcgaaaagcggaaatcaaagatcacgaacgaactcatactggagaacgaccgttcgtgtgcgacatatgtgatgccagcttttctcaacgatcaaatctacaatcgcataaacgggccacacatttcaacgacaaacgatacaagtgcgatatctgcagtcggtgcttcaagcggcgccgtttgctagactatcacataaaagcttgtcacacaggcgaacgtccgtacaaatgcgacgtctgttcggcgacttttgtgtatccggagcactttaagaagcatcagaagattcataccgggtcgaagccattcgcctgcgaagtgtgcagcaaaacgttcaacagtcgagacaaccgaaatgctcatcggttcgtgcacagcgacaaaaagccgtacgaatgtgttacctgcggggcgggattcatgcgcaaaccgcaactgtactcccacatgcaacagcggggccacctgaacgataccatcgtggttaaccagccgaggataaccagtgaagatatgctggaattcgatacgaccactgactcgattggcgatccggttgagtttgaatcgaaggacggcatcatattggaggaagacatcgacgggacacacattctgatgcgggatgagtactacatcgaggaagaagacatcgaagaagaggaagaagaacttgatgaacaagaccacgtgaactcagaagtagctggtcctagcgatcagatggtcaccaacgcgcttcaactggccgacgcgactgagctttccgagtcgactgccttgctggcgtccagcgcaggtttcatcgaagaatcggatatcatcagccacgacggtgacgatgaggagggtatgcagatgatgaagctgaaaataacaaatccaaacggaacggacggaataacctgggtgaactttgtttcggaataaaaaaaaaagtagcgatcgtgggaatcgaaaacaggttgaattacaaccaaagatagtgctaatcggaatttatgttctttgcagaaatggcgagaataaagtgtacatataccaatgcagaat

SEQ ID NO: 55 - DNA, 1508 bp, Culex quinquefasciatus
gcttcctcaaacttttccaatttttgctgatttttcgactttaaaatgggtcaaaatcagtccgccggcgggggtggcgacaagaaggatgacaaggacaagaagaaaaagtacgagcccccgattccgacccgggttggcaagaagaagcgcaaggccaagggaccggacgcggccatgaagctgccgcaggtcactccgcacacccggtgccggctgaagctgctgaagctggagcgcatcaaggactatctgctgatggaggaggagttcatccggaaccaggagcggctgaagccccaggacgagaagaacgaggaggaacggtccaaggtcgatgacctgcggggaactccgatgtcggtggggaacttggaggagattattgacgataatcacgcgatcgtgtcgacttcggtgggcagcgagcattacgtgagtattttgtcgtttgtggacaaagaccagctcgagccgggttgttccgtgctgctgaaccacaaagttcacgccgtggtgggtgttttgggggatgacaccgacccgatggtgacggtgatgaagctggagaaggcaccgcaggagacgtacgcggacattggtgggttggacacgcaaatccaggaaattaaggaatctgttgaacttccgctgacccatccggagtactacgaggagatgggaattaagcccccgaagggtgtcattctgtacggaccgccgggaaccgggaagaccctgctggcgaaggccgtggccaatcaaacgtcggcgacgttcctgcgagtggtcgggtcggaactgattcagaaatatctcggcgatggtccgaagctggttcgcgagttgttccgtgtggccgaggagcacgcgccgtcgattgtgtttatcgacgaaattgacgccgtcggaaccaaacggtacgattcgaattcgggtggcgagcgtgaaatccagcgaaccatgttggaactgctgaaccagctggacgggtttgattcgcgcggtgacgtcaaagtcatcatggccaccaaccgtatcgagacgctcgatccggccctgatccgtccgggacgaattgaccggaagattgagttccccctgcccgacgaaaagaccaagcggcgcatcttcaacatccacacggcgcggatgacgctggccgaggacgtgaacctgtcggagctgattatggccaaggacgatctgtccggggcggacatcaaggcgatctgtaccgaggcggggctgatggcactgcgcgagcgccgcatgaaggtcaccaacgaagactttaagaaatccaaggagagtgttctgtaccgcaagaaggagggcacccccgagggactatatctgtaggcgcgtgtttcactaattataaactattcattttgcattagcccaacacctctttcctgtccgtattaaaagtaagcagggttgcttttgtgtaatcggcaaagaaaaaaaaacctcaataaaaaccattctggcgagagtgaatc

SEQ ID NO: 56 - DNA, 1368 bp, Culex quinquefasciatus
atggcgggaaccctggaggacaagtcgatctgggaggacggtgaggaaacgctcggcgaggaggtgctccggatgcccacggacgaaatcgtcagccggaccaggttgatggacaatgagatcaaaattatgaagagcgaagtgatgcggattacgcacgagctgcagacgcaaaacgaaaagattaaggacaacacggaaaagataaaggtgaacaaaacgctgccgtatttggtgtcgaacgtgattgagctgctggacgtggacccgcaggaggaggaggacgacggggcggtggtggtgctggattcgcagcggaagggcaagtgcgccgtcatcaagacttcgacccggcagacgtactttttgcccgtgattgggctcgtcgatccggagaagctgaagccgggcgatttggtgggcgtgaacaaggactcgtacctcatcctggagacacttccggccgagtacgatgcgcgcgtcaaggcgatggaggtggacgaacggcccaccgaacagtactcggacattggcgggttggacaaacaaatccaggaactgatcgaagccgtcgtgctgccgatgacgcacaaggacaagtttaagaacctgggaattcatccgccgaagggagtgttgctttatggacctcccggaacgggaaaaacgctgctggctcgtgcctgcgcggcgcaaacaaagtcgaccttcctgaagctggccggtccgcagctggtgcagatgttcatcggtgacggcgccaagctcgtccgggacgcgttcgcactggccaaggaaaagtcgccggcgatcatcttcatcgacgagttggacgccatcggcacgaaacgtttcgactcggagaaggccggagatcgcgaggtgcagcgaaccatgttggagctgctcaaccagctggacgggttcagttcgacggcggacatcaaggtgatcgccgccaccaaccgggtggacattctcgatccggcactgctgcgttcgggtcgattggatcgaaagatcgaattcccgcacccgaacgaggaggcgcgcgcccgcatcatgcagattcactcgcgcaagatgaacgtcagcccggacgtgaactttgaggagctggcccggtccacggacgattttaacggggcccagtgcaaggccgtgtgcgtcgaggccggtatgattgcgctgcgtcggtcggccgtcgccgtcacccatgaggactttatggacgccatcatggaggtgcaggccaagaagaaggccaaccttaactattatgcttaggaagaagtttcaactttctttatattgtatcgatttgctgaatttgaatgctaacgtttagtaataaaataccgtctaatc

SEQ ID NO: 57 - DNA, 631 bp, Culex quinquefasciatus
ctttgctagtgtcgagcacacattcaatttttctgccagctaaacaatgtcgaaaagaggacgaggaggatccgcgggaggaaagttccgcatctcgctgggtctgccagtcggagccgtcatcaactgcgccgacaacacaggtgccaagaacctgtacgtgatcgcagtccatggcatccgtggtcgtctgaaccgtctgcccgctgctggcgtcggcgacatgttcgtggccaccgtcaagaagggtaagccggaactccgtaagaaggtcatgcccgcggtcgtgatccggcagcggaaaccgttccgcaggcgagacggtgtcttcctatactttgaggacaacgccggggtcatagtgaacaacaagggcgaaatgaagggctcggccatcaccggtcccgtggcgaaggaatgtgccgatctgtggccccgtatcgcgtcgaacgccggttcgatagcgtaaggtgacggcgcggtttgaaatggcaggagaatttgtttttttgctggatgagatgttttgtggacagtaacatcaaggaagagcgagaatcgggatgcggatattggaacgaacaataaaaggccacacagaatggaagtgagaaaagttcaaaacactaaa

SEQ ID NO: 58 - DNA, 1605 bp, Culex quinquefasciatus
atgagtatgagttcgtacaccgagagcagttccgaggaggacgatctgtcgccgcgggacaaggtccagcagaactcgaagggattcgcggacttttgcgtgcgcaacatcaaacagcactcgttcggacggcacgagatcgagatcgcggaacaggagatgcccgggatcatggcgttgcggaagcaagcgctggacgacaaaccgctcaaggggtcgaacattgtcggctgtacgcacatcaacgcccagacggccgtcctcatcgaaacgctgatcagcctgggcgccaacgtcagatgggccgcgtgcaatatctactcgacgcagaatgaagtggcggcggccctggcggagagtggcgtccccatctttgcctggcgcggcgagatcgaggaggacttttggtggtgcatcgacaagtgcgtgcacgcggaaaactggcaaccgaacatgatcctcgacgacggcggggacgcgacgcacctgatgctgaaaaagtaccccgtcatgttcaagatgatcaaggggatcgtggacgagagcgtgacgggggtgcaccgcctctaccagctgtccaagacgggcaagctgacggtgccggcgatgaacgtcaaggacgccatcaccaagaccaagtttgacagtctgtacagctgcaaggagtccgtcatcgatagcttgaagcgcgccaccgacatcatgatcggcggcaaacaggtggtcctctgcgggtacggcgaggtcggcaagggctgcgcccaggccctcaagggtctcggctgtatcgtgtacgtgaccgagatcgacccgatctgtgccctgcaggcctgcatggacggcttccgtgtggtcaaactaaacgaggtgatacggaccgttgacgtcgtgatcacgtgcaccggcaacaagaacgtcgtcacccgtgagcacatggacaagatgaagaacggctgcatcgtgtgcaacatgggtcactccaacacggagatcgacgtcaacagtctgcggacctcggagctgcagtgggagaagatgcgctcccaggtcgatcacatcatttggcctggcccagacgggaagcggatcatcctgctggccgagggccgcctcgttaacctgtcctgctcaagcgtgtcgtcgttcgtggcgtcgatcacggcggccacccaggcgctggcgctgatcgagctgtttaacgcgccgcccgggcggtacaaggccgacgtgtacctgctgccgaagaagatggacgagtacgtggccagcctgcacctgcccacgctggacgctcacctgacggagctgtccgacgagcaggcccgctacatgggcctcaacaaggccggtccgttcaagccgaactattacaggtattagtacgttttttatacaaagcgaaagaaagaaggaggaggggaggaaggaaggaaggtgcgcgcattttatggaggactaaaagagagaaagaagtatttcgtatttcgtgagcgagttcacgagaaaaatgcaaaagagagagagccggctattgtttattttaccacttttactttacaataaagcaaaactattggaatctaatttaaagtgcagcaaacacaa

SEQ ID NO: 59 - DNA, 1616 bp, Culex quinquefasciatus
atggccaacccgaatccggagatcaagtgcaccaagttgttcatcaacaacgagtttgtggacgccgttagcgggaagactttccccacaatcaacccgtcgaccgggactaaaatcgttgatgtggccgagggtgacaaggccgacgtggagttggccgtgaaggccgccaaggccgctttcgagcgcaagtccgtgtggcgccagatggacgcttcggcgcgcggcaagctgctgaacaagttggccgacctgatggaacgcgacatgcactatcttgcctcgctggagtcgctcgataacggcaaaccgtacatgaacgccgtgtacgatgtgtacgggtcggtgaactgtctgcggtactacgccggctggacggacaagatctgcggcgacacggtgccctcggatgggcctcatcttacgtacacgaggaaggaaccggtgggcgtggtcgggcagatcattccgtggaactacccaatgctgatgttggcctggaagtggggacctgcgctggccgcgggttgcacgatcgtgatgaaaccggcagagcagactccgttgacggcgctgtatctgtgctcgctcgttaaggaggcgggcttcccggcgggcgtggtcaacatggttcccgggtatggacctacggctggaaatgccatcgtcatgcatccggacattaggaaggtggcgttcacggggtcggttgaggtcggtaagctgatcatggccggggcggccgtcaacctgaaaaaggtttcgctggaactgggcggcaagagcccgctggtgatctgcgacgatgttgatgtggacgaagcggctcaaattgcgtacgccggagtgttcgagaacatgggccagtgctgcatcgcggcgacgcgaaccttcgtgcaggagggtatctacgatgcgttcgttgcgaaagccaccgaactggcaaaggcccgcaaggtgggcaatccgttcggacagggagttcagcacggcccccagatcgacgacacgcagttcaagaaaatcctcggatacatcgaaaccggcaagaaggaaggtgccaagctgcaagcgggaggtgtgcgttccggtagcgagggttacttcgtagaaccgacggtgttttcgaacgtcaccgatgagatgaccatcgccaaggaggagatcttcggaccggtccagagcatcatcaagttcaagacgctggacgaggtcatcgagcgggcaaacgcgacctcgttcggactggcggcgggcatcgttaccaaagatttgaacaacgcgttgacgttcagcaatgccgttgaggctggctccgtttgggtgaacacctacttggccgtttcgaaccaggcgcccttcggcggctacaaacagtccggtattgggcgcgaaatgggcaaggagggcgtcgagctgtacttggaaaccaaaaccgtgtccattaagctgccctcgaaggtgtaatcttatcatgttttgcatttttatttcatgtcaatccatttcggtcattgtggcgcgctggtcgtttcagatcgctgataaatgtgataaatttcaattgtactcggtgagaataaactgttcgtgaaccgtctcttttttcctaagtc

SEQ ID NO: 60 - DNA, 1659 bp, Culex quinquefasciatus
atgatgagtacgcgacgtggtgaagataagaaaagtgaggtggcgaccccgttcaaactgtggggtggtcgctactcgaagggaaccgatcacgtcctgtcgcgggtgaataactcgttgacggtggacaagcggctgtacgcggaggatctcgatggtagtgtggcgtacgcgaggagtttggccgaagcaaagctgttgacgcaaagtgagtttaaggtgatctgctatgggttggagacggtgcgagatgagtggatcaagggtacgatcaagttgatgccacgggatgaagatgtgcacacggttaacgagcgccggttgatcgagatcgttgggccacagatcggcggaaagttgcacaccggaagaagccgcaacgagcaggtcgtcctggacatgaagctgtggatgagggacgccgtcaaggatctgctcaaacagctgggtgagctgatcaaaaagatcaacgaagttgcggagaagtacatcgatgtgttgatgccgggttatacccacatgcagcgaggacaaccggtccgcttcagtcactggatcctcagttacgctttctacttcaaggaagactaccaacgggtcgccgagttcctcaaacgcatgaacgtcctccccctaggaagtggcgccctcgccggcaaccccttcaacattaaccgtcacaagctcgccgacgacctgggcttcaacggagtaacctacaacagcatgaccgccgtcagcgatcgcgactttgtcgtcgagttcaacttcctgtgcaccctaaccggcgttcatctcagccgactggccgaagatctgattctgttctccaccaaagagtacaacttcctcgaactctcggaagagtacaccaccggaagtagcctgatgccgcagaagcgcaaccccgattccctggaactcatccgaggtatcgccggtagcgtttttggccagcattgcggcctgctgatgaccctgaaggggctaccgtcgacgtacaacaaagatttgcagtgcgataagagcgggatgtttgcggtgtttgaccagagcttgctgtcgctgacgctgatgacgggcgtgattgggacgatgcgcgtcgacgaggatcgctgtctgagcgcgctcgggtacgacatgctggcgacggatatggcctactacctggtccgccggggcatccccttccgggaggcgcaccacatctgcggcgaggtggtcgccttctccgagaaggtcaagatcccgatcaacaagctcacgctggaggacctgcaggacatctgtccgtactttgacgaaacggtgagcgccctctggaactacgagaacagcgtcgagcagtacacggtggtcggcggcacgtccaagatttccgtccaggagcagatcaacctgttgaaggagtttctttccgaggcggtgtgaggaaatgtttgcgttttaggcgtatagtaattgttttatttgtttcgtgtgtatttttgtaaactgtataaatatcatttgaccatgttttttttgcttcatattatatattaaactgtagtatagaaaagagtgttaagtcgcttaagtatacactgcaaaatgaacaaaaaaaaagaagatctgtgctattttccctgttgtgactaataaaggaccttgtacaaa

SEQ ID NO: 61 - DNA, 1788 bp, Culex quinquefasciatus
atggaagtcgatgagctgtacacgtcggataagcgtggcgacgacgccaccggcaccggaacgtccgacaagcccttcaagacgatcctggcggcgatgaagcacgccggcaaggaacccttcccgacgatctacgtggacgcgaaggacgaaaagtccgagtcgccgtacgaggtggcggccaagtcgcagctgaagaagatccagaagctgtggacgcgggacaactcgaagaacgcggacaaggccaagcgcgaggaggaggacgccaagaagcgcgagcaaaatctggaggaggcccggaaggtggtgatcgcggaggatccgtcgtgggcacctgccaaggcggttaagatttcgaagggcggtgagaaccgtggcattcgggtgaagatttacggctgggtgcaccggctgcgtcgccagggaaaggggctgatgtttgtgacgctgcgggacggaacgggattcttgcagtgcgtgttgaccgacgctcggtgtcagacgtacaacgccgtggtgttgtctaccgagtcttcggtgagattgtttggtacgttgaaggaagtgccggagggtaagaccgctcctgggggacatgagctgcacgtggattattgggagctgattgggttggccccggctggtggcgcggatacgttgctcaacgaggacgccaacccggatgtgcaactggacaaccgtcatattatgattcgtggtgaaaacacgtccaaggtgctcaagatgagggatgtcatcatgcaggcgttccgtgcccattaccaggaccgtggttacaccgaggtgactccgccgacgttggtccagacgcaggtcgagggcggttcgacgctgtttaagttaaactactttggtgaagaggctttcctgacgcagagctcgcagctgtatctggagacgtgcattccggcgttgggcgatgtgttctgtattgctcagagctaccgtgccgagcagagccgcacgcgtcgtcacttggccgaatatagccacgttgaggcggaatgtccgttcatttcgtttgacgacttgctcgatcggcttgaggatttggttgtggatacggttgatcgtgtcctcaagtcgccgcatggtcacctggttcaggagctcaacccgggcttcgttccgccgaaaagaccgttccgtcgtatgaactactcggaagcgatcgtctggctgaaggaaaacaacgtcaccaaggaggacggcacgttctacgagtttggcgaggacattccggagggaccggaacgaaaaatgaccgacaccatcaacgagccgattatgctgtgccgcttcccggccgaaatcaagtccttctacatggccaagtgccccgaagatctccgtttgacggagagcgtggacgtcctgttgccgaacgtgggcgagatcgtgggcggatcgatgaggtcctgggacaacgaggaactgctcgcggggtacaagcgcgaaggaatcgaccccaagccgtactactggtacacggaccagcgcgtctacggaactcaaccgcacggtggctacggccttgggctggagcgtttcatgtgctggctgctgaaccgctaccacattcgggaagtttgcctgtacccgagattcctggagagatgccgaccttagagggggcaagagcaaaagcatttactgagttccgcggtaagcttgtcatattttgttttctttccactattacagcaatgcatttcattgattcaatgaatataagaatttagcttgcaaggctaagcaaaggaa

SEQ ID NO: 62 - DNA, 438 bp, Culex quinquefasciatus
atgtccgacgtgttggctagctgggaacgaactgcggaaaaacgcgcccaccacaacgccctggagcgcaagcggcgtgaccacatcaaggacagctttacttctctccgcgactctgttccgtcgctgcagggcgagaaagcaagccgggcgcaaatcctgaagaaagccgccgagtacattcagtttatgcgccgcaagaacaactcccaccagcaggacattgacgatcttaagcggcagaacagcctgctggagacgcaaattcgatctttggaacaggctcgggctaccggaaatttcggcgagggaagtgacctggggctaggcatgaacgacagttcccgggaatcggacagctctgacattgacgatggtggcagcaacaacggcagcattcatcgaagcaaaaagatgaaaaccaactcaaactactga

SEQ ID NO: 63 - DNA, 1318 bp, Culex quinquefasciatus
atggatctttggaaggcggtaatctggctggtggttctatccatcgacagcagatgtgtgttgtgtgaagaagctcgctatgacaactaccgggtttatcaggtgaccgcgaagacgaaccaacatctggccacgctggatcagctaaagttctcgagtgatagttacatttatctggagagtggccacaaggtgggcgataagttcaacatcgtggtggctccgcacaagttgtccgactttgttgagacgttggaaacggaaggaatgtgcggtcggctgctgtccacaaacctgcaggagttgattgacgaagagaagaaccggatcaagtcgaagcgaaacaatcaagtgtttgattggaatgagttccacgacctggacgcgatccatgggtggttagacaaactggctacggagtacaagcaagtggaagtgatcgaagctggaagatcttacgagaatcgtacgctgaagggtgtcaaagtgtcgtacaagtctggcaatcccggcatcttcatcgagggaggcattcacgctcgcgagtggatctccccggccacggtaacctacatcttgaaccaactcctcgtcagtgaagacccgagtgttcgcaagatcgccgaaaactacgactggtacatcttcccgagtgtcaaccccgatggatacgcttacagtcaccggagagaccgtctctggcgcaagacacgaaccccgtactctggaggatgctacggagccgatcccaaccgcaactgggacttttactgggccgaaaagggagccagccatcgctgcacgtcggaatccttcgccggaccgtacccattctccgaaagtgaaaccaaaggtctgtccgagtacctagattccctaaaaggcaaaatccaagcctacatcgcgttccactcgtactcgcagctcttgctcttcccgtacggacacactaccgagcacacgcccaaccacaaagacctgagtgagatcgcaaaggcaacgcgttacggcaccaagtaccggtacggaaatgtctacgacgcaatctatccggccagcggaggaagtggggagtgggcgtacggagtgcagaacatcaagatcgtgtacacgtacgagctgcgaccggccggaggttgggtcggatttgtgctgcccccggagcagattgtcccgaccggggaggaaacgctggactcgttggtgacgctggtggaggagaccgaacagaggggttactttaaggtgtaatgaggtgaggaaggggattgtgtgatgacaaaaaatgttgatggtacaataaataattttttaaact

SEQ ID NO: 64 - DNA, 1393 bp, Culex quinquefasciatus
cagtgctccaaaatggcatcccaactagctttcggtcttctgctagcatcactagtctgcttcacagccatcgaagctgccggagaggtcgctcgatacgacaactatcgggtataccgagtgacaaccggatcggtggaccagcttaaggttttaaacgagctcagggaatccagcgatagctacatcttcctggagagtggccgcaaagtcggtgaccattcggacattgtggtggcccctcacaaactggcagactttgatgaagtgttgaagaatgaagggatcggctttcgtgtgctccagaagaacttgcagcgatcgatcgatatggaaaagagccgcatgaggtcgaggaggagcggtggatctttcggttgggacgagttctacggactggaggatatccacgactggttggataaggtggcgtcacagcacgagcaggttgagctgatcgagggaggacactcgtatgagaaccgctcgattaagggtgttaaagtgtcgtacaagtctgggaatccgggagtgttcctcgagggtggaattcatgctcgtgagtggatctctccggctaccgtcacctacatcctgaacgagctgttgaccagtcaagatcctgctgtgcgcaacattgccgaaaactacgactggtatgttttcccgaacgctaatcctgatggctacgtctacactcatgagaaggatcgtatgtggcgtaagacgcgtacgccttactccggaggatgcttcggtgctgatccgaaccgtaactggggtttccactgggctgagcagggaacatcaaaccggtgttcgtcagagacctatggtggaccgagcgcgttctcggaagtcgagaccaagaccctgtccagctacatcgcttccctcaaaggaaagatccaggcctacatcggattccactcatactcccagcttctgctgtacccgtacggacacactggagagcacacaccaaaccacgatgacctgaccgagatcgctgaagctaccataacctcgttggccaagcgttatggaacacactacacgtacggaaacgtctacgatgccatctaccctgcaagtgggtccagcgtggactgggcatacggaacgcaggacgtcaaaatcgcatacacctacgaacttcgacccagcgatgacagttgggatggattcgtgctgccaccgagccagatcattccaaccggagaggaaacgctggactcgttggtgacactgctggaggaaacggccaagcgggggtacttccagaactagactagagctcgtgtgttgcgtgcactcgaaacgctatgacggcatcattgtggtagaagagaattgacgagcaataaagtttgaagtggttttctaaataata

SEQ ID NO: 65 - DNA, 2192 bp, Culex quinquefasciatus
gacgtcgtgctgcagcatttgaaaatcaaaaccgaggagcataaacgccacaagatggtcaaggaaacgggcttctacgatatattgggcgtgaagccgggctgctcccaggaggacctaaagaaagcgtaccggaagcttgctctcaagtaccaccccgacaagaacccgaacgagggagagaagttcaagcagatctcgatggcgtacgaggtgctgtccgacccggagaagaaagctatctacgacgagggcggcgagcaggccatcaagaagggtggtggcggaggcggtggcggtggcttccacagcccgatggacatcttcgagatgttcttcaacgggggcttcggcggacgcagcaaacgggaacgtcgcggcaaggatctggtccaccagttgtcggtcacgctagaggagctgtactcgggtaccaccaggaagttagctttacaaaagaacattatctgtgatcagtgcgagggccacggcggcaagaagggcgccgtccagaagtgttccccgtgccgcggaaccggcgtcgtcaccaagatccagcagttggcccccggctttgtccagcagttcgaggaggcgtgccgtctgtgtcgtggaatgggcgaaatcatcgacgagaaggataaatgcaaaaactgcaacggtcgaaagaccgtgcgggatcgtaagatactcgaggtcaacgttgaaaagggcatgcgcgatgggcaaaagattgtattctccggcgagggtgaccaggatccggatctgcagccaggcgacattgtgatagtgctagacgaaaaggaacacccgatcttcaagcggtcaggccaggatttgattatgcacatgcaactgcagctggtcgaatcgctgtgcggcttccagaaggtcatccggacattggacgatcgagatctggtcatcacatcgtaccccggcgaggtcataaagcacgaagcggtcaaatacattgccggcgaaggaatgccccagtataagaacccgttcgagaagggacggctcatcatccagttcttcaccgtgttcccggactcgctgccgatcgacctggtgcccgcgttagaacagtgtctgcccggacggccctcggttaaagttcccgccaacgcagaggaatgcaatttggtggaactggatcccgagcgcgagcgtcgaagttccggctacaagaacgcgtacgacgaggacgacgaccatcacggaccgggcgtgagggtgcagcagtgcgccaccagttaagcgcgctgagaaattcctcgtcgagtgaagcaaagcaaaaaatacacataatttaaaattgaaccattaccgccgcgccgcgtaggaaaaaaaggagaaaaaggtagggggaaagcaggaaggaaaggaaagggcgtcaactgtcagtgtgagcaacgcattagatgctaaaatagacacttaggttttgttttcttcttcttaaccaaaactgggccgagctccagcagcagcagcagtaagatcaggcaagcgtacgggacaggacagttagaattaacaaccaaacacacacaaaaacaacctttcgaatttatacgctttggacgcatgaagagattctcttcaacagtagaagaagaccggcgtaaaattcaaattcgccctcgttcattccaacaacaaaaaagtaagagtaaaaaaaaccgaattgatgcaacgtacagcaaatgcaacaaacaagcactactcattaaataaaaacaggatattttcgaaaccaactgtcttttcgtttttccgtgcaaatagaaacactcaacccctttccaaatattatttatgtcgttattaccacttaatcaaaactcagcctcagcagcgagagccgccggaaggtcggtcggtcgttcagcagcacacgagccgcgcggggtaatttaacagccacaacagcagcaggctgttttagaatcgaattaattgcaacttgaacctacaccctagctaaaggaatatttaatggaaacacaattaatgcagaacaaaaaacacacatacagacttaataaatccacaaacaagtataaagtaaaaagaaaagttttgatttggaaagtgattgttgcaaaacagcataagcaacaacaaaaaaagaagaatgaataaacttaaacaaacaatttatgattgtcagtaacttccat

SEQ ID NO: 66 - DNA, 2427 bp, Culex quinquefasciatus
atggacctcgatgatccgaacgtgattccgggtttttcggtggaaaacgtggacctggactacgacgacgatgagccgggtaagggcggcaaaaagaagaagaagaacgggggcggattccaggccatgggcctcgccatgcctgtgctgaagggtatcctaaagatgggctacaaggtgccgacgccgatccagcggaagacgattccgttgatactggaggggcgggacgtggtggcgatggccaagacgggctcgggaaagaccggttgctttttgattccgttgttcgagaagttgaagcagcgggagattaagaagggcgcgagggcgttgattctgtcgccgacgcgagagctggccatccagacgttcaagttcatcaagcagctggggaagtttatggacttgaagacgattctggtgctgggaggtgattcgatggacacgcagtttgcggcgattcacacgctgccggacattattgtggccacgcctgggcggttcctgcatctgtgtgtcgagatggacctgaagctgtcggcgattaagtactgcgtttttgacgaagccgatcgactatttgagatgggtttcggggagcaactgacggagacactggcccgtcttccgtcctcgcgccagatggtgctgttcagcgcaacgctgcccaaggtgatggtggagtttgccaaggctgggctgagcaatccgacgctgatccggttggacgttgagtccaagattccggaaacgttggacttgcggttcatttactgccgaccggacgaacggtacgctacgctgctggttctgatacgcgaggtgattccaaagaacgcccagattgtagtgtttgccggaacgcagcatcacgtggaattgatttcgctgctcctgaccaagtctgggatcccgtgcacgcacgtatactctggcttggacgcgtcggcgcgtaagatcaacaccgccaagttcacgatgaagaaggtcaacgtgctggtcgtgacggatattgccgcccgcgggttggacattccgacgctggattacgtcgtgaacgtgcacttcccaggcaaaccgaagctgttcatccatcgggtgggtcgttgtgcccgtgccggtcgttccggaaccgcttacaacatcttttccaacgacgacattgcgcacatgattgatttgcacatgtttttgacgcgaccgttggacgtgacggattcgcgaaacatggggcgagctcctccggaagcggtcgaatccgagcatcagatcgtgctggaacgcatcaagcacatcgatttggccacggccttcagggtgagtaacaacgcttacaagcagtacatcgtcacgagaccggcggcgtccgcgagttccaacaagaaggcgaaacggttcaagattagcgagttaaaagtgctggacgagttcgcggccgcgatggagaaggaaaacgaggccaagaaaaaggacaagctgttggggaagaaggcgaaaaagcagaagaaggcactgacggcgaagcaggaagagaagaaaccggcggtagatgcggacgaattccgcaccagcttcctggcgcagatgaagagctaccgcccgcagacgaccatcttcgagttgaatcccaaaagcaacgccaaaagaatgctgattatgaacgaaaagcgcgaaaaagacacgatcaagatcgaaaagcacaagcgcaagttggccgagctggaagaggaagaggagaagaaggctgcacaggccgtcaaggctgatgaagagtccaaggataagaagtccgccgtcaaggacgacgagaactacatttcgtaccaggccaaggaccacgtcgaagaggacggttacgctatcaactcgttcgccaaggaagcatccaacgcggaactgtcggtcatcggagacacggccgccgaccagcgccaacaccagcgcctgcaaaagtgggaccgcaaaaagaagaagatggtcaacgtggtgaacccgaaggcgggcaagatccgcaccgagcacggcgtctggatcgcggcgtcctacaaaaccggtcgctacgacaagtggaaggagcgcaccaaggtggacgaacaggaacgcgcccgccaaaacgacagcgacgaggaagactcgttcggagctcgacctaccgtcaccaggatggacttcccgcacacgcactggggtcggcacaacgccaaggtggctgcgaagaagcaacgcgagggaacttcggagctgcgctcggtcgaacagattgccaagacccggctggacaaggaggaaaagttggcgcgcgagaaggtcgcccggttgaagaacctggcccggaagaagcgctcgatcaacaagaagatgaaggggaaggcaaagtgaaagaagggaggcgggtgagtacgcggaggattgagatatatttgt

SEQ ID NO: 67 - DNA, 868 bp, Culex quinquefasciatus
gctggtgtgacatcgtgctcagctccttgaaatctttttcgacgcaaaaaatcagcaaatccaaacggaaccatggttttctccggtgacgtcaagaccccgaagggactacaggagctgaacaccttcctggccgacaacagctacatcgagggattcgtcccctcaaaggccgacgtgtccgtgtttgacgcgctcggcaaggccccggccggcgactatgtccacatccagcgctggtaccgtcacattgcgtcgtttgccgccggcgagcgctccagctggggaggccaagcgctgccgcaggttgccggtggaaagccaacggtcgctccggccaaggctgcagccgccgccgacgatgacgatgatgtcgatctgttcggttccgaagacgaggaggagagcgccgaggccgccaagctgaaggaggaacggctggccgcgtacaacgccaagaagagcaagaagccggcgctgatcgccaagagttcaattattttagacgtaaaaccgtgggacgatgaaacagacatgaaggaaatggagaagaacgtccgcagcatcgagatggacggtctgctgtggggcgcggccaagctcgtgccggtcgggtacggaatcctcaagctgcagatctgctgcgtcatcgaggacgacaaggtgtccgtggatgagctgcaggagaagatccaggactttgaagattacgtccagtcggtcgacattgccgcattcaacaagatctaaacgaaagttgggaagaggcgtgaagtaaaaagcgttccgcaaacttgaacacacacaaattgttttatgatttttaatattaagttgaagaaagccaataaaaagcgactgtattaat

SEQ ID NO: 68 - DNA, 2871 bp, Culex quinquefasciatus
ctcgcttggagaagcaggtaaaagtcgaagaaggcgttttccggtggagattcaacccccgttgcccgtgcaatatccagcttggtaggaaggacgcgcatacccccggggacgagcatgaagtatctggtacttctggtggtgggagtattcctgtttacaggaatctctacggtccgtgcagcggaagatgccgacacggaggatctgccggtggtcgagctaaacctgggagcgtccaagcagggttcccgcaccgatgccgaggcaatacagcgcgaggaggaagccatcaagctggacggtttgaacgtggcccagatcaaggagctgcgtgaaaagtccgaaaagttcaccttccaggccgaagtcaaccggatgatgaaactgatcatcaactcgctgtaccgcaacaaggagatcttcctgcgtgagctcatctcgaacgcctcggatgcgctggacaagatccgcctgctttcgctgaccaatcccggcgtgttggacacgaacgaaaatctcgaggtcaaaatcaaggccgacaaggacggcaaggtgctgcacattatcgacaccggtatcggtatgacgaagcaggatctggtcaacaatctgggtacgatcgccaagtccggcacggccgatttcctctccaagatgcaggaaacgaaaaccgagggccaggacgtcaacgacatgattggacagtttggcgtcggtttctactcggccttcctggtggcggatcgcgtcgtggtgacaacgaagcacaacgacgacaagcagtacatctgggagtcggacgcggccagtttcagcatcgttgaggacccacgtggaaacactctgcagcgaggttcgcaggtttcgttgcatctgaaggaagaggctttggacttcctggaggaggacaccgtaaagcaactgatcaagaagtactcgcagtttatcaacttcccgatctacatgtggaccagcaaggaagtcgaggaggaagtaccggtggaggacgagccaacggaaaagcccgaaaagaaggacgaagatcaaaccgaggaagaagacggaaaggtggaagaagaagcggaagaggacaagccaaagaccaagaagatcaagaagaccgtctacgattgggaaatcatgaacgacagcaagcccatctggacgcgcaaaccgaacgacgttaccgaagacgagtacactgaattctacaagagcctcaccaaggacacgtccgaaccgctgactcacactcactttgtggccgaaggagaagttaccttcaagtcgctgctgtacattcctaaggttcagccatcagagagcttcaacaagtatggtaccaaggcggacaatattaagctgtacgtgcgtcgcgtgttcatcactgacgagttcaacgacatgatgcccaactacttgaactttatccgtggtgtggttgattccgatgatctgcctctgaacgtgtcccgtgaaacgctccagcagcacaagctgatcaaggtcatcaagaagaagctggtccgtaaggcgctagacatgatcaagaagatcgacaaggaaacgtacgagaagttctggaaggaattctccaccaacatcaagctcggaatcatggaagaccccagcaaccggtcgcgtttggccaagctgttacgtttccagtcgtccaacggaaagagctccaaggagtacaccggcctgtcggagtacgtgacgcgcatgaagccgaagcaggaacacatctactttatcgccggatcgagccgtgccgaagtcgaaaagtctccattcgtcgagcgtctgctgtcgcgtggctttgaagttctgtacctggttgaagccgtcgatgagtacagcatctccgctctgcccgagttcgatggcaagaagttccagaacgtcgccaaggaaggcttcgtgctgaacgaatcggaagaatccaaggctcgcttcgaggaactcaagacggaattcgaaccgctgctgaagtggctgaacgatgtcgctctcaaggacaagatcgccaaggctcaggtttccgagcgtctgtccaactcgccatgcgctctggttgcgtccatgttcggttggaccggtaacatggaacgactggccatggccaacgcccatcagaagacggatgatcctcaacgccagtactacctgaaccagcgcaagactctcgaaatcaacccgcgccatccgttgatgcgtgagcttctgcgccgcgtggatgccgacagcgaagacgttgtcgccaaggacatggccgtcctgatgttcaacactgccacgctgcgatccggtttccacctgccggagacgtcggactttgccgacagtatcgagcgcatgatgcggcaaacgttgggagtgtcgctggacgagcagccggaaccggaggaatttatcgacgagcctgaagcagcggacgatgctggcaaggacgaggaggaggacatcaacgccgaggatgaacatgacgagctgtaaatcaaagtcggagtgggaatgagtatgtgaagagcgaacgcgtgtgactgagtttagtgtgttaagagactgatttaattccatttgtagtcaagctagtaatttcctcagctctgattggcatgaacaaaacaaacaagcaacgacgataaggcggcatgttttcgatgctcgtctcgttaagcgtccaaattgtaaaagaacaacttctttatttattaagctactacgtacaacactgtgcagtgtcatcacattgattgattttggtaactgataaagttagagtgtaaagcattgtgacaaatagcattttttgtgaaaacaaaacataaataagaaaataaaatgaactattgaaatgaaatg

SEQ ID NO: 69 - DNA, 1430 bp, Culex quinquefasciatus
atgtctttcgaggaaacttccgccgatcgcaatgtggagatctggaagatcaagaagcttatcaagagcttggagatggcccgaggaaatggcaccagcatgatttcgctgatcatcccgccgaaggaccagatcagccgggtgagcaagatgctggcggacgagttcggcacggcgtccaacatcaagtcccgcgtgaaccgtctgtccgtgctcggtgccatcacctcggtccagcaccggctcaaactatacaccaaagtgcctccgaatggactcgtgatctactgcggtacgatcgtcaccgaagagggcaaagagaagaaggtcaacattgactttgaaccgttcaaaccgatcaatacctctttatacttatgcgataataaattccacaccgaagcgctgacggccctgctcgcggacgacaataagttcggtttcatcgtgatggacggtaacggtgcgctgttcggtacacttcagggcaacacccgcgaggttctgcacaaattcaccgtggacctgccgaagaagcacggccgtggtggtcagtccgcgttgcgtttcgcgcgtctgcgtatggagaagcgtcacaactacgtgcgcaaggtcgccgaggtggccacccagctgttcatcaccaacgacaagccaaacattgccggcctcatcctggccggtagtgccgacttcaagaccgagctcagccagtcggacatgttcgatccgcgattgcaatcgaaagtgatcaaactggtggacgtgtcgtacggcggggagaacggttttaaccaggccatcgagctggcagctgaatcactgcagaacgtaaagttcatccaggagaagaaactgattgggcgatactttgacgaaatttcacaggacaccggcaagtactgcttcggcgtggaggacacgctcaaggcgctggaactgggctcggtcgagacgctgatctgctgggagaacttggacattcaacgctacgtgctcaagaaccacgtcagtgcgacgtccacaacagtattgcacctgaccccggagcaggagaaggacaagtcgcacttcactgacaaggagagtggcgtcgagatggaactggtcgaatctcaaccgctgctggaatggctcgccaacaactacaagagcttcggtgctactttggaaattatcactgacaagtcccaggagggcagccagtttgtgcgaggatttggtggaattggaggttgtttgcgctacaaggtcgatttccaaagtatgcaactagatgaattggacaacgatgctttcgatttagaggattattaaaatattttttttatgtttatgaaagtatcagttatacaacaaacacatacacacacacaggttaaaaaatatacaacaacaaaagagaaaagacacttcggtgtggagcaaaa

SEQ ID NO: 70 - DNA, 3840 bp, Culex quinquefasciatus
atgttgatcgctagcatgaccaaagtgaacctgcttagcaagctgaaggatcgcgtcgacattgatccggcccttcctgcgaaatgtgccttgattgatcgtgcaaaactgctccgttacgtcaaacacgcccctcggactgctgcttctgccttatggcaaacgtcgctttatgccatcctgtcaacccactccccgtcgtcgtcgtcttcttcggccatcgtggcacccattcggtctctttcgcctctgtgcacgcaaacggcgtgcagcgttgattttcggtgccgagctgaaatcctagcagaaagcctgcaaaatggtgagtttcgggccccgaaccggtcggaatcgacgccggagggcggtgggcgtgcgagcgtggtggagtttggccggaagtggccgccggctggaatcgacggcggaatttgttccctgacggaatttgcctcgttgtctcgtgcggagcagaaaatgtcggacgattcggggcggtacgtcggagtcggagaggaagacagacgttgcagttctttggcagagctcgagctcggcgtgtcagttaactttaccgtcgacgaaatccgtgccatgatggacaagaagcggaacatccgcaacatgtccgtcatcgcgcacgtcgaccacggcaagtcgacgctgaccgattcgctcgtgtccaaggccggtatcatcgccggtgccaaggccggtgagacccgcttcaccgacacccgcaaggacgagcaggagcgctgcatcaccatcaagtcgaccgccatctcgatgtacttcgagctggaggaccgcgatctggtgttcatcaccaacccggaccagcgcgacaaggactgcaagggtttcctgatcaacctgatcgactcgcccggacacgtggacttttcgtccgaggtgacggccgcgctgcgcgtcaccgacggtgccctcgtcgtcgtggactgcgtgtccggtgtgtgcgtgcagaccgagaccgtgctgcgtcaggccatcgccgagcgtatcaagccggtgctgttcatgaacaagatggaccgcgccctgctggagctgcagctggaggccgaggatctgtaccagacgttccagcgtatcgtggagaacgtgaacgtcatcatcgccacgtacaacgacgacggtggcccgatgggagaggtgcgcgtcgacccgagcaagggttccgtcggtttcggttccggtctgcacggatgggccttcacgctgaagcagttcgccgagatgtacgccgccatgttcaagatcgatgtcgtcaagctgatgaaccgcctgtggggagagaacttcttcaaccccaagaccaagaagtgggccaaggtcaaggatgacgacaacaagcgttcgttcgtgatgtacgtgctggacccgatctacaaggtgttcgacgccatcatgggctacaaggctgacgagatcccgaagctgctggagaagttgaaggtggtgctgaagcacgaggacaaggacaaggacggcaagaacctgctgaaggttgtgatgcgtacctggctgccggccggagaagctctgcttcagatgattgccatccatctgccgtcgccggtggttgcccagaagtaccgtatggagatgttgtacgagggaccgcatgacgatgaggccgccgttgccgtcaagaactgcgacccggagggtccgctcatgatgtacgtgtccaagatggtgccgaccaccgacaagggccgtttctacgccttcggacgtgtgttctccggaaaggtcgccactggccagaaggcccgtatcatgggaccgaactacacccccggcaagcgtgaggatctgtacgagaagtcgatccagcgtaccattctgatgatgggccgttacgtcgaggccatcgaggatgtgccgtgcggtaacatttgcggtctggtcggtgtcgatcagttcctggtcaagaccggtaccatctcgaccttcaaggatgcccacaacatgaaggtgatgaagttctccgtgtcgcctgtggtgcgcgttgccgtcgagcccaagaacccggccgatctgcccaagctggtcgaaggtctgaagcgtctggccaagtccgatcctatggtgcagtgtatcatcgaggagtccggcgagcacatcattgccggtgccggtgagttgcatctggaaatctgtctgaaggatctggaggaggaccacgcctgtatcccgctgaagaagtccgaccccgtcgtgtcgtaccgtgagaccgtctcggacgagtccgaccagatgtgtctgtccaagtcgccgaacaagcacaaccgtctgttcatgaaggccgtcccgatgcccgatggactcgccgaggacattgacaacggtgacgtgaactcgcgtgacgacttcaaggtgcgtgcccgttacctggccgagaagtacgactacgacgtgactgaggcgcgtaagatctggtgcttcggcccggacggaaccggcccgaacatcgtcgtcgactgcaccaagggtgtgcagtacctgaacgaaatcaaggactcggtcgtcgctggcttccagtgggcctcgaaggagggtgtgctggctgaggagaacatgcgcgctgtccgcttcaacatctacgacgtgacgctgcacgctgacgccatccatcgcggtggtggccagatcattccgaccgcgcgtcgcgtcctgtacgcgtcgtacatcacggccgctccgcgcatcatggagcccgtgtacctgtgcgagatccagtgcccggaggtcgccgtcggcggtatctacggtgtgctcaatcgtcgccgtggccacgtcttcgaggaggcccaggtcgccggtacgcccatgttcgtcgtgaaggcctacctgcccgtcaacgagtcgttcggcttcaccgccgatctgcgatccaacaccggcggacaggcgttcccgcagtgcgtgttcgatcactggcagatcttccccggagacccagccgagcccggcaccaagccgtacgtcatcgtgcaggacatccgcaagcgtaagggcatgaaggaaggcatcccggatctgtcacaatacctggacaagttgtaaatcattctttattgtaacacccttcttacaattcaacaacaacaacaacaaaacaacctagcagaatatggaaggcaggagtgtgtgtccagagctacaacaattaatataaagagaataatttatacatgtttacaaaagtgacaaatccgggcgcgcgcctcctcgtgcgtgcctttgcatccactcagagcagaactacaaatcccttcaccaccaccaaaacccacgcttttcgcgccgcgctttttcccttcgatcaacaatccccgtctcgtgccgggggctccatcgtgctcgtgctgaagaaaaaaaacaacagaacaagtagaagaagacaacaacagaacgtcagtgtgtggcagaacgtaaagcgtaaaatcaaagcaagagagaatatagaagatgcgacatcttgttgagcaaaaaacgccaaactaactggcgcagaaacgcaaacgagtgtagttttacttaccacacaaaatgggcgcgcattgtaatcgatcaatctttcgttttttttacgcaacacgtaatttaatcatggtttcttttctctatttccattcattaccggtttattatagtttccaaaaacttgattgctattattttgcactacgaagtaaattgggaaatttatataacacactctatacaaataacgtttattttacataaaatttacaaacgacgattacagtgacttgtcattccacacacgcgacaaatgtcccactt

SEQ ID NO: 71 - DNA, 1099 bp, Culex quinquefasciatus
gtgtgttgaaaatcgcccaccgccacgacaatgtccacgataaatttgcccctaaacctgacggtccgcgtccacccggtcgtgctgttccagatcgtggacgcgtacgagcgccgtaacgccgactccgagcgcgtcatcggaactctgctgggttccgtcgagaagggaatcgtcgaggtgaccaactgtttctgcgtgccgcacaaggaacatgccgaccaggtcgaggccgaactgggctacgcgtccgatctgtacgacctgaaccggcgggtcaacccgtccgagaacattgtcggttggtgggccaccggtcaggaggtgaccaatcatagctcggtcatccacgagtactacgcgcgcgagtgcaacaacccgatccatctgacgctggacacgtcgctgactgccgctcggatgggcatcaaggcgtacgtgtgcgtctcgctgggcgtccccggcggcaagacgggctgcatgttcacgccgatcaacgtcgaggtcaccagctacgagccggaggtcgtcggtctgtcgctgtgcgccaaaaccatcggcgtccagtcgaacccggcccggccacgcacggtttcgccgatgctggatttggcccaggtttccgaagcgtccggcaagctgcagacgctgctcggcgaggtgctgaactacgtggaggacgtcctggcggagaagcagcagccggacaactttgtcggccgtgccctgctcgatctgatccactcggtgccgaacatgaagcacgaggagttcgccaagatgttcaactcgaacgtgaaggacctgctgatggtggtcacgctgtcccagctcatcaaaactcaactgcaactgaacgagaaactgaccagcctgacgtcgttcctcagttaagtgactcgcggaatttgtgagacagtttttatgaacagtgaacgatttgagttgcaaaaagtgtatcgagcgcaaagaaggtagaaaaggaaaaaaggaccgtgtttcagacgttagacgaaaagtcgcgcgcgcgcaagcgcttgaattccaagtgtgaagttccaaggaggcgataaagctgctgtggattatctcacaaacc

SEQ ID NO: 72 - DNA, 3106 bp, Culex quinquefasciatus
atgtcttcgagtgcggcttctctcgaagcggcaagcgagagcaaacggcgctcaatcgtgatactctcactgattgcgacttgtacgttcctgtttgtgctgtgtctgtgtctgctgagtgccctcgtgttggtcggcaaaaacttgtcggcacaaacgtctccactgctgctgtcttcgtactttagcagtcagcaaacgtcagccggcgaagttggcggtgccaaacagaagacgcccaagagcatcgatcattttaatcggcctgctttgtttgacgaagatagccagctatcgccggaccgtgcccccgaggacaaccgcactgcgctcacactgccaaactcggtgtattctggatcgtcgccgccgggaatgaacgtactcaagatgggctccaaggtgattgagaagctgacgttccggctgccgcggcacatcaaaccgcgtcactatgatttgctgatgcgaccggatctggaccagcagacgttcagcggagcggtcggcatcgacgtgaccgtgagcgagccgacggattacttcgtggtgcacagcaacctgctgaccatcggcgacacggtgctgaagcggacgctgccggaccggtccgagcaggccgtgcagattcggcgtgcgtacccgtacgaaccgcaccagtactgggtcatcgagacggaaagtgtcgaggcgggcgagtaccggatcagtatgaattttagcggaagcctggccaaccggattgtgggcttctacagcagttcgtaccgggacaagggcagcaatacttccagaaaaatcgccacatccaagttcgagccaacgttcgcgcgtcaggccttcccgtgcttcgacgaaccccagctgaaggcaacgtacaccattagcttggtccatccgtccagcaatgggtacgaagcgctgtccaacatggacattgagaccattaaaccaaacactccgtcaactgggctcagcactaccgtgttcaatccgagcgttccgatgagcacctatctggtggtgtttatcgtcagcgacttccagcatcaggcaactcgtatcattcccaagattggtaatcagtttgacctgcgggtgtacgccacccctttccagcttgagaatgttagatttgcccgggatactgccaagggagttattgagcactacatcgattacttccaaatcgcgtatccgttgccgaagctggatatggccgccattccggactttgtgtcgggagctatggagacgtggggcttggtaacgtatcgggagaccagcttgctgtacgacgcagcaacgagctcgacggccaacaagcagcgcgtagcggaagttatagcccacgagttggcccacatgtggtttggaaatctggtcacgatgaagtggtggaacgaactgtggttgaacgagggatttgccagctacatcgagtacaagggagtggacagtgtatatccgcagtggggcattatggagcagtttgcgctggataatctgcacggagtgctcagtttggatgccaccattggatcgcacccgatcgttgtcaaggttgagagtccgaatcaaattacggagatctttgacaccatcacgtactctaagggcgcgtcggtgatccgcatgttggaggactttgtgtcggaaccgatcttcaagcagggcgttacggcctacttggacaagctcaagtatagcaacggagtctcggatgatctcatggtggagctggataagctgttcgcggacgcaacgggagcgactgttgcgcaagttatggacacttttaccaagcaaaagggtttccccgttatcaacgttgtcagaagcggcagtcaattccatttgaggcaatcgcgtttcctagctgacccggaggcgaaggaaactgaaccgtcgcagtttgactataaatggtacgtcccgctgacttacattacctccgacagtccggacacggtcaaacgcgactggttcccgcacacctcttcagttgtgtacgtcgatctgccaactggaactaatccgtggatcaagttcaatcacaagcaagttggttactatcgcgtgaactatccggcagacgtttgggtccagttcggggacgctctggtggccgatgtgaacactttctccactggagatcgtaccggactgttgaacgatgtttttgcactggccgatgcttcgatgttaaagtatgatttggctcttgagatgacgcggtacttggcccgggagcaggagtacgtcccgtgggcaacggttgcgagcaaaatgaagaacattcgaaacctgatctacgattacgaatcttacgatgatatcacgacctacgttcgcaagctggtccaagaggcgtacaatgtcgttggttgggaagtgccacaagattccactgaagaaaaccacatgagaaaccgtctccgtaccaccatcctggatttggcctgctccttcggtcacgaagactgtctcgcccaagctaaaactcgcttcgaaggatggctcaactccggcgcgtacatccaccctgatctgcgcaccgtagtgtactactacggcgttcagcgatcgggctcggtctcggactgggaaaaggtcaaggaacggttccgcgcggagaacgatgccaacgagaaggccaagctgatgagtgcgcttgccgccttcccggacgccaaggtgcttcgtcggttcctggaagaggcgtgggatccgacgctggttcgcgagcaggatcatctgagctgcatccagaacgtggccgcgaacaagcacggcgaacaggtcgcgtgggaccacgtgcgcgagaactggaaccggctggtggaacggtacacgcttggtgagcggaaccttggccgcatgattccgtccatcacgggccgtttctcgacccgggttcggctgatggagctggaagatttcttcgcgcggaatccggaatcgggcgcgggagcaactgcccgggtgcaggcgctggagaacatctccaacaacatgaagtggctggagcgcaatcagaagagcgttgccgattggctcaagactgccgttcagccgtcggtgagacgataaattttgtttggtt

SEQ ID NO: 73 - DNA, 2325 bp, Culex quinquefasciatus
atgtccagaaagaagtcggaaaaatttcgccttagcgtgaccaaacatggcgaggaggacgtcgagatggagttcatcccccaggctggcgacggagacggcggagcgctcgagggcgaaacgttggccgagcaaaactccgaaccccatctggtggagaccgacgacgggcggttgatcatcaacatgacgccgggcctcacgtgcaccgtgtgccagaaggctttcgccacggccaacggcttggctcggcacaagaaggatgtctgcgacgcgcaatccggtccacccgaagaggacgtgctggatttagagcggaaagcggccacccgggccaagcccggcgaggagttcttcaagtactgcgatccgaacccggagaacccgtgctactgctgcggagaggacatttccaccgcccacactggccacatccggtgcaagctctgcccaaagtcgttcaaggcgtacgagtacatggagcgccatctggcgtcggttcacgccgaggacgacacgttcgcgtgtccgcagtgcaactccaagtgctcgtcggccaaggtcctgaacgaacatctactgacccacagcgagggcaagccgttttcgtgtttgcgctgcagcaaggactttacccggaagtaccacttggagcgccacttgaaccattcaaactgcggcgacaacccgaaacatatgcaaccgtgcgaagtgtgcggcaaggagtttgcccggctcgacaatctgagggagcatttgcggttccacatgggccaggccaaccggaagcgcgactaccagtgtccgtactgtcccaagtcgttctacgggtcatcgctgttgaacatccacatccgtactcacaccggagagaagccgtttccgtgtgacttgtgcacgaagtctttcccgtcaacgggggcgttgagaaagcaccgcagaagccacaccggcgagcgtccctatcgttgcgatcagtgctcggctacgtttgcggctcgggaaacgctgaacagacatcgcaaaactcacactggcgaaaaaccccacgagtgcacaatctgccacaagggcttcatccaggcttcccagctgcgctcgcacatgttcaaccacacgggcgagggcggcttcgactgcgaacagtgcggggcaacgtttagccgccgaacgcgccttaccgagcatgtcaagttcgtgcacaagcaggaacagatgttgccctgccccacctgcgggaaggagtttgtgcgcaaggaggacctgcagcgccaccaggacacgcacgccgaaattaagaactttgaatgctccgagtgcagcaaacggttcgtgtcccggacggcgctcaacacgcatcttaaggtgcacatcgttgaggagccggcaaagtgtaccatttgcaacaaagagtttttgcgcaaggactgtctgactcggcacatgagaagcaagcaccgcgacgagtactacatgaaggaagaagcggaagataccaaaccggaacagataactccggacgaaggtgcggcatcaccggtcgaggtcgaggaagatccgcacgtgctcgagatcgacggcgaggtgtaccaaattaccccactggaagaggttcacatcgttcgtatcaactcgagcgacgaacgcgctcccggagcagccaccgtcaaaaccgaggaaaataataagaccaaaatgctcgaggtggtcgacattgttccgtcgccgaccaaggagatcaaatcgaaggttgtgacggtgaagccggccaagaagaaggaacctgcggaaaagaagcccaaaagaattaaaaccaatgagtttgtccttcctcttcctcctcctccggcggttaaggagaaggtcgtcccggcgatggtggtactgccggcgcggaccctcgtcgtcgccaaagagccgaaggagcgcaagaagcgcaagccgaacgccgattccgacggcggtgacttccgcaagaccaaaatcaaaaaggaaaagcaagacgattccgtgtccatcttcctgagcgacgcttcgctcaaacagaaaatctccgagctgctttgtctcctcatcgacgaggaaatgctcgaggagtttggatggcccaaagcccccgtcgaggacgtgctcagcaacgtgatcgttcgctgtggccacaagccggcccgggacgaggaagatatgggcggcgatgtgaccacccgcatgcgggaaaacaccaagattctgtttgcgctgacgatggacgacgacaacatcaagacgctgctcaacaatcacaccgtcgacgaggtcattatgaacgtgctgaagactaagtaa

SEQ ID NO: 74 - DNA, 582 bp, Culex quinquefasciatus
atgttcatctgggactggttcaccggcgtgctcggctatctgggtctgtggaaaaagtccggcaagctgctcttcctcggtctggacaatgccggcaagacgacgctgctgcacatgctcaaggacgaccggctggcacagcacgtccccacgttacatcccacgtccgaggaactgtcgatcggtaacatgagattcaccacattcgatctgggtggtcacacacaggcccgtcgtgtctggaaggactacttcccggcggtggacgcgatcgtgttcctgatcgacgcgtgggaccgcagccggttcaccgagagcaagaacgagctggactcgctgctgacggacgaggccctctcgaactgcccggtgctcatcctgggcaacaagatcgacaaaccgggcgcggccagcgaggacgagctgcggaaccactttgcgctgtaccagctgacgaccggcaagggaaaggttgcccgcaacgagctgcccggtcgtccgctcgagctgtttatgtgttccgtgctaaagcgacagggttacggcgagggtttccgctggctcgcacagtacatcgactaa

SEQ ID NO: 75 - DNA, 2151 bp, Culex quinquefasciatus
atgccggaagtcgagaccgagacctttgcgttccaggctgagatcgctcagctgatgtcgctgatcatcaacaccttctactcgaacaaggaaatcttcctgcgagaactgatctccaactcttcggatgccctggacaagatccgctacgagtcgttgaccgatccctcaaaactggacagtggcaaggagctgttcatcaagctgatcccgaacaaggaagccggcacgctgacaatcatcgataccggtatcggcatgaccaaggccgacctggtcaacaacctgggaacgatcgccaagtccggcacgaaggccttcatggaggcgctgcaggccggagcggacatcagcatgatcggtcagtttggtgtgggtttctactcggcgtacctggtcgcggacaaggtcgtggtcacgtccaagagcaacgacgatgagcagtacgtgtgggaatcgtcggccggaggctcgttcacggttcgcaccgaccccggtgagccgctgggccgtggtaccaagatcgtcctgcacatcaaggaagatcagctggagtacctggaggagagcaagatcaaggccatcgtcaccaagcactcgcagttcatcggctacccgatcaagctgctcgttgagaaggaacgcgaacaggaggtgagcgacgatgaggccgaggagaaggaggacaagaaggacgaggagaagaaggaggacgagcccaagatcgaggatgttgaggacgatgaagacaagaaggacaagaagaaaaagtccgtgaaggtcaagtacaccgaagacgaggaactcaacaagaccaagccgatctggactcgcaacgccgacgacatctcccaggaagagtacggcgagttttacaagtcgctcaccaacgactgggaggaccatctggccgtgaagcacttctccgttgagggtcagctggacttccgtgcgctgctgttcgttccgcgtcgtatgccgttcgacctgttcgagaacaagaagaagaagaacaacatcaagctgtacgtgcgccgtgtcttcatcatggacaactgcgaggagctcatcccagactatctgaacttcatgaagggcgtggtcgactccgaggatctgccgctgaacatttcccgtgagatgctgcagcagaacaagatcctgaaggtcatccgcaagaacttggtcaagaagtgcttggagttgttcgaggaactgtccgaggacaaggagacgtacaagaagttctacgatcagttcagcaagaacctgaagctgggagtgcacgaggacagctcgaaccgtcagaagctggccgatctgctgcgtttcaacacgtccgcgtccggagatgagtactgctcgttcggtgactacattggccgcatgaaggagaaccagaagcacatttactacatcaccggcgagagcatcgaccaggtcaagaactctgccttcgttgagcgcgtcaagaagcgaggattcgaggtgatctacatgacggaggccatcgatgagtacgtcatccagcagctgaaggaataccagggcaagcagctggtgtccgtcaccaaggaaggtctggagctgccggaagacgaggaagagaagaagaagttcgaggaggacaaggccaagtacgagaacctgtgcaaggtcatgaagtccgtcctggaccagaaggtcgagaaggtgatggtgtcgaaccgattggtcgattcgccctgctgtatcgtgacctcgcagtacggttggtccgccaacatggagcgtatcatgaaggctcaggccctccgtgactcgtccgccatgggctacatggccggcaagaagcacctggaaatcaaccccgaccacgcgatcatcgacatgctgcgacagcgcgccgacgccgacaagaacgacaaagccgtcaaggatctggtcgtgctgctgttcgagactgccctgctctcgtccggattctcgctggacgaacccggagtgcacgcggcccgcatctaccgtatgatcaagctgggtctgggcatcgacgacgatgaggccgccaccagcgaggagaccagcgccgagccggccggaggtgttggcgatgcgccaccactcgtggacgatgccgaggacgcttcccacatggaggaggtcgactaa

SEQ ID NO: 76 - DNA, 2151 bp, Culex quinquefasciatus
atgccggaagtcgagaccgagacctttgcgttccaggctgagatcgctcagctgatgtcgctgatcatcaacaccttctactcgaacaaggaaatcttcctgcgagaactgatctccaactcttcggatgccctggacaagatccgctacgagtcgttgaccgatccctcaaaactggacaatggcaaggagctgttcatcaagctgatcccgaacaaggaagccggcacgctgacaatcatcgataccggtatcggcatgaccaaggccgacctggtcaacaacctgggaacgatcgccaagtccggcacgaaggcgttcatggaggcgctgcaggccggagcggacatcagcatgatcggtcagtttggtgtgggtttctactcggcgtacctggtcgcggacaaggtcgtggtcacgtccaagagcaacgacgatgagcagtacgtgtgggaatcgtcggccggaggttcgttcacggttcgcaccgaccccggtgagccgctgggccgtggtaccaagatcgtcctgcacatcaaggaagatcagctggagtacctggaggagagcaagatcaaggccatcgtcaccaagcactcgcagttcatcggttacccgatcaagctgctggtggagaaggaacgcgaacaggaggtgagcgatgatgaggctgaggagaaggaggacaagaaggacgaggagaagaaggaggacgagcccaagatcgaggatgttgaggacgatgaagacaagaaggacaagaagaaaaagtccgtgaaggtcaagtacaccgaagacgaggaactcaacaagaccaagccgatctggactcgcaacgccgacgacatctcccaggaagagtacggcgagttctacaagtcgctcaccaacgactgggaggaccatctggccgtgaagcacttctccgttgagggtcagctggacttccgtgcgctgctgttcgttccgcgtcgtatgccgttcgacctgttcgagaacaagaagaagaagaacaacatcaagctgtacgtgcgccgtgtcttcatcatggacaactgcgaggagctcatcccagactacctgaacttcatgaagggcgtcgtcgactccgaggatctgccgctgaacatttcccgtgagatgctgcagcagaacaagatcctgaaggtcatccgcaagaacttggtcaagaagtgcttggagctgttcgaggaactgtccgaggacaaggagacgtacaagaagttctacgatcagttcagcaagaacctgaagctgggagtgcacgaggacagctcgaaccgtcagaagctggccgatctgctgcgtttcaacacgtccgcgtccggagatgagtactgctcgttcggtgactacattggccgcatgaaggagaaccagaagcacatttactacatcaccggcgagagcatcgaccaggtcaagaactcggccttcgttgagcgcgtcaagaagcgaggattcgaggtcatctacatgacggaggccatcgatgagtacgtcatccagcagctgaaggagtaccagggcaagcagctggtgtccgtcaccaaggaaggtctggagctgccggaagacgaggaagagaagaagaagttcgaggaggacaaagccaagtacgagaacctgtgcaaggtcatgaagtccgtcctggaccagaaggtcgagaaggtgatggtgtcgaaccgattggtcgattcgccttgctgtatcgtcacctcgcagtacggttggtccgccaacatggagcgtatcatgaaggctcaggccctccgtgactcgtccgccatgggctacatggccggcaagaagcacctggaaatcaaccccgaccacgcgatcatcgacatgctgcgacagcgcgccgacgccgacaagaacgacaaggccgtcaaggatctggtcgtgctgctgttcgagactgccctgctctcgtccggattctcgctggacgaacccggagtgcacgcggcccgcatctaccgtatgatcaagctgggactgggcatcgacgacgatgaggccgccaccagcgaggagaccagcgccgagccggccggaggtgctggcgatgcgccaccactcgttgacgatgccgaggacgcttcccacatggaggaggtcgactaa

SEQ ID NO: 77 - DNA, 2531 bp, Culex quinquefasciatus
atgcttgctctaatgccggaagtcgagaccgagacctttgcgttccaggctgagatcgctcagctgatgtcgctgatcatcaacaccttctactcgaacaaggaaatcttcctgcgagaactgatctccaactcttcggatgccctggacaagatccgctacgagtcgttgaccgatccctcaaaactggacagtggcaaggagctgttcatcaagctgatcccgaacaaggaagccggcacgctgacgatcatcgataccggtatcggcatgaccaaggccgacctggtcaacaacctgggaacgatcgccaagtccggcacgaaggccttcatggaggcgctgcaggccggagcggacatcagcatgatcggtcagtttggtgtgggtttctactcggcgtacctggtcgcggacaaggtcgtggtcacgtccaagagcaacgacgatgagcagtacgtgtgggaatcgtcggccggaggctcgttcacggttcgcaccgaccccggtgagccgctgggccgtggtaccaagatcgtcctgcacatcaaggaagatcagctggagtacttggaggagagcaagatcaaggccatcgtcaccaagcactcgcagttcattggctacccgatcaagctgctcgttgagaaggaacgcgaacaggaggtaagcgacgatgaggccgaggagaaggaggacaagaaggacgaggagaagaagcaggacgagcccaagatcgaggatgttgaggacgatgaagacaagaaggacaagaagaaaaagtccgtgaaggtcaagtacaccgaagacgaggaactcaacaagaccaagccgatctggactcgcaacgccgacgacatctcccaggaagagtacggcgagttctacaagtcgctcaccaacgactgggaggaccatctggccgtgaagcacttctccgttgagggtcagctggacttccgtgcgctgctgttcgtcccgcgtcgtatgccgttcgacctgttcgagaacaagaagaagaagaacaacatcaagctgtacgtgcgccgtgtcttcatcatggacaactgcgaggagctcatcccagactatctgaacttcatgaagggcgtcgtcgactccgaggatctgccgctgaacatttcccgtgagatgctgcagcagaacaagatcctgaaggtcatccgcaagaacttggtcaagaagtgcttggagctgttcgaggaactgtccgaggacaaggagacgtacaagaagttctacgatcagttcagcaagaacctgaagctgggagtgcacgaggacagctcgaaccgtcagaagctggccgatctgctgcgtttcaacacgtccgcgtccggagatgagtactgctcgttcggtgactacattggccgcatgaaggagaaccagaagcacatttactacatcaccggcgagagcatcgaccaggtcaagaactcggccttcgttgagcgcgtcaagaagcgaggattcgaggtcatctacatgactgaggccatcgatgagtacgtcatccagcagctgaaggagtaccagggcaagcagctggtgtccgtcaccaaggaaggtctggagctgccggaagacgaggaagagaagaagaagttcgaggaggacaaggccaagtacgagaacctgtgcaaggtcatgaagtccgtcctggaccagaaggtcgagaaggtgatggtgtcgaaccgattggtcgattcgccctgctgtatcgtcacctcgcagtacggttggtccgccaacatggagcgtatcatgaaggctcaggccctccgtgactcgtccgccatgggctacatggccggcaagaagcacctggaaatcaaccccgaccacgcgatcatcgacatgctgcgacagcgcgccgacgccgacaagaacgacaaggccgtcaaggatctggtcgtgctgctgttcgagactgccctgctctcgtccggattctcgctggacgaacccggagtgcacgcggcccgcatctaccgtatgatcaagctgggactgggcatcgacgaggacgaagccatggccacggaggatgctgctgccccggctaccgaaggcggtgacgctccgccactggttgacgattccgaggatgcgtcccacatggaggaggtcgattaaacaattccttcgcacccccagtaacttgaaactttccatcgccagcacacgctagattctacttggtttaagtttgatatagttagatcttcaaatgacgggttttaaagtttgcgggtttctaagctttgatttattttttaatttttgtttccgcgttctagcggcttcaaacagaaagagatggtacaattctggtcatttattagcgatacacacaaaacctgttgtatttaaagagaaaccccaaagccgcgaaaagaaatgttttggcgaacgataagaccccttgaaaatttcgaactgattacctttaacgtatgttttaaaaatgtataaaataagtagaccaaatacaaacaattcaattc

SEQ ID NO: 78 - DNA, 2151 bp, Culex quinquefasciatus; identical to SEQ ID NO: 75

SEQ ID NO: 79 - DNA, 1596 bp, Culex quinquefasciatus
atgtccgaaacccagccggtgccgatcatgtcgatggtttcctccgaggttcacccgccggagtgggactcgccggacgcgaccagcggctcgttccagctggttccggacgtggccgcaccaacgggatccttcgtgctgaccgaggaggcgcccatagtgggtgactcgaatgggtcgtttgtgctgaaggagtcggttccgatcgtgggtaccgaggagtcggacggatcattcgtcttgaaagagtcggttccgatcgtggataccgagcaagtgggaggggacggatcattcgtcttgaaggaggatgttccgatcgtggatacggaagaatcggacggatcgttcgtcctgaaggaatcggttcccatcgtggacagcggtccgtttgagttacctccgtttgtggagcaggcgattgccagcgtagtccccgaagaaggatttaccccgggacactttgtggtatcgatcgatcgagctgcggagtgcgagggattgatcggagagatacacaaagccgtggtgacggaaggtgagcgggagttgacgatcctctgcaagataccaccgctggatcccgtccgtagacagcagttcaactcgaacatcctgttcgagcgggaaatcaacgtgtactccaacgttcttcccaccatgttcgagttccagcggcagaagggagttaccgaagagttgaacgccggattcttcaacgttcccaagtgttacctcgcgcggtttgatccggacaacgaagaagcgctgattttgatggaagatctgcgcgttcgcgagctggcaatgtggaacaagctggaaccgatcaactacgagcacgcccggttggtgatgatccagcttggccggttccacgcgctgtctttcgcgatgaaggatcagcggccggatctgttcgaagcgtgcaagatcccggacgcgatggtaccggctatgcagcacaacgaccagctgatgggaatgttcggagtggcgctggacgcggccatgaacgtgctggattcggaggatgagcggacaagctggaagatgcagggattgcggaacgactactttgccgtgctcgagagctgcgtagacgtcgagcgtgtcgagccgtacgccgtgctgaaccacggagattgctggatcaacaatctcatgttcggttaccaggacggagccgcccaatcggtgaccttcatcgactggcagctggcacggtacggctcaccggcgctggacgtcctgtacttcctgttctgctgctcggacgaagccttccgcgagaagcactacgacgagatgctgcgcatttactacacagccctgaaggatctgctcgagcagctgggcagcgaagcgatggacgtctttccgtttaccgctctgcttcggcagctcaaatcaacgggcaagtttgcggtaattatgggcgccctggacatcccgattctgtgcaccgatccggccgacgtgcacagccatggcgacgctgcgacggcgtttgccgcctccggtgaagcccagcagcggtacgcccagcggatgggtggtgtgattagggacgcgatcaagtacggttatctgtag

SEQ ID NO: 80 - DNA, 2094 bp, Culex quinquefasciatus
gccacaaacggacgtgtttttcgtttctttctcgcgggatccaaattttactcaacgacttttatttgtgtgcgtgccgtcgtcgtgcgtgtgcgtgtttgtgtgtgtcggagaaatttctcaagcagtttctggtggcagcaagtaggcgtgggttttgaagttttggcgttgctcgcgcggcttttgggcggaaatttcggtgcagatccggattcgagagtggtggaatttggcggaagtgtcctagcatcgagtggtggtttttgacgtgtggaaaagtattgattttggggtgcgaaaacaaaactcccggcgcgggaattttaaggaggaataagaagaccaagaagtgactgcccccttgtgaggaatatttttgtgctgctttgaggttgtgtttgtgtgaccggttcccccgcagtcgtcatgtcgcaaaagtccaagaggtccggcgtatcgacgccgattccggtgtcggccagcacgccggtgcagcagggtcggccgcagagtccgctgtcgccgacgcgcctcagccggctgcaggagaagaccgacctgcagggtctgaacgaccggttggcctgctacatcgaccgggttcgcttcctggagcaggaaaactcccggctcacgctggaggtgcgcacctcgcaggaaaccgtcacccgggaggtgtccaacatcaagcagatgtacgagcacgaactgaccgacgcccgcaagctgctggacgagacggcccgcgagaaggccaagctcgagatcgacgccaagcggatatgggaggagaatgacgacctcaagaagcgactggaccgcaaaacgaaggaagccgccgacagcgagcgcaacgcccgtgcccaggaatcccgcgccaacgagctggccggcaagtacaacacagtcctgtcggagcgcaaaaaggcccaggacgaacttaaagaactcgagaaggaggtggcccggctaaagaaacagctcgaaaccctgcgcaagaatctcgaagaggaaacgctggcccgcgtcgatctggaaaacaccgtccaaagcctgcgcgaggagctcaccttcaaggaccaggtccaccagcaggaactcaccgagaccaagtcccgccggcaggtcgaaatcagcgaaatcgacggcatcctctccgaacagtacgaggcgaagctgcagcaaacactgcaggatctgcgcgaccagtacgatggccagctgcgcgcaaatcgcgaagaaatctccgatctgtacgagtcgcgactacgcgatctggagctacagttgaacgccgaacggcaacgccatgccgccgagaagagcaaactccaggacgaaatcgaacgtctccggaaggagatttcgctgcaactgcaagagtaccaagacctcatggacattaaaatcacgctggacatggaaattgccgcgtacgacaagctgctctcgtccgaggaggtgcggctgaacatcaccccgggcagtcagaccacgatcttccagacgtccacaacgagctcgtcgagcgccggtcgctcgtcggcactgcgccgcggaacgccgacccgggccggagccaagcgcaagcgtaccgtcctcgaggagtcggacgaacgcagcgtgtcggactactcggtcacttcctcggccaagggagacatcgagatctccgaagtggactcggagggcaagttcgtcaagctgcacaacaagtcggccaaggaagtgcaaattgggggctggaccgtggtccgcaaggtcggaacgaacgaaaccgtgttcaagttccaccggacgctgaagattgacgggggagcgtttgtgacggtttggtcgtcggatctgggccacacgcacgaacccccgagcacgatcgtgatgaagggccagaagtggttctgcggtgacaacatgaccacgcagctgctgaacgtggagggagaggaagttgcagcgtcggaacgtgtcaagcgtactgtgtccactgccgcgtcccgccaccgagagttcctcggttcttacagcggagaggagctgtatcaccagcagggggaacctaagggcgaggaaaagtgtcgcatcatgtga

SEQ ID NO: 81 - DNA, 1371 bp, Culex quinquefasciatus
atggccggattgatccaccgtcagggttccgtactggtgcgccgactcctttccagcaggccatggaattcggcacttccggcacaatttcacacctgttcgttgctggacaagcaggtttcgttcaacctgtcggacattggcgaaggaatccgtgaggtgacggtcaaggagtggtttgtaaaggaaggcgatgtggtcgagcagtttgacaatctgtgcgaggtgcagagcgacaaggcttcggtgacgatcaccagccggtacgacggcaagatcgtcaagctgcacaagctggtcgacgagatcgcgctggtcgggaagccactgctggattttgacgtcgaggaagatgcggatgacagcagcagtgacagcagttcggacgaggaggtcgaggtatcgcagcaggccgtggctgcatcggtgatctccagtggaaaggtgctggcaacgcctgctgttcgaaggatcgccatggagaacaaggtcgatttgagatcggtcaaagcatccggacgaaatggacgggtgctgaagggggacgttctggaattcctcaacatcattcccgaaggaactgtcaagccacacccatcgatcgcggctcagcaagccaggactgccgctgcggcagcaccagctgtcaaaccactcgaattgaagcaggccgagaccgtggtgccgctgaagggcgttgccaaggcaatgtacaaatccatggtggaagcactgaaaatcccgcactttgcctacagcgacgagattgacgtctcaaagctggtacaggttcgggaagacctcaaaaaagaagcccttgcccagggagtcaaactgacctacatgccgttcttcgtaaaggccgcctcgaacgccctcaagcagttcccaatcctgaacagctcgttctgcgaggccaccgaaagtctgatctacaagtcgtaccacaacattagcatcgccatgcacactccgcaggggttggtcgtgccaaacgtcaaaaacgtcgaccaaaaatcgatcctggagatcgcggccgacctgaacgcccttcaggaacggggcgccaaaaacgccctcctgccggaagactttgccaacggcacgttctcgctgtccaacatcggaatcatcggtggcacgtacacccacccctgtatcatggcgccgcaggtggcgatcggggccatcggcaagacgaagctgctgccgcgctttgacgcgtccggtgccgttgtggcggcccacatcatgaacgtcagctggtcggcggaccaccgcgtcatcgacggcgtcaccatggcgagcttctcgaacgcgtggaaggcgctgctcgagaacccgcagctgtttttgctgagcgcgaagtag

SEQ ID NO: 82 - DNA, 2471 bp, Culex quinquefasciatus
atgttgtcacgctacaaccaactaattcgctactcgattcctctgcaatctttcagtggtagataccagcctgagagcgtcgtcagtggaaaaactcacaccacagcaggcggcggcggccagtaccgaaacggtcaccgtgccgctccgaactcggcagtctgtagcgaactgtcaagcggcaaggaagcaaccctcctgaacaacaaatctccggcaacgggtactcccaactacagcaccatggcaagtagcgatcgtctcggccagtggcccgcggaatccgacggcgaagtggccggagaggtgaccggattcgcacgacttcgcaacggacgcttcaataagggtcttgcgttttcgatcgaagagcgccaagctttgggaatccatggcttgctgccagccattgtccgcagtgaagaggaacaggttcagcattgtctgactttgctgaatcgatacgagaatgacctggacaagtacatctacctggttgggctgatggaccgtaacgagcggttgttctacaaggtgctcggatcggacattggcaacatgatgccgctggtctacacgccgaccgtggggctggcctgccagaagttcagcatgatctaccagcagccgaagggcatgtacatcacgatcaacgacaagggccacgtgtacgacgtgctgaagaactggcccgagaaggacgtgcgcgccatttgcgtgaccgacggtgaacgtatcctgggattgggagatttgggcgccaacggcatggggatcccggtaggaaagctggctctttacacggccctggcaggaatcaagccgcatcagtgcctgccggtcacgctggacgtgggaaccaacactcagagcattctggacgatccgctgtacgtgggtctgcgccacaagcgcatcaccggtgacgcgtacgacgagtttatcgatgagttcatggaggctgccgtccgtcggttcggccgcaattgcctgatccagttcgaggactttggcaactcgaacgcgttccgcttcttggacaaatatcgggacaactactgtacttttaacgacgatattcagggcactgcatcggtcgccgttgcaggtctgtttgcttcgctgcgggtcaccaagaccaagcttagcgagaacaaggtcgtgttccagggtgccggcgaggccgccctcggaatcgctgaactgtgcgtgatggccatgcgcaaggaaggcatcagcgagcaggaagctcgccagcgaatctggcttgttgatagcaagggtttgatcgtcaaggaccgcccgaagggtggaatttccggccacaagcaccgcttcgcgcacgagcacgcccccgtcgatacgctggccgaggcggtcaaggagctgaagccgacggtcatcatcggagccgctgccattgcaggtgccttcacccccgaaatcatccgctcgatggccgagttcaacgagcgccccatcatctttgccctgtcgaacccaaccagcaaggccgaatgtaccgccgagcaggcgtacgagcacaccgacggacggtgcgtgttcgcgtccggttcccccttcccgcccgtcacctacaagggcaagacgtaccacccgggccagggcaacaactcgtacatcttcccgggtgtggcgctcggagtgatctgcgccggggcggccaccatccccgaggagatgttcctcatttcggcccaacggttggccgagatcgtcaccgatgaggacctggaacggggcagcctctacccgccgctcgagctcatccaggactgctcgattaagattgccgtccgcgtcatggagtacgcgtacgcgaacggactggcctgcaccaagccggaaccgagcgacaaggaagcgtttatccgcgcgcaaatgtacgacctgggctacaagtcggccctgcccgctatctacccgtggcccaagctgtaaagcgcgatgagaacccctcatcaaatgtatattttttgttcatttcgtacgttcttcgtatttgcttagcaagataaaatcacgcgggtttttcgtttctaattaggctcaattatttcaaaaaactaaactaaacgatgatgtgtacattattttgctgttttgttttatactgtttagttgtttatttaagttgaagtgatttcgagcaaccacgctcactatttgttttccatctatgttgtgtattattgtccttgcttatttacaaacaaacaacgtaaaaaactcatcatttgtgtatgtaccttccggtgcgcgtcactttcatgcaacacacaaaatactttttaacaaaaattgtaatttattcgaaccaccacaatatataaataactaataagtcaatgttgatacataaatggtaggatatctgatcaacagttagctgatttatggtactacaaaaatatatgaatatatgtgtaagtggctatcaagttggtaaa

SEQ ID NO: 83 - DNA, 2526 bp, Culex quinquefasciatus
atgcctcaagtaccgaaacatgtaaacggaggagtctccttggagctggaacctcttgatggctttagcgataagaactcgtcctcgctcgacagtagcaatgagttcttcaagaaaaattccagcaaggggccgtcctcgctcgggtccgcctgcgagtcgatcgggttcgattcgatcaattatttgaaaaactcaagaggttcgttcagtacaaggagctcctcgtcgggtgatctcggtccgcccgagtacgacatcggtccgcatcgtgagcttccagtagacgttccggatagttttgttgaacagctcaatgggtctgtaaaaccgattccacccccacgcgatcatctgcgaatcgagaaggatggccggctgacgaatcgagcgcccgttccggctccccaggttccggaccggaagctcgtgcccgtgacaccaccccagcttccacacgtggcccaggtggtggaacccacgcccgaccagctggacagcatcaaaaagttccaggaacaactccgccgtcgacgagaggaggaggagcgaatagccgcccagaatgactttctgcggaacagcctgcgtggctcccagcggctgcgagcactgcaagataatccggtcgcggcggacaagcccgccatcggcgtggacaacgaggcgtacgctgatgacgaggagccggaaaagatcatcggatacgctgagctggtgtcggcactgcagcgattgcagggtcacctcaacaagcacggattggccgccctcgctggcagagttacggccgcccagagtctgctgcttgggccgggtatagcgcgtgccctcgccgcacgtacggccgtcctcgaaaggcggcgacccaaagtacagaaccccatttgctcaaattctcaggcactggtcaaggactgtgtcgaatccctggcgcaatccagttcgccggccgcaattgaattgtgtgatctactgtcgacgtacgagatggaggggttgctgctggcgcatgatcgtatcgcgtccaccaccgaccggacaccggcgttcggcgttagtgcggccagcggtgcaagtcccgtgccaaggtacggtatcccggtcgttgatccgatcctaggtcggttaatcaaatgcatcttctctttgcagcgcgaacctatgagcgttccactgggtgtgttacgggacggcagtcaggaccacattaggataatacagatcgagaaatcttcggaaccactgggagcgaccgttcgcaacgagggtgaggccgtggtcgttggccgggtggtgcgtggtggagcagctgaaaagtccggattgctgcacgagggtgatgagctgctcgaggtcaacgggatcgaaatgcgtggtaaatccgttaacgacgtttgtgccctgcttggagccatgagtggaacgttgacgttcctcgtggtgaccgccgggatgccaccgatggttccgggaatgcgcgatcctccggtgctgcatgtgcgagcccatttcgactacgatcctgaggacgatctgtatattccgtgtcgtgagctgggcatcagctttcaaaaaggagacgttctgcatgtgatatctcgcgatgatccaaactggtggcaagcataccgcgagggcgaacaggaccaaactctcgccggtcttataccgagtcagtcgttccaacaccaacgagagtcgatgaagcttgcgattgccggtgaggttggactccgaacgaggaaagacgccaacggaaaagcgggcggttcgacgcttctgtgtgctcgcaagggccggaaaaagaagaagaagcctagcagcgaacacggttacccgttgtacgcaacggcaaccgccgaagatccggatccggaggagattctcacctacgaggaagtcgccctgtactatccacgtgcatcccacaaacgaccaattgtgctgattggtccacccaacatagggcggcacgagctgcggcaacgactgatggccgactccgaacgatttgcagctgccatacctcatacttcaaggccccagcgcgaaggtgaaatacccggacaagactatcactttatctcaaggcaacagtttgaatcagatatactcgcgagaaagtttgtcgagcacggcgaatacgaaaaggcgtattacggtacttctctggaagccatccgtgccgttgtggccagtggaaagatttgcgtactgaacctgcacccgcagagcctaaagctgctgcgatcatccgatctgaagccctacaccgtgctggttgcgccacccagtttggagaagcttcgccagaagcgaatacgaacgggtgaaccgtacaaggaggaggaactgaaggaaatcatcgccacggcacgtgacatggaggcgcggtggggccacttgttcgacatgatcatcatcaacaatgataccgagcgggcctaccatcaactgctggccgaaatcaactccctcgagcgggaaccacaatgggtgccaagtagctggctacacaactaa

SEQ ID NO: 84 - DNA, 1485 bp, Culex quinquefasciatus
atgaactcccaatcgacgttgtacggcatccagagtacggccggggccgtccccgtccggaacacaaaaggtgagctgtctatgcaaaaggtgaaggtccaccgttacgtgtccggtaagcggcccgagtacgcccagtacgccagcagtgacgaggaaacggacgaggatgacttcattgacaaccggcggacggcggctgccgcggcggaagagcaactgcaccgcgaggcccggcgccgtcacgaggaatccgatgaggaggcggcggccgaggccgtggacgatccgcggttgcgtcgcctgcaggcggtccgtgccgccgaagccgaggagatcgagcgcgagcgtcgggaacggcaccgcgtgattcacgagccggagctggtccagtcagaagaggaggaaggagagggagagccgcaggaggaagagggggaagattcgcggcagcacttgagacatcggcagcggccggaagagtcggatgacgaggaggaggagcaggttgaggaggctagagagagtgtgctgcgaaatcggcggatttcggttggttccgaatcgggggagtcggaggcggagctgagcgatacggagattgaacggcgcagacagtttctgaagattaaaatgatgatgcagaagcgggaggaagaggtgctgcaaaaagaggaggaaggtcactcggaaacgtcggaggaggagagttccgagtatgaggaaaccgagagcgaggaagagaacgaaccacggttgaagccgctgtttgtgcggaagaaagatcgcaccacggttatcgagaaggaacgcgaggccaacaagcagaaacagctcgagtacgaggcgaagaaggcggccaaagagcgccgtcggcagacgctgaagctagtcgaggacaccatcaagaaggacatggaaaagatcaaaacggacaacgagcccaacctgaacgacgttaacacggacgacgagaacgatgaagtggagtacgaagcatggaagctgcgcgagttgaagcgcatcaagcgggatcgcgaggagaaggaagcgctggaaaaggaaaagatcgaaatcgaccgactgcgcaacatgacggaggaggaacgccgccaggagttgcgcctcaacccgaaacagatcaccaacaaaacggtcaagggcaagtacaagtttctgcaaaagtactaccaccggggtgcgttctacctggacaacgaggacacggtctataagcaggacttttcggcgcccacgctcgaggaccacttcgacaagaccatcctgcccaaggtcatgcaggttaagaactttggccgctgcggtcgcaccaagtacacgcatctggtcgatcaggacacgacgcggttcgattcgccgtgggccaccgaaagcaccagcaataccaactttaacacggaacgcgccggcgggatgaagcaggtgtttgagaagccgtcgctgtcgaaaaataagcgggattag

SEQ ID NO: 85 - DNA, 1467 bp, Culex quinquefasciatus
atggacgactacctcggttccgtggccctgccgagcatgaagcagcgccagaaaaagttgtgccaggtgaagatgaaagcacgtgcgaaccctgtttacaatgattccaccaactttggcgtgcggatgctcgaaaagcttggctggtccgagggcaaggggctgggtaagcgcgaggacggcatgtcggcgccgattctgcccaagctgaagcaggacagcgaggggttcgggtacgccggcgaaaaggacgaccactggacgcagcacgatcaggactttaaccagctgctcaagtcgttgaatggcggagaggatgacgcgcaagtgggggaggatgaggtggacctggcgaagatgaagtcgctggaggaaaagtcgaagaattcgcgcgcccgggtgcactacaagaagtttacccgggggaaggatctgagccgggctagcgagaaggacttggcgaacatattcgggaagaagtcgctggaggaggtcaagagtcagattgtgggcggtgaggtggcggacgaggtggaggtggaggaggaagctgaaccctcggaggagaggaacattttggggttgacgacgattaaggccgccgtgtcggtgcaggactacttcaagatgaagatgcaggagaagatgggggtgaaggttgcggctgccgtggaagagccggacaggaaaaagtccaaaaagtcgaaacgaaagcatgaagaggaagtgcaaccggaaccggaaccagagcctgaagtttgtcaagaagtcgaagagattcccaaaaagaagaaaaagcgttcaaaaaatgaagcaccggaagtagaggtcacacaggaagttgaagaaactcccaaaaagaagtccaaaaaggaaaaacgaaggcaaattgaggaggaagctcaagaaactgtaggagagcagatcagcttagaacagttggaggaacctgttgagcgaaagtcgaagaaaagtaaacgcaagccatccgacgacagtgaggaagttgttggcgaagtcgtcgaagaagcagcgacattagagcaagtcgacgaggcgccaaaaaagaagtcgaaaaagaaaaagcgaaaacagtcccaggaagatgatcaggactgccaacccgttgaggaggaaatcgaacagattcccaacgaggtccccacggaaggcaaaaagaaaaagaagaagaaacaggacgagcacgacggtgacgacgacgacgacgacgaagtgacgtgccgcgtgaaggtcagtgttttaaagcaactggacgagcactgcttcgccgggtctaactttgcggatattgtaggctacgggctaacgcaggacgtgaagctggtgcggcgcgagggaaagacgaagcaaacgctggagaagcaccagtttgtacggcagaagcagacgtcggcccaccggaagcggcagatgctgaagaaggtgagtgcgttcaaaggaatttga

SEQ ID NO: 86 - DNA, 1296 bp, Culex quinquefasciatus
ggggctttagtcaagacaagtcactctagtcaataacagcccagcatcatgtctgagaagaaggaaaagaagaccaagaagaaggcctcctccaaggatgagactcccgccgataccccagcggcagagaccccagcggcgccgactccctcggactctggctcccagcgaggatccacccgtggatcttcgtcccgcaaggctaagaaggccccatcctccgtcttcgtcctcttctcccagaagcagatcgccgaattcaaggaggccttccagctgatggacaacgacaaggatggtgtgatcggcaagaacgatctccgttcgaccttcgatgccctcggcaagctggtctcggacaaggagctcgacgagatgctgggcgaggcctcgggaccgctcaacttcacccagctgttgacgctgttcgccaaccgcatgtccggtggaggtaccgatgacgacgatgtcgtcatcaacgccttcaaggccttcgacaacaacggccgaattgacggtgagaagttccgttatgccctcactcactggggtcaggacaagttctccgaggatgaggttgacgatgccttcgaccagatgatcgttgacgataagggcttcatcgacaccgctgccctgatcgccatgctcaccggctccgaggagggagaggaagaataaacggattcttcacgaaccaccaaaaaaacccaaccacttctatttatttaaagaactcttacttgtaaacaacatctacaaagaacaagcagtgacaacaacaacaacaacaacaacaacaacaatacggagaacatcttcatgtaatcacaattccatttgcttacatcatctgattctaaattattacttttattttctatgataagacatgaattttaagctataaggaaaataaagttatataaaaaaatctataaaaaataaaaccaaaaaaagtgcaaaacttaaactcttagaaaaggagaaaaaacacgcttttactagaaaatcgcacatacacacaaaccaaaatctggtccttttccaaaccaaccaagccgagccatcaaccatcatcaattttcaaacaaaaggttctttttaccctctcgaacacgatcaccacctggcgcgcgcagctagagcgacatccaccagatagaaagcgcgcccaactttgccggtagagcttgacgttaacagaagcaaacagaaacaggaatgtgtacacaaattggaattttgaaacaataaaaacatagtttgttgcaaataaaaatatgacattccgtt

SEQ ID NO: 87 - DNA, 5469 bp, Culex quinquefasciatus
atgttcggctgggacataagtcaacccatcgattggtggatttgtccttctcatttcctcgagatctgcattcgtgcaaggacggcgtcgttattggacgcccgcgtgtggatcccccacccggagacggtatggcagggtgcggtggtgctcgccgactaccgcaaagacaccggcacgctcgagctcgtgacggaccggggcgccgagaaggttacgcttcaggtcaagtcgaccgccgatctgccccacctgcgcaatccggccatcctgatcggccagaatgaccttacggcgctgtcctacctgcacgaaccggacgtgctgtacaacctggaggtacggttctgcgaccggcacgccatctacacgtactgcggcatcgtgctggtggcgatcaatccgtacgcagagctgccgttgtacgggccggatctgatccgggcgtaccggggtcactcgatgggcgagctggagccgcacatctttgcggtggccgaggaggcgtacgccaagctggagcgggagaaatgtgatattagtataattgttagcggggagtccggagcggggaagaccgtttcggcgaagtacgcgatgcggtattttgctgcggttgggggtagcgaatcggagacgcagatcgagaagaaggtactggccagcaatccgatcatggaggcgatcggcaatgccaagactacaaggaatgacaacagttcgaggtttggcaagtttacaaagctgctgtttactaacaatttgtccatgatgtccttgactggggggaccatgcagacgtacctgttggagaagtcccgggtggtgtttcaggctccaggtgagcgaaactaccacatcttctaccaactgtgcgcctcgagaaagcaatatccggagctgatgttggaccatcaggacaagtttcacttcctgaaccagggtcaatcgccggacattgcgcgtgtgtcggacgaggaccagtttaaggaaacgatgaacgcgttgaagatcctcgggtttgacgatggcgaggtcaacgacatcatgaagatgctggccgctgtgctgcacctcggaaacatcgactttagccacaagtacaagaagcaaacgcaggaggtcgaccaggaggcttgcagcgttgcgtccgacgacctccatctgaacatcttcagcgacatcctgaagctgaaccgggacgagctgcgcaagtggctcgtgacgcgccagatcgagtcgttcaatgacagcgtgctgattccgcagaacaaaccccagtcggaagcttcacgggatgcgcttgcgaagcacgtgtacgccgagatgttccagtttatcgtgaagaagatcaaccgaaacttggcgggtggaaagaaacaaaactgcttcatcggcgtgctcgacatctacggcttcgaaacgttcgacatcaactcgttcgagcagttctgcatcaactacgccaacgagaagctccagcagcagttcaaccagcacgtgtttaagctagaacaggagcagtacctgaaggagggcatcgagtggaagatgatcgatttctacgacaaccagccgtgcatcgatctgatcgaagcgaagctgggcattctggacctgctcgacgaagagtgccgaatgccacgtggctcggacgagtcctgggtgggcaagctgatggaaaagtgcaccaagtacaagcactttgacaagccccggttcggcacgagcgccttcctgatcaaacacttctccgatacggtccagtacgagtcgcagggcttcctggagaagaaccgcgacaccgtgtcgaaggagctggtcaacgtgctgcggatgtccgagatgaaactgtgccataagctgatgaccgcgcaggacgagacggcggaaacgccggacgtgaggagtccgggcgtgaagctggtcgtcagcgccgccaagagtcagcctgcagatagacgacgaaagccgatgacccagaagcaacagcgcaagaccgtcggttcgcagttccgggagagtttgaccctgctgattacgacgctgcacaacaccacaccacactacgtgcggtgcattaagcccaacgaggacaaggcggccttcaagtgggagccgcccaagatcgtgcagcagctgcgggcgtgcggcgtgctcgagacggtccgcatctcggcggccggcttcccgtcgcgctggacgtacgaggacttttacgagcggtaccggttgctgtgcaagcgcgtccagatcgtggactggaacgtgaaggccacctgcacgaacattgtgcgcaactggctgaccgactcggacaagtaccggctgggcaacacgcagatcttcttccgcgctgggcaggtcgcgtacctggagcagctgcgcagtgacgtccgcaagaagcacatcattctggtgcagtcgttgataaggcggtttatctgcaggaacaaatatttgcggctcaagcggacggcgctggggttgcagcggcacgtccgggggatgttggcgagaaagaaagcggacaatctgcggaagaatcgggcagcgatcaagatccagcgctacatgcgaggttggttgcaacggaccaagtaccagaggactcgcaaaacggttctgggactgcaaacctacgctcgtgggatgcttgcccggaggaagttcaagctggcgttggacaactacaaggccatacagattcaacggctttgccgcggttatttggctcgtcaacgagctcagaagcatttggccagtatcatcaagtgccaggcgaccgtgcggcgtttcttggctcgtcgtctctacaaacgcttgaaggcagaagctcgcacgatctcccacatccagaagatgtacaagggtttggagaacaagatcatcgaactgcagcagcgttacgatacgctgtcgaaggagagtgctgttttgaagaagcagaacgcggaaattccagaaatgcgacaaaagttggacgaaacgaggcggatgcagaacgagctgaaggcgctgaagttgcagctggagcaaaaggacgaaaagttgctgatcgtgatcaagcagctcgagaacgagcgtgacgaaaagatgatcttgctggaggaaaagcaaaaagaggaagaagaacggatgaaggaacgtgcccagatggaacaagacctggccaaaatgcgcgatcaggttaacgagatcaacaacgtggccaagatcgagcgggatcggctactctcccaagcggacaccaacgagattcacgcggcctaccagcgcatggtcaaggacaaagatcaactggagggtgaaaacaatgcgctgaggcacgaactgcgtcgcctgcagcacatgatcaccaacaaccacgacctgaagacgcactcgcgatcggtgagcaacgcttccagcaccaacgaggaggactacgggtacaactcgggcaagaacacgctggagattcggccctcgccgctgtcctacgaagaccactccacgccaaacaccaccgaaacgccggagaaggaccagaccgccatcatcctgaagatgcgcaagctgttcgagcaggaaaaggacaagagcgaccagctgcgcaaggaggtggcccggttccgcaagagttcctcgctcagcacggaggactcgatccgggcttccgagctggaggtcgaaatcgagaagctgcggcaggactacaatttgcttcggaacagtattaagcgtggtgttgaggagcgcgaaatggaggcgcaatatctggcacttcaggaggagttgaagcgtcgccgggaggagtgcatctcgctgaaggcggtgctggcgcagcaaagtcagagcttgaggacgcttggtcagtcgagggggaataataatggcgatagcagcatgagcaggattcatgacgagggcgagctgatggaggcgttccaggcgcagaaactggtcaatagacagctggaggcggagttgagtgccatgatggaagcgaacaacgaaacgctggtggagaacaacaagttgtttgaggctttgcggaaggaagtgggcgatttgcagagtatactgcagagcagacttgagaacacggagaatgcggacgtggaaacgctcaggttgaacgagcagtacctgaggcatgagttgaagaagtcgacggcggcgtacgttgagttgcaggaacagatcaacgaactgctggtgaagatcaacgagctgaccaagaagaaccacattttgtcaaaccggttgagggatcacgggttgaacgattcgatactgatgaacgaagagttccagaacatggtgacggtcaagaaaaaggctcagtcgaaccagggtattttgaagtatcgccacgaggatgaaacgaagatcatccagcggttggtgaccgatttgaagccacgcgttgctgttacgctggtgacgagcctgccggcttacgtcgtatttatgtgcattcggtacaccgatttggtcaacacggatcagcacgtgcgctcgctgctgacgcggtttgtgcagatgatcaagcgactgttcaaggcaccgaacccggccgagattcgggtcatgtggctagtcaatacactcacgttacacaatctgctgaagcagtttggcggctacccggagtacatgcagtacaacaccgagccgcagaaccagcaacagctgaagaactttgacctgtccgagtaccggcaggtgatccacgagacgatcatcctgatgcacggcgtgctgctgcggcaggtgcaggaatcgatcaaacagttcatcgtgccggccatcctcgaccacgacgaaacttcgcgaggaaagagccgtggccgtacaatgtcgctggacatgtcgcccgagcagaaccgcgagcccaagacgctcgtccagcagctggacatcttttacaagcacctgagcagcttcggcatggagaattactacatcgagcagatctgcaagcagctaatgtactacatctgcgcggtggccgtcaacagtctaatgctgcgcggtgatctctgcatgtggaagacgggcatgaagatccgctacaacgtgggctgtctggagtgctgggtgcgcaccatgtcgatggacccggacgtggtgaaaccgctggagccactgattcaaatctcccgcatcctccaagctcgcaaaaccgaagaggacgtccagacgctgctcgagctgagcacgtgcctcacgacggcgcagatcttgaagatcatcaaatcgtacacgacggacgactgcgagaacgaaatcaagccgatcttcatcgagaagctgacgaagcagctgaacgagcgctcgcagcaaagcgaagccgacacgtacatgatggacgaggagatcgtcagcccgctggtcgtggtgtacaagtacagcgaggtgaacctggaagaggtcgacatcccggacgacctcaacctgggcggattgatcacgaagatctag

SEQ ID NO: 88 - DNA, 1083 bp, Culex quinquefasciatus
atgaaggaggcgataactgtgattaagatcctgccggagaatgaccagcaccaggtgaacgcgttgaagcacctgcaggagggcaaatatcaggagctgtgccagccgctgggggaccgcaggaaagcgtcagagttgaaggtgggtgaggccgcgtggaaggtagagtccgaggacgaggttgacgtcgaagtgacggaacgcttcaagcggatggcccttaacttaaagtaccagcactcgaagataatcaaggacgcgcagggcattccggcgttctggttgacggtgttcaagaatactcagaccatggccgacatgatccagccgcacgacaaactggttctgacccacttgaccaaagtggacatcgtctgcaagaccgacccgatgagctacgtacttgagttccacttttcactttacgaaacagtgcaggaggacgacaagaacgttgtagacgagaagcagatactcctgaagtcggacatttctgaagttgacacttcctgcgcgcccgccatcctgtactacaccggcgaggtgatggacgaggacgacgacggtgaagaggaggacgaggcaagaaccagaagcaccgaggtggtcacggtggcggcggcggcatgtaaaggacgcccaaaatccggtcgagtgccagcagcagtaaagcagcgatggaacgtgagtgaatcgacggcaaaaacgcgtcgctgctggttccggttctatcgaaacgttgtggcatctcgcctcgcatttttacccgcccacaaaattcagtccgccggagaaggttgttataaaaaaaagaacgggcatccgatttcaactcgggttggcaagaagaagcacaaaactaagggaccgtatcatgaggcaagtccggatcaccgggaaccggtatcacttggcttgcttaggccgtgtccaatcaaacgtcgacaacgcaacgatccggtgcgtttttgggtcggatttgatttaaaaaatctcggcgatggtccgaagctagttcgcgagttgttccgtgtggccgacgaaaacgacgccgtcggtaccatggagtgcgattcaatgtag

SEQ ID NO: 89 - DNA, 1005 bp, Culex quinquefasciatus
atgagttccgcggaagtgaccgccgccgctaaacctgcagacgccccggaacactgcccgggaacggccagcgaatcggccggcaaagcatccgcctgtgctggctgtccgaatcagcagatttgcgcaaccggaccgaagggccccgatccgtcgattgcactggtcaaggagaagcttcgggaggtccggaacaaggtgctggtgctgtcggggaagggtggcgtggggaagagtaccgttacggcgctgctgagccgtgccatggcccagcacaatccggaccggaactttggcgtgctggacattgacatttgtggaccgtcgcagccgcgggttctgggcgtgctcggcgagcaggtgcaccagtccggatccggctggtcgcccgtgtacatcgaggacaatctgagcctgatgtcgatcgggtttttactaggcagtccggacgacgcaatcatctggcgtgggccgaaaaagaacggaatgattcggcagtttttgactgaggtggactggggtcagctggactacctggtgctggacacaccgccgggaacctccgacgagcacctgtcggcggcaacattcctcaaagtaaccgatggacgttggggagcggtcctggtgacgaccccgcaggaagtggctctgttggacgtgcgcaaggaaatcaccttctgcaagaagatggccattccggtggtcggcgtcgtcgagaacatgtctgtgtttgtgtgtcccaagtgcgccacggagtcggacatctttccggcgaaaacgggcggtgccgagcggatgtgtgccgacatggaggtgcgatacttgggcaagctgccgctggatccgcggctggccaagtgctgcgacgagggaaaggatttcctggcggaacatgcgggcagtccgacggtgacggcgctcaagggcatcgtggcccgcgtgcaggagttcttcgagacggatcgtctaacttgtacgtgcgtcaaacgcgttctgacctga

SEQ ID NO: 90 - DNA, 494 bp, Culex quinquefasciatus
ataagttatgagcttacctccccgcggatacagcagttcaagaattaaacgtaaagaaaatcagcaaccattgcgtatcaacatgccgtcaataagctttaacatgcgtgagccaatgagtagtagtaatcgtgccagtaaacgcacgatttcgtcgtcgtcgtcgtcctcctcttcctcctcctcgtcggcgggcttcgactcctactgtgtttcgttggctgtaggaccgctgtggtggtcctgatgtcccaacacccagaaccgaccacgatagggcgtctcccttgaaagaatacaatcgcaagacatctatagattcgaccaccaccgcttcgtctgagtataccgatcttgatttcaccgagtcgaccgtagattacatgaaccagcatgaggccgccgtcatccaggaagtgctgtcccagccgacgcccacccaggtcacgctgaagctgttcgtgaccgcgcagaagttcagctcctgggagacg

SEQ ID NO: 91 - DNA, 2649 bp, Culex quinquefasciatus
atgtcgtcctctgccgtaacaacgaaaacttcgaagtacacctacaaatccagtggcggaggtaccgctgatgtcagcatcgagtacagcgctgacctgagcgccttgtccagactggaggacaagctgcgcctgctgcaggaggatctggagtcggagcgcagcctccgccagaggattgagcgcgagaaggccgacctcagtgtgcaggtcatccagatgtcagagcgcctcgaggaggctgaaggtggtgccgaaagtgtgctggaaatcaaccgcaaacgggacgccgaactgaacaaactgcgcaagctgctcgaggatgtgcacctggaatcggaggaaaccgcgcacatcctgaagaagaagcaccaggaaatcgtgagcgatttcaacgagcaaatcgaatcactgaccaaagcgaaacagagggttgaaaaggaaaagtccaagctgcaggccgagatctacgaactgctgtctcagatcgagagcgtgtccaaggataagtccgtcagtattaagaccatcgagaagcttgaagtgcacgtgactgagctgaacattcgcatcgaagagctgaaccgcaccatcgtcgatatcacctcccacaagacgcgtctgtcgcaggagaacatcgacctggtcaagaacgtgcaggatctgaagatcaacatcgaaagcatcagcttcgccaagtcccagctcaactctcagtttgaggatgccagacgtcgcctggaagaggaggatcgtcgccgatccatcctggagtccaacctgcaccaggtcgagaccgagctggaatcggtgcgcctgcagcttgaggaagagtccgaggctcgtctggacctggaacgtcaactgattaaggccaacggcgaagccggaaccttcaagtccaagtacgaggccgaagtcaatgcccgaaccgaagaggtcgaggaaattcgccgcaagtacaccattcgcatccaggaatcggaggagcacatcgagtccctgcagctgcgactgagcaagctcgagaaggagaagagccgcatgtcgaacgaaatcgaaatcctcatcatcgacttggagaaggccaacaacggcattcgcgagtacagcaaacgtatcgaaattctcgaaaaaaccaacatcgaaatcaagacccgtctggaggaaaccatcaccctgtacgaccagtcgcagcgcgatctgagacaaaagacccaggactaccagcgtctgagccacgaactggatgcgacccgcgagcagaaggatcagctgacgcgcgacaacaacaagatgcagaaggagctgcacgagtcccgggccgccatcaccgacctgacacgtcgtcttcatgactatgaagttgagctgcgtcgtctggagaacgaacgtgaagagctgaccgccgcctacaaggaggccgagtctggacgcaaggctgaggagaagcgcgcccaggctttgtccgccgagtacggacagttccgtcacgataccgagcgtcgtctgctggagaaggaggaagaaattgagatcattcgcaagcagaccagcatcgaaatcgagcagctgaatgcccgcgtcgtcgaggccgagaccaagctgaagagcgaggtcatgcgcatcaagaagaagctgcagatccagatcaccgagctggagatgtcgctggatgtggccaaccacaccaacatcgagctgcagaagaccatcaagcgccagtcggctcagctgaccgagatcacggcccactacgacgagatccagcgccagctgcagtcgaccgtcgaccagtacggcatcgctcagcgccgcatccagtcgctgaccggagagctggaggagatccgcgtcaactacgactcgtcgctgcgctcgaagcgccaggtcgaggtcagcctcgaggaggcccagtcgcgcatcaacgagctcaccgtcagcaatgccagctacgccacgctgcgcagcaagctcgaacaggaactgcagacgctggccgcggactacgaggaagtcacccgcgagctgcgcgtcagcgacgaacgctaccagaaggtccaggttgaactcaagcacaccgttgagctgctgcacgaagaacaggaaagaatcgtcaagattgaaaccatcaagaagtcgctggaagtcgaagtcaagcaactttcaattcgtcttgaggaggttgaggtcaacgccgttgccggaagccgtcgcatcatcagcaagctggaggcccgcctgcgcgacatcgaagccgagctggaaggcgagaggaatagacactcggagaccatcaagatcctgcgcaagaaggaacgctccgtcaaggaggtgtacatccagatcgaggaggaccagaagaacattcagctgctccaggacgccctggagaaggccaaccagaagattgccgcctacaagcgccagctggttgaacaggaacaatgctcgcagcagtgcgtcaccaaggtgcgtcgcttccagcgcgaactcgaggccgctgaggaccgtgccgattgtgctgagagcaacctgaccatggtccgtgccaagcaccgcaccttcgtcaccacctcgaccgtgcccggatcgcaggtctacctggtccaggaatccaccaccagaaccgtcaacgagtcgtcttaa

SEQ ID NO: 92 - DNA, 727 bp, Culex quinquefasciatus
caaaccagaaccagacagcggcggcggcaaagcttgcttggattgaggagcatcttctgacaaattaatttgacgattgctaacgatgggtaaggcaaaggacagcaaggcctccgacagcgattccagcgaggaggagtatgttgtggagaagattgtggaccggcgggagcgcaagggcaagatcgagtatctgctcaagtggaagggttacgactcgtcggccaatacgtgggaaccgaaggagaacctcgagtgtcctgagctgattaaagcgttcgaggacacgagagtcgttcccaagaaggagggttcgaaggacaaagacaagaaggaggaaaagaagaagcccaaaccgtccagcacgaccggaagtggcagttcgaagcgaaaggactcggacgcggataacgatggatcggacgacgacgacaaagatgacaacgcttccataaaatcgagcaagtccaaatcgacgactgcggccgccgacaacgatgccaccgccagtgacgacggaatgaacggcttcgagaagggctacaccccggagaagatcctcggtgccaccgaagccaacaacgagctgctgttcctgatccagtggaaggacaaggacaaggcccagctcgtctcttcgaaggaggcccgcaaacactgtccccagcttgtcatagacttctacgaggagcgtttgatctggcagtcgccggacgcgacggagtaa

SEQ ID NO: 93 - DNA, 996 bp, Culex quinquefasciatus
atggctgacggcaacagttccgacgaggagttcggggacgagtggaccctgtacgcgacccggcccgagtggaaggacgttgaaccgctgaagcaggatgacggcgagaatccggtggtcatgatcgcgtacagcgaaaagttcaacgacgtgttctcctatctgcgggcggtcatttccaagcaggaaaagtcgctgcgggcactcggattgacgcaggatgcggccaagctgaacgcggccaactatacggtgtggcagtaccggcgggacattctgaaggcgttgaattgtaatttgtacgatgagctggactacatcgagacggtgatcgaggacaatccgaagaattaccaggtttggcaccatcgccgggtgattgtcgaatggttgaacgatccttcgcgggagctggagctgacggagaacattctgaacatggacgcgaagaactatcacgcctggcagcaccgccagtgggccatcaagagctatgggttgtttgaggacgagctggtgtacgtggaccggttgatctccgaggacatgcgcaacaattcggcctggaacgagcggttcttcgtgctgaagcacaccgggtttacaccggaagtcctcgagcgcgagatcacctacgtaatgaaccgcattcggctgatcaagaacaacgagagtccgtggaactttttgcgcggtctgctccagcagggcgacgggaaactcggtcagtttcaggaaattgtcgacttttgcgaagatctgtacgactcgggcatccggacgccgtacctgctagcgtttctggttgatctgtacgaggagaaatactttgaagctaggggcgaggcaaatcgggaagaataccggaccaaggtgcaggacctgtgcgaatcgatggccaaccagcacgacaagatccgcgccaagtactggcggtacattgcggagaactttagacggaagctggcggcggaggaaaatcaaaatgggctgtaa

SEQ ID NO: 94 - DNA, 631 bp, Culex quinquefasciatus
ctactcaagtgttcgttcggttcagacgccattacagaatgggcaaaccacgtggaatccgtaccgctcggaagcacatccgtcaccgccgggaccagcgctgggccgacaaggattacaagaaggcccatctgggaacccgctggaagtcgaatccgttcgccggagcgtcccacgccaagggcatcgtgctggagaaggtcggcgtcgaagccaagcagccgaactccgccattcgcaagtgtgtccgtgtgcagctcatcaagaacggcaagaagatcaccgcgttcgtgccccgggatggttgcctcaactacatcgaagaaaacgacgaggtcctggttgccggtttcggtcgcaagggtcacgccgtcggtgatattcccggagtccgcttcaaggtggtgaaggtggccaacgtttccctgctggccctgtacaaggaaaagaaggaacggccacgatcgtaagctgtggttttttttagtctggccgggaccaggaagtcttgctggaggatgattacaaacaacaacttatgttaattgaaaatgccctgtaaaacataacaagagtggaggaaaatctgaatacaagcttctgtgacagttcttgtacaacggaagttgca

SEQ ID NO: 95 - DNA, 195 bp, Culex quinquefasciatus
atgcataattccaagcaagacaacggaatttcggttgctgtccggtccccgggacccctggaggaagtttcatgcccgggaaagtaccgcgacgagatcccgttcgtgaagccggccccgatcgagctggaaacggcggcggccgccgccaagaaggacaagaagggcggcaagaaggaaactgcggcagcctaa

SEQ ID NO: 96 - DNA, 912 bp, Culex quinquefasciatus
atgtccgggaaaatcaacaatccgaaacggcgagaggtcactggttcgtcgtcgtcaaattcctccatctcgtcggtgggcgcaggggacaatggaatttcggcagacctggcatcgctgttcgagtgtcccgtgtgttttgattacgtgctgccgccgattctgcagtgccagagtggccacttggtgtgcaccagttgccgttcgaagctgacctgttgtcccacatgccgcggctcgcttggcaacatccgaaacctggccatggaaaaggtggcctcgaacgtgaaatttccctgtaaacattcgaaccacggctgtaccgtttccctggtgtacaccgaaaaggccgaacacgaggaggcttgcgagttccggccgtatctttgtccctgcccgggtgcctcctgcaagtggcagggctcacttgactacgttatgccgcatctgatgatgtcccacaagagcataactacactccagggcgaggacattgtctttctcgccaccgacatcaacctgccgggggccgtcgattgggtcatgatgcagtcctgcttcgggcaccactttatgctggtgctggaaaagcaggaaaagtacgacggccaccagcagttctacgccatcgtccagctgatcggatctcgaaaggaggcggaaaactttgcctaccggctcgaactcaacgggaaccggcgtcgcctcacctgggaagcgatgccccggtccatccacgagggcgtcgccagcgccatcctcaactcggactgcctcgtgttcgatacctcaatcgcacagctgtttgccgacaacgggaacctcggaatcaacgtaactatctccgttgtttaaatagtgaggacatcccgaccccatcttcgttgattttcattactttaatcttaatac

SEQ ID NO: 97 - DNA, 2708 bp, Culex quinquefasciatus
atggccgaaggaaagaatgaggatttggcgaccgcgatcctgaagcgcaaggaccgcccgaaccgtctgatcgtggacgaggccgttaacgatgacaactcggcgaaaatggacgagctgcagctgtttcgcggcgacaccgtgctgctgaagggcaagcgccgcaaggagacggtctgcatcgtgctgtccgacgatgcctgcccggacgagaagatccgcatgaaccgcgtggtgcgcaacaacctgcgcgtccggctcggggacgtcgtctcgattcagtcctgcccggacgtcaagtacggcaagcgggtccacatcctgccgatcgacgacacggtcgagggactgaccggaaatctgttcgacgtgtatctgaagccgtactttttggaggcttaccggccgatccacaaggacgatacgtttatcgtgcgcggaggcatgcgagcggttgagttcaaggtcgtcggagcggatccgtcgccgttctgtatcgtggctccggacacggtcattcactgcgagggagatccgatcaagcgtgaggaggaggaggaagcgctgaacgcggtcggttatgatgatattggaggttgccgcaagcagctggcccagatcaaggagatggttgagctgccactgcgtcatccgtcgctgttcaaggcgatcggtgtgaagccaccgcgtggtattctgatgtacggaccgcccggaacgggtaagacgctgattgcgagagctgtggccaacgagacgggcgcgttcttcttcctgatcaacggtccggagattatgtccaagctggccggtgagtcggaatcgaatctgcgtaaggcgttcgaagaggccgagaagaactctccggccatcatctttattgatgaaatcgatgcgattgctccgaagcgtgagaagacccacggagaggtcgagcgtcgtattgtgtcccagctgttgacgctgatggacggcatgaagaagagcgcgcacgtgatcgtgatggccgccaccaaccgacccaactcgatcgacccggctctgcgtcgttttggacgtttcgatcgtgagattgacattggcattccggacgccaccggacggttggaggttctgcgcatccacaccaagaacatgaagctggccgatgacgtcgatctggagcagatcgcggccgagtcgcacggtcacgtgggtgccgatttggcctcgctgtgttcggaagccgccttgcaacagattcgtgagaagatggacttgattgatctggaggacgatcagatcgatgccgaggtgttgaactcgctggccgtgtcgatggagaacttccgttacgccatgaccaagtcgagcccgtcggcgctgcgcgaaaccgtcgtggaagtcccgaacacgacctggaccgacatcggtggtctggagaatgtcaagcgcgagctgcaggagctggtccagtatccggtggaacatccggacaagttcttgaagttcggcatgcagccgtcgcgtggtgtgctgttctacggaccgcccggatgcggtaagaccctgctggccaaggccatcgccaacgagtgccaggccaactttatctccgtcaagggaccggaactgttgacgatgtggttcggtgagtccgaagccaacgtgcgtgacatcttcgacaaggcccgttcggcctccccttgcgtgctgttctttgacgagctggacagtatcgccaagtcgcgtggtggcaacgtcggagatgccggcggtgcggccgatcgtgtcatcaaccaaattctgactgaaatggacggcatgggcgccaagaagaacgtcttcatcatcggtgccaccaaccgaccggacattatcgatccggccatcctgcgtccgggccgtcttgatcagctgatctacattccgctgccggacgacaagtcccgcgaggccatcctgaaggcgaacctgcgcaagagccccgtcgccggtgatgtcgacctgacgtacgtcgccaaggtcacccagggcttctcgggtgccgatctgacggagatttgccaacgtgcctgcaagctggccatccgtcaggcgatcgaggccgaaatccgccgcgagcgtgaacgcaccgagaaccagagctcggccatggatatggacgaggaagatccggtgccggaaatcacccgggctcacttcgaggaggcgatgaagtttgcgcgccgttccgtgtcggacaacgacatccgcaagtacgagatgtttgcccagacgctgcagcagtcgcgtggcttcggaaacaacttcagattcccaggcggtcagggcggttccagctcacagggccagggctcgaaccagcccacgagcaatcccggcgacaacggggatgacgatctctacagttagattgctaccgtaaaaatcaacaaacaatattctctccaacaacaacaaaacaaaaaaaaaacacaacactataataattctattcgtaactaacgatatcaagtgagcgagagttggtccatccggaacgcgtgcacgcgagctcgtcgactccgtcgatttcctcatcttttttcatcaacaaccacgaagacagcggcaggcagacacaggtaaacagcaacaacaacacaagcaagttcactactttaatggaataaatattagaaaaaaaacaatgaaacgcaaatagattcacgtaacactatcgtaag

SEQ ID NO: 98 - DNA, 1588 bp, Culex quinquefasciatus
atggaaaccatcttcgagatccagcggcgcctgcacgaggagtgcgaccggctcgtgatggccatgtccgaggagctgcagacggcgaagaagacggtgagcaatttttggaccaaggagaaggtgctggccgaccaccggatcaagatctacctggagcggtaccagagctgcagcaagtcgctgctggagctgtaccaggacaaggacggcgagcggaagcaggagattagcaacatgagcgtgaacgagttcaaggagttttactcgcagttcaactcgctggtggagtttcaccagaaccacggcaacaatgtggcggtgccggcgtcgattgagttttccaagttgcgcgaccagctgaacgatccggggtatttggcggaggtggtcaagtttagcgatgtggagaactacgggcagtatctggatctgcacgagtgttacgacaattacatcaatctgcgggatgtggaccggatcgattacattacgtatctgtcggagtttaacaagtttggggacatcccgaagaagcagaagaacttgaagtacaagaagtacttggagctgttgcacgactacttgtttgggttcatcacccggtcgaggccgctgttcttcgagctggagcacacggtcaagcggaacgagctgcagtttgaggatctgtggaagaacggggaggtccccgggtgggagcgcgccaaggacgtggacgaagacgctgcgatcaacctgaacgagtttggcaagtgggaagatctgacctatctcgggttggaccgtcttaaggccgcccttcaggccatcggaatgaagtgcggcggaacactggaggaacgggcgcagcgtctgttcgcctgcaaggacgacaagaacaaggacaacgagcgcaaacggctcatgtacaaccaaaaggacaaggacatctccctcctcgagtacaaaataacccgcctcgccgagctcgtcgacgaccagatctacgaaaccaaaatcaacctccagcgcaagcaggcgcgctacaccctggacgaaagcgacgaagactccctcgacgaggtcgaatccgacgacgacgacggcatcccgtacaacccgaagaacctccccctcgggtatgacggcaaacccatcccgtactggctgtacaagctgcaccagctgcactttacgtacgagtgcgaaatctgcggcaactacaagtacaacggcccgaaggcgttccagaaccactttagcgagtggcgtcacgcccacggaatgcgctgcctcggcatcccgaacacggcccactttgccaacatcaccaagatcgaggacgcgctcatgctgtgggacaaggtcaaggagcagacgttctccaagatgtgggtccctgccaacgaggaagagtttgaggactcgcgcggcaacattctcagcaagaaggtgtatttggatctgcagaagcagggattgctgtaagcgggcgatcgcgcgaggaagagttgtttgaaaaaagtgcatttcagcgattgtgtggtgaagaaaataaatttagtgtggcgccagcagagcttgcatttcgtcgccatcgtgctaa

SEQ ID NO: 99 - DNA, 1860 bp, Culex quinquefasciatus
atgtttcacgaatggcagacgtattcaaccgtgtcgcggtcggtcgaagatcgatgtctcaaaggcgccagacacaactctcccaatggtacggaaaacttcgtcgtgtctccgatcactctgatctccgtgaggttacggtccagagaagatgtggtgtggtcctacatgcggtcgtggaatgctcagagaaacaacccaacaatcaatgtctccacgaagatatcgccgcggaagtaccgcgcgccacctttccctccaggaatcgactcctttggccttgggctgttcctgcagaagcgcatgatcaaacgcatgatcgcgtcgtacgtgggcgagaatgccgaattcgagcgccagtacctgaccggtgagctcgagctggaactgacgccgcagggtacgctggccgagcgaatccgcgccggaggtgccggagtgcccgccttcttcacgcccacggcgtacggaacgctggtgcacgagggtggagcgccgatcaagtatgggaaagatggcacggtggagattgccagccagccgcggcagatgcagatgttcaacgggaagccttacatcatggaggaggcgattgttggggatttcgcgctgattaaggcacaggttgcggacgagtctggtaatttggtgttcaacaagtcggcgaggaatttcaacccgacgatgtgcaaggccgcccgtacgacgatcgtcgaggtggaggagatcgttccgaccggttcgatcgacccggaccacgttcacatgccgagtgtgtttgttcataggatcatcaagggtgccaagtacgagaagcctgttgagagattgcgcatccgtgactccaagaaggtcggatcggtggtggcttccactccggcggcgaaacagcgcgagcgcattgtacgaagagtggcgctcgagtacaaggacggtatgcacatcaacctgggaattggcattccggtgctgtcgtccaactacatcaagggtatcaacgtgctgctgcagtcggagaatggtattttgggactgggaccgttcccggaaaagcacgaagtcgatcccgatctgatcaacgcgggcaaggagagcgttacggtcgtgcctggagcgtcctacttctcgtcggacgacagctttgcgatgatccgcggtggccacatcgatataaccgtgctgggtgcgatgcaagtgtcgcagtttggtgatttggccaactggatgattcccggacggctcgtgaagggcatgggcggtgcgatggacctggtcgccgctcccgacaccaagtgcatcgtcacgatggaacactgcgccaaggacggttcgcacaagatcctggccgattgcgagctgcccgtcaccggcaaaaactgcgtcgacatgatcatcaccgagaaggccgtcttcaacgtggaccgcgagcggggccttacgctggcggaaatcgccgacggcgtgacggtcgaggagatcatcaccagcaccgggtgcaactttgaggtgtcgcccgatctgaaaccgatgggccaggtgccggagtagaccgaagggagggaaggacattttagcaggtaatttttgctggtagggaagattgtatcattaaaacgcggtatctcaggacttgggcggagcggcggtcactcacacaagcgctagatattagatagcggagaatggcgccaaactgctacaccgtgtcagtgtgtagcgacgaagggttttgtttttcgttttcaatgtgtaactttatacttttgcctagatgattattatttgtaacgggccaaaatgagagttttgtgttgtatacaaagtatactttatgaataaacattgcagttagacaattaa

SEQ ID NO: 100 - DNA, 21544 bp, Culex quinquefasciatus
atggacgagaagatcaacctgccgtgtacaccgttgcgagccatcggagaggagggcaagccagcaaccatcgtcgacttccaggagagctactccgctgttgaagatcaaactggttacatctcggttcaggttgagggtaatccggcgcctacctggaagttcttcaagaacatcaccgagctggtcgatggaggtcgctacaagcaccataccgatggcgaaagcaacaccatcacgctctgcatccgtaaggtcaagccaaacgacgagggcaaatacagggtggtggtctccaacgcacatggtgaggattcagccgaaatgcagctgtacgtgtccgattccagcggcatggacttccgcgccatgttgaagaagcgaaagtacgccaagtggggcaaccaggagaaggatcccgactggggtgatctcaaggaggtggagaagccaaagccgcagctcaagaaagtggaaagaaaatcagacactttctcgaaaccgctggtcgatatcacctgcaaggaaggcaaagaaaagaaggttgtgtttgaggccaacttcaccaagcccaacgccaaggccaaatggatgctgcggaaggacgaaattttcactgggtccaagtacaagtttaagaacgagggtgaccattacacttgtacggtcatgaaccccaaggtggaggacagtggaaaatacacgctggagattgctggagttcagtgcatggcatacctgaccgttgaagaggccgatccagtttacaagttcaccaagaacctgaagaagaccgagaagggcttcctgacgcacgactgccacctggagtgcgccgtcgataactcgttagcgccgatctcatggtggaagggtgaaacgaagctcgagaacagcgacaagtacgtcatcggcaaggaacttagtggcgcggttaatctgatcatcaagaactgcgtcgcggaagatgccgaccagtacacgtgtaagatcgagaagcaaacggacaagacggaaaccaagctgaagatcctcgagtacaactacaagtttaccaaggtgctcaagagtcagtctctgtttgtcaaggataccgttacgctggcttgtgagctggatcacgtgctgggacaggtcgaatggttcaagggagacgtcaagatcgtggagagtgataaggtgcagatcatcaaggatggtcgcaagcataagcttgtgctacaggatgtcgccaagactgacagtggcatgtaccgatgtgtgagcaacgccgacaaaaccgaggctgaaatttcagttaaacgaccgaacaagttcatgaagaaactcaaggacgcaactggagacgaaacgcaaaagtgcgtgcttgaggtgcaggtccaggatgaggaagcggacatccagttcttcctcggtgaccaagagatcaccaagagtgataggattgatatcatttcccctggtgacggtacacataagctggtatacaaccgactcgagctgaccgacgcgggtgagatcacgtgcgtgtgcggaccgctcgagagcaagtgtacgctgaaggttaacaagaaggaaacgaaaccgaaattcgaggtaccacccaaagtggaatcgcctgccaaggagcctaaggtgctggaggttccgttcacaaccggtgagtctcgccagtccaaggtcaccgtaaaggtgttcaaggatggcaagccggtatcaccggaagaagttgatatagttgtagagaacgataagcttgttctcaattttaagagcaccgaattcaaagattcgggcgagtttagaattgtgctggaaaatgccgccggtgcggaagagcataccacccaaattgtgtttcaggataaaccacagccaccgcaggagctacagtgcgtcaacatcttccaaacacgttgtgtcgtcaagtggaaggctccggagaacgatggtggagctgctcttgagaagtatgtcctggaacggcaggatgtgttcaagcgatccggttgggacccgcttaccgatgttcctggcgatacgctcaagtttgcttgcaccgacctgacaccaggcagacattacaagttccgagttaaagcagtcaacaagatgggtgaatcagagtattgtagcatggaggatgatatcattgccaaggatccatggaccgaaccggatccgccacgagatcttatcatctctgattgggatagagagtttgtggaactcacttggaagacaccggcttccgatggtggtgctccaatccagagttataccgtagaatacaagccctacactgccgccaattggaaacagttcgaggatgttggtcctaaccagctgacgactaccctcaaaggactaacggtaggcgaaacgttcgagttccgtgtgagggcaaacaaccagggtggcgccagtaaaccaagcaacaccacagagccattgaagatccgagacagatatgtcaagccattcatcgaaggcgaaggcctccaaccaattacactgaaaaagggacaaacgattcggtactatgtccagtacggtggcgagccagaaccggaagtcgtttgggagaaggatgatatccttgtcatttgcgactccgaaaaacgtaaaaccatcgacgttgagcacaacgcaacgaccattcaagtgcgccattcagtccgcgcagattctggcaactacaaactgaggctcaagaatagcagcggagagttcgttacccaagccaaggtcttggttctggacgtaccaacgcaaccgatcggaccgatcaagatcgataaggcaagagccaaccacgtggtgatcagttggcaacctccagaggacaccggtggctgtccgttgacgggttacctactggagaaaatggacgtagaaaacggaacctggttgcaggccggcgagtgtggtgctgaccagctcacgttcgacttccagcatttacaaaagggaaggaagttcgaatttagagttaaagcatacaacaaggaaggagagtcgactcctctggaaacactcctggcggtaaaaactgtcaatccatacgatcctccggaagcgcctggcaagccggtcgttgatgactacggtatcgactttgtgcagctgaagtgggaagctcccgagaaggacggtggacgtccgatcacgcactacgtcgttgagttcaagaacaagttcttgaccgactggacggagtgcgccaagaccgagacggccgacgccacgtgcaaggttactggactcaaggagaaggtcgtgtaccagttccgcgtgcgtgccgttaacaagggtggcgcttccaaggcatcggagcctagcgacaaccacaccgtcaagcataagaacttgaaacctcgtatcgatcgtaccaacctgaagaacgttaccatcaaggctggaaagactcatctctggtctgcggacgtgaagggtgagccagagccggagatcatctggtgctggcgagacaacattccattgacagtaaccgagaacattaagattgaaaatggcaactaccacaccaacttctcgattaaggaagctaaacgtgccgatactggcaagtacaaggtcatcgcacagaacgcctcgggcaaggacgaggaggaaatcgagctggtcgtgttgggtgcgcccggtaaatgccaaggcaagttggaaatttccaacgttacgaagaagggcttgaagctcaagtggaagaaacctgccgatgacggtggctgcccgattaccgagtacaagattgaaaagctgaagaaccgtaacggaaagtgggtgcgatgtggcaccgtgaagggaggacccgaaatcctggaagctgacattactggactcgacgaaggtcaaacgtacaaattccgcgttatcggtgtaaacgccgagggtgaatcggaaccactcgaatcggacgaggttgtggctaagaatccgttcgacgaaccatggaagccaggccaaccggaaattgtcgatttcgacaacaaaaccgtcaaactgaagtgggctgcacccaagtccgatggcggtgcgccaatccagaactacgttattcagaagaaggatcgtttcaaggaatgggaagatgtgctcgaagtacctggaggtgaaactaccgcaacggtggaagatttgaaggagaacaccgagtgccagttccgtatcattgccgtcaacaaggctggccgctcgcccgagtcggaaccaactggaacgcataaggttaagcatcgtgcattgaaacctcgtatcgatcgtacaaatctgaagcccattgtggtgcgtggtggcaagatggttcactacgacgtgaacgtgaagggtgagccggagccagagatcacctggtctctgaaggagaagcaggtgttcaacgacgaccactacgaaattgtcaaccagaactacaacaccaagtttaccatcaaggacagcttgcgtaagcatagcggtctatatgaaattatggccaagaaccagcatggtatggacaaagaagtcgtggagatcactgttctagctagtcccagcagaccgaagggtcctctggaagttaaggatgtcactaaggatggttgcaagctgaaatggaagaagcctgatgatgacggtggcaaaccaattaccggatatgtactggagaagtacgatcagaaggttggacgatgggtaccgatcggaaagactcctggaactgcggaagagttcgacgtgactggactgcaggaaggtcagcactacaagttccgcgtcaaggctgttaacgacgagggtgaatctgagcccctggagactgaagagtacaccgttgcaaagaatccgttcgatgtgccgaaggctcctatcgacgtagtcatcaacgattgggacaattccagcgtaactctgcaatggaagcgtccttactcggacggaggggccgcaattactggctatttcatcgaaaagaaggaacgtggtgaaaccaaatgggagccagctcttactacgcacagtcccgaatgtcaagccaagctgggtgatttgccagagaaacacatcttccagttccgcgttagcgcgatcaataaggccggaacgggtgaagcttccgatccaactaacttccatactatcaagcatcgcaatctgcgtccgcgtatcgatcgtaccaacttggcggcagttaccatcaaggctggactgtcggttcagtacgacatcgacatcgagggtgagccagcaccgacggtgaaatggttgcacggcgagaaggaagttgctaccgatgccgactacaagatcgacaacatcgactacaacaccaagttcttcatcctgcgaggtcgcagaaatctcagcggcaagtacaccatcgtggcgaccaacgctcacggtgaggatcgtgctgaggttgagatcaccatcttgagcaagccaagtacgccgcaaggtccgctggaggcttcggatgtgcacaagcatggatgcaagttgaagtggaagccaccactagacgacggtggtatgccaatcgagggatacgaaattgaaaagttggatccactcaccggacaatggattccgtgtgcacagagcaccactccggaagttaacgtcgctggtctccaggaaggcaaacagtacaagttccgcgtcaaggcatttaataaggaaggtgacagtgagcctttggagatggagactgttgtgattgcgaaggatccgtacagcgagccaagcaagcccggccgtccgactccgattaactggagcaaggactttgttgagctggaatggacaaagccaaaatcggatggtggtgctccaattagcgagtacatcattcagaagcgtgacaaagctagccgcaagtggcaagatgctgcgacgatcggtggagatcgtactcgtggaatggtggaagatgtcgaagagggtcatgagtatgagttccgtgtgattgctgttaataaggctggtccatcggagcctagcgatatttcggatagcgttgtcgctaagcctcgtttcttggcgccaagaattgatcgtaagaacctggacaagaagattcttcgctctggacagttgctcaatgttgaagcagatatcactggtgaaccagcaccaaaggttacttgggagctcaaggagaagattatcactggcggaggagatgaacggatcaggttggacaatgaagactacaagactaatctgatcattaggaacttgaaacgcgcagactctggcatttacaagatcactgccaagaatccctctggtaccgacatggttgaaatggagcttgttgtcctggctaaaccatccaagtgtatgggtcctctgaaggtgtcggatgtgacagctgagggatgtaagttggcttggttgccaccagaggatgatggaggcgagcccattcaggcgtacgtcgtcgagcgtatggatgtcgacagcggtcgctggattcaagtttgcgaatctcgcttcccagaggcggatgtttctggactccaggaaggaaaggattacatgttccgcgtaaaggccgtcaacagcgagggtgaatctgagccactggagaccgacaccagcatccgagcgaagaatccttacgacgccccgagtgctcccggaaagcccaaggcgaccgactggtccaggaagcatgtgttcctggagtggaaggaaccggaaagcgacggtggcgctccgattaccaagtacatcatcgaaaagaaggatgtcaacagcaccaagtggcaaaaggctatggaaaccgacgagcctgtcacgaaggctaaggttccggatctgtttgagggtacaacgtaccagttccgcgtgaaggcagtcaacaagggtggacatagtccctactcgccgatttctgaaccagtgttggttaaggaccgctttgctccaccaagaatcgatcgttctacgctcaagaacttgacgctgaagggtggacagtcgttgaggttggattgcaagatcagtggcgagcctgcaccgacgaagtattggttgttgaacaaggcacgcgttgaaaaggacaacccagatgtacgtgttgaatttgaagactatcgtgctaagttgactatcagcagcgttacccgtgcacacaacggtccatatgaaattaaggctgaaaatgcttctggttacgacgaggtccaaatcaatatcactgtcctggacaaacctactgcaccagaaggaccgttgaaggtatcgaacgtacacaaagagggatgctctctgaagtggaacccaccactagacgatggtggtgttccaatcgatcactacaatgtggagaagtttgacaaggaaactggacgatgggttccagttggaaggactgccgatactcacatggaagtcgccaacttggaaccaggccaggaatatctgttccgcgtctcggctgtcaacgacgagggtatatctgagccactggctaccgatacgtacatgctggcgaagaatccattcgacgagccaagcaaaccaggtaccccggaagcctacgactgggacaagaactttatcgagttgcgctggactccaccggtcagcgatggcggatctccgattaccaagtacgttctcgaaaaacgcactcacggcaccatcaagtggatcagatgtgccgaggtcattggcaacaagtgcgaggctaaggtgactgaactaaacgaaggcgaagtgtacgagtttaaggtccgagccgttaacgaagctggtccgggtatctggagtgaccacagcaaaccgatcaccgctaaaccaagaaaactgccacccaagatcgatcgtcgcaacctcaagaacctcagcgttgctgtcggagaaccgtttggcttcgacgtcaagatctcgggtgaacctgctccagaagtggactggaccatcaacgatcgcatggttacggtgactaccactcgtacgatcgacaacgtaccgtacaacagcaagttcgtcaacaccgaaccagatcgcagagattctggcaagtacgtgatcaaggcaaccaacaagttcggcaccgatcaggttgagatcactgttaccgtgagatctaagcctagcattcctgagggtccgttggaggtcaaggacatgaccaaggatagctgcaagctggagtggcaaaagccaaaggacgatggtggtgttccaatcgatcattacgttatcgagaagttcgatcctgataatggtatctggatgaccgccggaaagaccgacggaccgttcaccgagttcccggttgaaggactggttcctggccatcgttacaagttccgtgtcaaggctgtgaaccccgagggtgaatccgagccgttggagaccgctggaactgttcttgccaaggatagcttctctgttcctgatactccgagcgctccaacggttgttgattggtcagagaatcacgctgttcttaaatggccagagcccgacgatggtggcagcccaataactggttacatcattgagaagaaggataaatacagtccgatctgggagaaggcatgcgaaacgacgtcgccgaacccgactgctacggtgggaggattggtcgaaggcaacgagtatcagttccgtgttgtcgctgtcaacaaggctggacagtcggatccatctgacgcaagccgcacgttcactgccaagcctcgctttgctccacccaagattgatcgtagaacgatcagagatctttcgatctctgccggatcgatgctcaagtttgatgttgtcattactggtgagccagctcctaaaaccgaatggcgtatcaacaaggctcacgttaccgataggcgtgctgaaattctcgacacggagtacaactccaagtttattctgcgtccagcaaaccgtaacgattctggagactacgaaatcactgccacgaactcatctggtcgtgaccaggtccaagttcaagtagtggttactgacaaacccactccaccggaaggaccgatgctggtgtcggacatcaccaaagaaacttgcaaactcaagtggaagcgcccacgtgacgatggtggctgtgacattgaatattaccagattgaacgttacgacgatgaggctaaggcatggattccacatgctcgcagcgtagaaacgaacgccgacatcagtggactgcagaacggcaagaagtacaagttccgtgtcagcgcgatcaatgccgaaggcgaatccaagcctctcgaacaggatggcgaattcgttgccaagaatccgttcgacgaaccgtccgctcctcgcgattgcaaggccaccgactggggtccagactttgtccagctcgtctggcagcctccggttagcgatggtggctccccagttactggttacgtcgtcgaagttaaggataagtacggtgaatgggagaggaagatgcaggtgccagccagtgctaccgaggccttcgttccggatcttatggaaggacaaaagtacgaattccgtgtgcgtgcggtgaacgatgccggtcctagtgatccaagcaacgccacgccaccaattatctgcaagcagaagaaccagcctccaagaattgatcgcacgaacctcaacgatgtgcgcatcaaggctggaaacaatgttgtctttgacgttaaggtcacaggtgaaccgatcccgactaccaagtggtcgttgaacaagcgtgagcttaaacagaacgagcgtttcaagatccagaactacgactacaacactaagatcacgattcgctcagcaactcgtggagaaacgggcacttacactatcgaagcggagaatgaaaatggaaaggattcggccgaggtgtttgtgacggtgctggatgttccgagcccgcctcgtggtccactcaaggtcaaggaaatcactaacaatggagccaccctggaatggcttgctccagaggatgacggtggtctaccgattgacaactacatcattgagaagctggacgaaaccaagggaacgtgggcgtacgccggcgattctggatacaacgtttgcaatgccgaaatcgacggtctcattgaaggacattcgtacaagttccgtgtgcgtgctcagaacaagatgggcaaatcggaaccactgtcgatggccaacgctgttgtggcgaagaatccgttccgtgctccggcacgtccggaaaacgtcgttatcaaggactacgacaaagattacgtcgagctggagtggcaggccccggataacgatggaggtgcgccaattactggttacgtgattgagaagctcagcaaatattctggagactgggagaagtgtgttgaagttgaaggaaacaaaactgctgccaaggttccagatctcatcgaaggaacggcttaccaattccgcgtaaaggcaatcaaccgcgcaggagaaggtgaagccagcaggccaactgaatcgcacattgctcgtagcaagaaccaaccaccaaagattgatcgttactcgatgtccaacgtcaaggttcgtgctggacttacctttgagttcgatgttcctgttcagggtgagcctgttccagccaaggaatggacgcacaaggataacatgatcatcaacacggatcgcgtcaaggttctttacgaaaactacagaaccaagctgcgcgttatggatgtcaagcgggcggacagtggcgtttacactttgaccgctaagaacaagaacggcgttgacattgctgatgtgaatgttaccgttttggacgttccagcaccaccagagggacccattcgtttcgagaacctgtcgaagaatggcgtaacaatgatgtggcgtcctccgaaggatgatggtggttctgaaatcttgcactacgttgtcgagaaacttgacaccgatcagctccgctggattccggttggtgaaactatctccacgaagattcgtccggataacttgattgagggtcactcgtatcagttccgtgttcgtgctgttaacaagcagggtgaatctatcccactgtctacttcccagccgatcactgccaaggatccttacgccaagcccgacaagcctggaaagcctgtggccgctgactggggagataacttcgtacagctggaatggagcattccaaagaaggacggtggatcgccgatcacgagctacatcgttgagaagaagcctcgttacggagattggaagtttgctggtgaattcaccgatttgttccatcctcacgcaaagatcaccgatctcaccaaggacgaagagtatgagttccgcgtgtgtgccgtgaacaaggccggtgtgggtgacccaagcgagtcttccgaccctgttttgtgcaagtctcgtttcgtggccccgcacttcgacaagggcgctctgagggacatgattattcccgttggcaagaagattgcgtacaacgtttctgtggaagcctcgccaaaggtcactgctgtctggaagcgcaatggcgttgtaattccagagtctcagagagttattcgtgaagattacaacaacgaggtttctcttgagattccattctcgattcgtgacgacagcggtatgtacactctcatcgtgaagaacgagtgtggcgagttctctgcctctgcacacgttaccgtgttggacaaaccagcaccaccagaaggtccgctcaagatcagtaacattactactgagggatgccgtctggaatggaagctacccaaggacgacggtggtagcgcaatcactcattacgtcatcgagaaaatggacatgtctcgtggtacttggaccgctgctggaatgagcacttcgctggtgaacgagatttctcgtctcattcacaacaagcgttactccttccgagtgaaggctgttaacgagattggcgaatcggaggcattggaatcgtctcatccgattgttgccaagaacgacttcgaagagccatcgcagcccccgaaaccgcaggtggtcgattgggatgccaactcggttagcttggaatggaatgctcccaagtccgacggaggagctccgatcacggagtacattatccagaagaaagaaaaggacagcccgtactggagcaatgctggaaaagttcctggaatccagcgtaaccttaaggttccggatcttgctacagaaactgaatgggagttccgtgttattgctgtcaacgctgcaggagagtctgagccttcagatgcatcggatgctgtgttgactcgttcgagattcattgctccgaagatcgttaccccgttgcgcgacatggtggtcaaggctggattaatcttccacttggatgtgaactttactggcgaacccgctccggaagtcacatggacgttgaatggtaaaccagttgaaactgataagcgcaccacgttgaccgctgttggacatcataccatcgtgcacactgtgaattgtaaccgtggagactcgggcgaatacaaactggttatcaaaaactcgagtggtactgacgaaggccagatgcgtcttactgtgctggaccgtccagacccaccagagggcccaatgaactacgaagagatcaccgagaagagcgttacgatttcgtggaagccaccaaaggacaatggaggatccgaaattactggatacgttgtggagaagaaggatctcacccatggcggtggatgggtcccggccgttgcttatgtcagtccgaagtacactcatactgtcgtgccacgtctgaacaagggcaacaaatacgagttccgtgttatggctgagaatctgcaaggccgttcggagggtctgatgagcaagcacccagtggttgccaaggatcagtttgttgttcctggagcaccgactaaaccggacattatcgatagcaactacgatcaaattacaatcagctggaagccaccaatcagtgatggaggatcgagaattaccggatacaatattgaacgtcgcgatgctactactggtcgctggatcttggcgaacaagtatccagtacaaaacattgagttcactgacactggcgttactaagaacaaacagtacgactaccgtgtatcggctgtcaacgctgctggccagggcagtcctagtgatccatctcacaaggcttgggccaaaccgatgcagcagaaaccggctctcaacatggacagcttcagaaagcgaactatcaaggttcgtgctggtgaaccaatcatcatcactatcccactggtgggtgctccaatcccaaccgtcgaatggttccgcagcggtgttaagattccggaaacttcccgagtttcgattgataccaacagtgagcaaaccgtgttccgtgtggagaagagcgaccgtattgactctgatacctacaagatcaaggcttccaaccagtatggcgaagacgtcaaagaattcgaagttatcgtggttgatcgtcctcagcctccaaggaatgtgtttgctctggagactactcaagatactgtcacgctcaactgggacgctcccaaagacgatggtggttcagaaatcacgggatacagcattgaatacaaagagttcccatcggacaactggaagatggtgtacggtactgttcctcgttgctcgcatacagtcaagcatttgaccgaaaaccacgaatacatcttccgtgttcgtgctgagaatctgtatggatcttcggaaccgactgagagcaagaccatttcgccaaagagccccgatccaccacaggccgttgacaagccagttgtcgaggatttcactcccagctcgtgtaccatctcatggaagcctccacgtgtgcaaaccagaccagttgttggatacattgtcgagaaacgcgaacgtggaaccggagattgggtgcaggttaacaactatccaactgctaaccttacgtacactattcctgatctgatggaaggattccgctacgaattccgtgtcaagactgttaacgatgtgggctgcagcaagccaagcgaaccgaccgatccgatcactgcccaacaccagcgcaaacgtccgaatcaaccagatccaccggcaatcgaaaagatcgctcgcagcagcgtttcgctttcgtggcgtacgttgcgcagagatgccaaggaaaagatcaagggatacattgtgcagtatcgtcttaaggacgccgaaaactggtctgatgccaacagtaaggatgatttgatctcagatcaatattaccgcgtagagaacttggaagagggtaaggagtaccagttccgtcttattgctgtcaacgacattggatcgtctgacccatcccgtccgagcatttcggtcagcttggcagaacagcccaacagaccaaagatggatctcagcaatgttcgtgatatcacggtcagagcaggagatgacttcaacatccatgttccgtatactgccttcccgaaaccggttgcaacttggttggccaacgaggaacaaatcgacgattccgattctcgtgtgcacagacagcttactgacgaagctgccagcattgtcgtgaccaacagcaagcgtacggactcaaagcagtaccgtttgatgctgaagaatccatctggtaccgatattgccacgtgcaacgttaaggttttggatagaccaagcaagcctgagaatgtcgctgttgagtcctttggaggtgaacatctcattctgtgctggaacacaccattggatgatggtggttcaccggttaccaactacgtcgtcgagaagaaggacaagagctcatcaaactggaccaaggtcagcagctactgcactgctacattcctcaagattcgcaatctacgtatcaatcagcagtatgagttccgtgtctatgccgaaaacaagtacggaatgtctgatcccggacaatctggtgcgattgttgccaaacatccgttcgatattccaactcagccaggaaccccgactcgtgtggaaaccaccgaagactctgtcaccattacctggactaagccggctagcaacggtggttcgccaatcactcactacgttgttgagaagcgtctcgcctctgaaggtagctggaccaaggtacagcagggttcgctcaaggatctggtgtgcaaggttgcgggacttactgaaaaccgggaatacatcttccgtgtggcagccgttaatgcagctgggcagagtccgttcagctctgcatcggatccaattatggttactgctgcgttcagttctccgaagattacttccgacattggtatgcgtgacatcttggttatcgctaaggatccgttcaagattatcgtaccatactctgcttctccgagaccagacgccttctggttggtcaatggtaatgaagtctcaagaaacgatagaattgaacttcacattaacgacaatgaggctgtcttcaagaatgataacgccaaacgcatggattccggaagctacaccatccatttggtcaattgcgttggtaaggacaccgcttcttgccgtgtgttggttgttgacaagccaacaccaccaattggaccacttgaggttacggaaattacgcccgaatcttgtactctgacgtggaaggtgccgcttgatgatggtggtagtccgatcacaaactacattgttgagcgatatgagccgctcggatactggaccaaggctagcagctttgttcggtccaaccattacgacaacatgggaatggaagctaacaagcagtacagcttcagagtacgcgctgagaaccagtacggcatcagcgatccgttgattctggaggaaccaattattgcccgctatccgttcactgttccggatccaccaaatccaccacgtgttaccgattgggatgccaactacgtcactgtcacctgggaacgcccgctcatggatggaggttcccgtattcaaggctatcgcttcgagtacagagatgttactgacagctcatggattatttgtaacttcctcattaaggacaacacgtaccaggtgtacaatctgctgcctggccgtcaatacgagttccgtgttcgtgcgcagaacgctgcaggtgtgagcaaaccatcggcatcgtctaagaagttcaagattcacggaaaggttacggcaccatcgccacctggagcaccagcgattgtcaaggttggcaagagcttcgttgaccttagctggacgacaccagccagtgacggtggttccaagatcaccggatactacgtcgagcgacgagacattggtggtgcccgatgggtcaagtgcaacgagtcgaatattccagtcacggagctcactgttacgaacctcattgagggcggagtctacgagttccgtgtttacgctgtcaataattacggagtttctccaccatctgttgagacacgctcggtcagaattggtgaattgctcgatacggagaaaccagaatgggtgcaaagattgaagttcagcttggtgcctttaggcaagtctgtgcagctgacatgtgaggctcatggtaaaccggaaccaacctgcagatggctgcgtaacggaaaggagattacgcatggagggcagttcgcactggaaagcaagaacggtgtgttctcgttgcacatttctaacgttacttatcgcgatgagggtgattacacttgcgaggcaatcaactttgttggcgtcgttcacactacggctgcggtcaagattggagtgccaccgaaattggtcaacattccatcggacgtgtaccttatcaagggagataacgcaaagattaagcttggatttagcggcgaccagcctctggaggttaacatctcgaaggatcgtgagaagttgatcgaaaccgagcacattaaatacaccgtgtttgatgattatgctgttatctacatcagagaagtggaacaagttgaccagggtgtatacttggtcaacttcaagaacgacagtggaagcgtttcgtgcaacgttaatgttcacgtcactggacttcctggacctccaactggacctctgcttaccagccatattaccaagaacatgtgcacgatttcgtggaaaccaccagcatcggatggcggacgcaagatcactcactatgtcattgaacgtcgtgatatcaagtcgcagcactggctaattgtatcgaactacgtcaaggaatgtcagttgatcgttaagggattgatcgagaactccgagtacatgttccgcgtgtcggctgttaacgagaatggaatgggctcaccattggtgggagtcgatgccatcaaggctcgtggaccgtacgatctgccatcgccccctggtattccgatcattcacgaagtgggaggtgactttgtcaacctggaatgggagaaaccagtctctgacggaggctcccgtattaccggatactggatcgagaagcgtgaacagggcattgaaacatggcagcgcgtcaacaccgtgtcgtgctctatctgcaccattaactgcgtcaatctggttgagggacgattctacgagttccgtgttgctgctcagaacgaagttggcatttctgaattctcgaaggcttcgcagctggtgaaggctgaagatccagatgtgtgcaaggcaccagaagttgtcaaaccactgaacacaatgacttgcgtgcagaacagaaatgtcgagttcgtctgcaagatcaccggtgttccccggcccaagattacctggcacaagggagctcgcgagatctgctctggatcgcgttatcatatgtacagcgatggagatatgcaccatttggctatcaacgatgtgtttggtgaagatgccgatgagtacacttgccgtgccgtcaacaagggaggcgttaagtctaccaaggcttcgcttatcatcaaatcgccaccgaaactgaacgttcctccgcgattccgtgatactgccttcttcgataacggcgagaacattgagatcaagattccgttcactggattcccgaaaccaagatgtcactggaacctcaagggcgaacagatcgagtctggcagccattatcacattgaaactcgtgagcgacacactgtgctgactattcgtgatggttctcagttcgactctggcgactacacgatcactatcgagaacgaattgggacaggacaccgccgaaatcaagattcaaatcagcgatcgtccagacaagccgaagaaccttagcgtcgaccagattggactggatcatgttactctgagctggctggcaccatcttgggatggtggagcaagtattaccaactacatcgttgagaaacgcgaagttccgttgtcaacctggatccgcgctggcaccacccgcttcaatcagcttatcgttccgcatctgtctcctggacatcagtacgagttccgttgctttgctgaaaacgtttacggccgctctgacccatcagatcagaccgaattggtcagtctgaaggatctgggcattaagcaagtcaagcgcgtcaagtacgagctggacgagaacggcaagccgaaacgccagggcaagcgtgagccaattggagactacgatacctatgtgtttgacgtgttctccaagtaccagactaagccagttgagatctccaacaagagcgtctatgacctgtacgagattttggaggaaattggtacgggagcgtttggcgttgttcatcgttgccgtgagcgcaagactggaaatgtgtttgccgccaagttcattccagtgtctcagaactctgagcgtgacttgattcgcaaggaaattgacatcatgaaccagctgcaccatcgcaagttgatccacctgcacgatgccttcgaggatgaggatgagtttgtgctgatttacgagttcttgtctggaggtgaactgtttgagcgcatcaccaccgaaggctaccgcatgtgtgaacaggagatcattgagtacatgaagcagatctgcgaggctgtcaagtacatgcatgagaagaacatcatccacttggatatcaagccggagaatgtcatgtgccagacgagaaacagcaaccaagttaagctgatcgatttcggattggccacacgactgaaccccaacgaaatggtcaagatctcgacaggaaccgctgagtttgctgctccggaaattgttgagcgtgaacctgttggtttctacactgacatgtgggctgtaggtgtgttggcttacgttttgattagcggtctttcaccattcgctggagagaccgacatcgatacgttgaagaacatcaaacaaggaacgtgggagttcgatgaggttgcattcaaggacgtgtcggaagagtgtaaggactttatccgccggctgttgatcaagaccaaggagaagcgtatgactgctcacgagtgtctgatgcacgcctggttgagcgatagctacaacagctcgacttcgctgatctcgattgaacgctacaagaccatccgcgatcttatccgcagaaagtacgacaactgggcatcgtttgtgctgccgctgggtagactttcggaatactctgcactgcgcaagttgcttgttaccaagtacaagatccacgaaacctcgttcgaccgacgacaggctgctcctcggttcgtcattcgtccgcagtcggcattctgttacgaaggacaaagctgcaagttctactgccgtgttattggtgtggcaacttcggttgtgacctggtaccacaacaaccaggagctcaagcagtcggtcaagttcatgaagcgttacgccaacgacgactactacttcattatcaaccgcgtcaagctggatgatcgtggcgagtacattatccgtgctgagaaccactacggatctcgcgaggaggtcatcttcctgaatgtccacccgatgtctaagcagattccagtttacaaacccgagaccctcaccgtcagaaagcgtgaaccaagcccacggccaatgtggcaggaagagtccgatgccgctccggtgttcacctttgctctgcgtcctcgtgtcatgcagctgcgagacacttgcaagctgttgtgttgtctaagcggaaagcctgtgccgaccgttaagtggttcaagaatggccgcgagcttagccggtttgagtacgctatgacgcacaccgatggcgtggtgacgatggagatcatcgacaccaaggttgacgattcgggcgagtacaagtgcgttgccgtcaacccgcttggaaaggctgaaaccagctgcgtcgttatcgttgaagaccgccgccgccagttggatcttccacagccgaaggctgatggtaagaaatcgatcaagaaaccggaagccaaggccgctccatcgaaacaactcggacctccagatgcacgatcccgccagtcgacccgcgagctattgccactgaaatcggacagcatgatgtgcccaccggacttcaccagaaagctgaaggacgttgtcgcgtccgacggcgaaccactgcagctaaactgccacgtgagcggcgatccgctgcctcagatcgtatggaccaagaacggcaagaagctgacctcttcggctgttattgacatcaagtacaaatccggcatcgctagccttcgaatcaacgaactgttcccggaggactctggcacgtacgtgtgcacagcgaagaactccatgggagaaacctcgacgcagtgtgtgctcgatgtgaagaagggaccagccggcactgcccgaccggaaaagaagggtggctcgtccaaggccccgatcatcaacaagcacgccgagtccggttactacaaggacggctcggaagtaacgatcgtttgcaacatttcctgcccggatccgttcaacgtgatctggctgcacgacaatcgcgaaatcaaaaacacccccgactttgaatatctgaacgacggcgacgtttactcgctgcatattcctgaaatcttccccgaggacgccggcacgtacacgtgcgaggcgttcaacaagggcggagagagcttcagttcctgtaccattacggttttgtcgagcagcgagcagaaggacacgccgaccttcgccaagttcccggcctcgttgagtgtgctggacggtgcgaaggccgtgttcacctgcgagacgtacgactctccgaccaaactcgagtggtacaaggacggcgagcctatcaacgagtcctccaaccggtaccggttcgtgaagaaggacaacaagtacaccttcaccattgccaagtgctcgttcgaggacattggccagtaccaggtgcgggtggtcacacgccaaggtgacgcactggcttccttctccgtcaatgttagtgcgtaataggttgttctaagtgataaggtactagaatgttagctaggtagatccaaagaagaggagaacttaatattttggaagattttttttttattgtttgttttcggtactgtgagcgattttttttatttagctttcacgtgtaagtaatatttttgtaaagtattatcgacatccaacaagcataatgaggtaggaattgattttttattgttgatttacagaaaaatttaataaaaaaatatttgag

SEQ ID NO: 101 - DNA, 3987 bp, Culex quinquefasciatus
atggcacgtggtgcgaaaagtacagcacaaccccactattcatcgtcaaaaagcctaccctgtaacccagttcattcaagaaagattgttttcaagaaaaaatggtcagaaccggtgcgaaagcaagagtgggcccataaacttcaagtggcactgaccaaggcccaccggcaagtccgagtgcaaatgcatcaggcaagtctctgctgtaccaccgtggactcgaccttcaattacggtagaactgaccacgggcaattgatcgatctccacggattacttggtggcttgtggatcggctggtggactttcaactttaggcggaccccgtacttgacgaaccacgttcagttactcgtccctcggaatcgattagtcagcgattgtccatcgacggttcggttcagcagtggcgtgtggcgagttgtggaacataacgtgcacgttgcgaaattatttaaatggaggatctacggaaaactgagtcaaggtactccccacacgtgcaagtttacttcccaccgggcagccgtacgcaataaaacacgcacatcgattcgggtagaagccaacaaaccatcaacaacatcaagaaacgtgaaactagggcaaactttcggcggctgcactagcctggccacaccgagcgatcaccggttggcggctcagttccgtcagcaggaagctcaaggttggaatccggacgacgaaccgctactcggtggacgcaagtttggtgaacgaccggtgaagcctccccagccggagaaggagaggtacggaaacgaatctcggtatggtcgtggaaacgattatgactacgacgatgagccgtccagcagatcaaccaagggacgcttccggtcgcggtttgcccgtagtcaccaactggacaacgattcggataacgagtcaaagccagcgcgcaccgccgaagagaaggaaaaggccaacaaagtcacaagcaccgaagattgtgccaagggtccgttgagtggtatcttccggttgatggactcgccacgtgttatgaaacggctgcaagatacggaaaagggtaaaatcaagaaagcatcccccgcaacaacgccaacagtgccaaaaccaaacccgctggccaccaaacccaaggtaaccacgtcccgtcagctttccgaagacgacgaaatcgccaagatcaagcgccagaacaaaggagcttcgacgagtaccacaacgactacgacgagcccgtcttcaccggtacccacggaaccggaacggccagctgccgaccgagtgtccgcactgaaaggtcgcgtagcagctgctgcggccgccgccgctgccagcgatgacagtgacagcacgccttcttcacctgctcgaagatcgtcgccacacgtcgagccacgtggccaggcacctctctctattcctccacatcaattgaaaccctcttcccgttttctgttcttccatacaacatcatcatcatcaccaccaccaccaccacaacgacctcatcacacgaatcaggccgatagtgatcaggacgattcggagcgctcgagccgttcccgccaagcaggggccaccaccaatgctgctgccaagaaaactccgacccgttccgccagtagcgattccaactcttcgagcgagtccggcagcgcatcgccagctccggcaacggctcgcaccgtcaccgaagaagccaagccgaaggcatcgatcttgaaaaactccgaaccggcccgtagcactgcgtcgccaacgggcgagaagaaacccttccagagccggttcttgccgcaaactcagcagcagcaacagcctgcgaagaaggaagaatccgagagcagtagcagcgaggaggaatcgtcctccgaggaagaatccgaagaagaggaagaggaggtgaagccagcgccagcgagacctacaccgacggtggtttcctcgccggtgcgcacggagcagccaagttcaccgttgctcagccgaatccaggcccgtgaagcggctgcggccgacacgagaaagacgtctcgtgaagagcctcgtgccagcggatactccagcccgacgaactatcgcagccagtacgatcgcgacgaaagtcccaagtacggcagtggatcgtccgcccttcggtcccgaaccactgcccacgtggaacccgaggagaacaaatacggcagctccggatataccagccggttcctcaacaagagcaagagtacggccgtggtggccccggaggatgatgccaccggagacgactccgacagtcgcctcggcagtaaccgtagccgcttcagcgccctgcaggaccgccggaatcgcctggcgagaagccgctcctcgcacaacttcggcaacgacgatgaagacgacgaaccggtgtctccgaccacgtcttctccatcggcctatttggcgtcccggtacggaacatcgtcatcgctagcgtcgcaacctgccgatctgtctcgcagccgctcgacgcatgcgctcaagtcgcgcgaaccctcgccggatcgtaacaccggcagtgacaaggacggtgccgccctcagctcgtgggcccgctacctgaagaacaagtacggcaaccgttcgaccaaggacggcaaggacacaccttccacctcgacgtcgtcccactccgccacgtcctcatcgttggcctccccgtccacctcgtcgtcatcgtcgacgtcagcggccgccgcccggcgcctcagtctgggcttgccgctgcgccagtccgacatcctcagctccgatgacgattcaaaaaacggggtaggctcccctacctctcctacggcagcagtagtcggtataccaggggcagcaggtatgtcccctaggacgcagtacctgcagaagcgccgacaactgttccagataggaggtcgggggagcgaacccggttccttcacgtggccccgcggcatcgccgtgggtcccgacaatagcatcgtggtagcggactcgtccaaccatcgcgtgcaggtcttcgactccaacggtatcttcgtgaaggagtttggccagtacggcaacggggacggcgagttcgactgcctggccggtgtagccgtcaaccggatcggccagttcatcatcgccgacagatacaatcaccgcatccaggtcctggatccggccggacgcttcctgcgctcgttcggttcccagggtacggccgacggcaagttcaactatccgtggggcatcacaaccgatgcgctaggcttcatctacgtttgtgataaggaaaatcatcgaattcaggtattccaatcggacggttccttcatcgggaagtttggctcgtgcggcaaggacgagggccagctggagcacccgcactacatcgccgtgtccaacacgaaccgcgtcatcgtgtccgactccaacaaccatcgcatccagtcggcttgggccgacccaacgaacgaattctacactctctgcgggggaaaaggaaatgagctcaacggaaatgtttccgttttccggagcttggacttggacggacagttacacccacaatgggcctcttgtcccccctgtgacaagagaccctcatcaacgctacatttcatcgatatgaaagcaggacgtgttgcgggggaacgttccacgtggtataagctttctgcacgtgtacttacctgctactcgaagtggcggaaggaagtaagccacaacaacccacatcagatggtcgctctatattcggtaccatcccaaactcatcgaggaaagtggcacagaaacgcaacatgttgtgttccccctccccacttttatccctcacagattcccaagcatagcaattccttcgatgaatcgtccaagtggacatcgaggctctcgaagtgctctctagtttttgtcactatctttgacgtcaacggccgagtgctgaccaccttcggtggtgaaggctcagacgagggtcagtttaaattcccaagtaatgctctttga

SEQ ID NO: 102 - DNA, 252 bp, Culex quinquefasciatus
atgtggtcggttcgattgggtttgccttcctcgatgaggggcgtggccgttgacgaccagggctacatatgcgtggcggactcgggcaacaaccggatccagatcttccacccggacggcagcttcctgcgggcgttcggctcgtggggctccggggacgccgagttcaaggggctcgagggggtggccatcatgtccaacggtaacatcctggtgtgcgatcgcgaaaatcaccgcgtccaggtgttctga

SEQ ID NO: 103 - DNA, 981 bp, Culex quinquefasciatus
atgagttcaattcagtgtcaactatggatgggaagtctggaatcgtacatgacggaggcctttatcctcgcggcgttccgaaagatgggcgaagatccatcgacggtcaagttgatgcgaaacaagtacaccggtgatccggccggatactgcttcgtgagtttcaaaaccgatgatgccgcactcgatgcgatgcacaagcttaatggaaagcccattccgggaacaaatcctttggtgcgtttccgactgaacagtgcgacgaataatcagcaccgggcgctgctggccgaccgagagtttagcgtttgggtgggtgacctcagctcggacgtggacgattacagtttgtaccgggtgttctccaccaagtacacgtcgattaagactgccaaggtgatcctcgatagctctggcttttcaaagggttatggatttgttaaatttgggctggaagacgagcagaagaatgcgctgtacgacatgaacggcttcatcgggttgggcagcaaacctttgaagatttgtaacgcagttccaaagccgaaatcagaacttggaccaggatcgggaacttcaacgacgagcgccgccaatctgctgggatacggaacggcggccgcgactgactattcccagtactacgatccgactgcgtactggcagagttacgcttggcagggttattacgacgcgacggccacgcaggacacagggtactcctcgggttatccgtcgactgcgcagatggtcgcggatgccgctgtttacgcccaacagtacgaggcgcaacagcaaatggcccagcagcaacagcaccaccatcaccatgcggaagacgaggagctcacgttggtcgatcacaagtttaccctggacgtggacaagctgaacagagacctggccgaacgggaccggaatctttacgatgcgttggaaagttccaagtggatgccggtggagcagctggaaattttctaa

SEQ ID NO: 104 - DNA, 894 bp, Culex quinquefasciatus
atgatcttcaaagaaaacatgctccgcaacgccttcaacgcgttcgatcaggagaagaagggatgcatcggcacccagatggtcggcaccatcctgagcatgctgggccaccagctggacgacaagctgctcaaggagatcatcgacgaggtcgacgccgacggctccggtgagctggagttcgaggagttcgttacgctggccgcccggttcctcgttgaggaggacgccgaagcgatgcagcaggagctgaaggaggcgttccgtctgtacgacaaggagggcaacggttacatcaccaccgccgtgctgcgcgaaatcctgcgcgagctggacgacaacatcaccgccgaggatctggacatgatgatcgaggaaatcgattctgacggttccggaaccgttgacttcgatgaattcatggaggtcatgaccggtggagacgattaagcgtccaggacgtccccacccccccaccaactctgctagcttaatgttcgtttaatgttaaattataccttctacaaccagagagaaaaaacaaaactctactctactgtcgtgttaatgttagcctaaaaagtttccaccaaaaagtttactctaagattgttcacaccagtatcaggtagtatcagcacacacacacaaccacaacaatgaacgtagagtagtagatagcgtaaaacaacagactcagtgactaggaatggtccaagatcggagagaagcaaagtttctatgtatttgctagccacccagaagaacatccagaagcttgtcgggccccgcggcaggacgagcgtcgagtttccataagctttagttattttggaaaccctgagtgtgcagcaattgtgtttgtacaaaaataaaatcgatttgtaccctgaa

SEQ ID NO: 105 - DNA, 1617 bp, Culex quinquefasciatus
atgttgctctttttcaaaaccaacgacaactactactgcactctctgtcccgccagcgacggtccgccggcggcccacaatgtcaaaaccatcggaatccacctgaaaacggatcacgacgaaaagatcctgatctgcgagcgctgcgatgcggtcttccggcgacgcacccagtacaacgagcacatggacaagcacgtggcatcggagctcgggtcggactttcgatgcgacgtctgtgggacggagtttgcaaacatccggacgctgcggatgcaccggaagacgcacgtggccacgtccaaggtttggtcctgccacgtgtgccagaagaagtacagcagtaaaaatctgctagacgagcacagcaacatgcactctgggaagcgtccgttcaagtgtcctgtttgtccgaaggacttcgcctccaagtacacgctgtccgctcacatgaagatccaccaggaccgggagcgggtgttcaactgcaaagagtgcggccgtggcttctacagccaacataatctgattcagcacgaaaagatccacctcggagtgagggattatgcgtgcacagattgcaacaaaacgttcatgtcgcagcacaacctggacattcacaaaatcgttcacctcaactacaaaccgttcatctgccgtacgtgtgggaagggctttgcgcggaaggcggaaattaaggaccacgagcgaacgcacaccggcgagcgtccgtttgtctgtgatatctgcgacgcgagcttctcgcagcggtccaacctgcagtcgcacaagcgagcaacgcacttcaacgataagcggtacaagtgtgacctctgcaaccggtgcttcaagcggcgccgtctgctcgattaccatatcaaggcgtgtcacaccggcgaacggccgtacaagtgcgaagtttgcgcggcgaccttcgtctacccggaacactttaaaaagcaccagaagatccacaccggctcgaaaccgttcgcctgcgaagtgtgcagcaagacgttcaacagccgggacaaccgaaacgcgcaccgttttgtccacagcgacaagaaaccgtacgagtgcgtgacctgcggggccggattcatgcgcaaaccgcaactgtactcgcacatgcagcagcggggccacctgaacgatacgatcgtggtgaaccagccgcgcattacgaacgacgacttgctcgagtttgacacgacgaccgattccatcggcgatccgctcgagctggacaagcagggaatcgtctacgaggaagatccggacgagctggagggcgcgcgggatgagtactacatcgaggaggaggaaatggaagaggacgatggcgaggaggaggacgacgacgaaggaggagcgattcccggaacgagccagctggtgctgcccgaaacggtggagctgtccgagtcgacggcactgttggccgccagtgagggctttatcgacgaaacggacatcatcagtcaggatttggacgacgatgatgacgaggaaggtggtgctgggtctggaggtgggatgcagttggtgaagctgaagattgccaaccccaacggaaaggatggcatcgcgtgggtgaatttggtttctcagtga

SEQ ID NO: 106 - DNA, 1422 bp, Anopheles gambiae
gttccttgttcgctacgatttaattgtttgccaactacagcagtgaaaagaggttcgcaaaatgggccaaaaccagtcagcgggaagcggcggggacaaggataaggataaggataagaagaaaaagtacgagccaccgattccgacgcgggttggcaaaaagaagcgcaaggcaaagggacccgatgcggccctcaagctgccccaggtcaccccacacacgcgctgccggctgaagctgctcaagctggagcgcatcaaggactatctgctgatggaggaggagttcatccgcaaccaggaaagactgaagccgcaggaggaaaagatcgaggaagagcgctccaaggtggacgacctgcgggggtcgcccatgtcggtcggcacgctggaggagatcatcgacgataaccacgcaatcgtgtcgacgtcggtgggcagcgagcactacgtcagcatcctgtcgttcgtcgacaaggaccagctggaaccgggctgctcggtgctgctgaaccacaaggtgcacgcggtggtcggagtgctgggcgacgacaccgacccgatggtgacggtgatgaagctggagaaagcaccgcaggaaacgtacgccgacatcggcgggctggacacgcagatccaggagatcaaggaatcggtcgagctgcccctcacgcaccccgagtactacgaggagatgggcatcaaaccgccgaagggtgtgatcctgtacggaccgccgggcacgggcaaaacgctgctcgcgaaggcggtggcaaaccagacgtccgccaccttcctgcgagtcgttgggtcggagctgattcagaagtatctcggcgacggtcccaagctggtgcgcgagctgttccgtgtggccgaggagcacgccccgtcgatcgtgttcatcgacgaaatcgatgccgtcggaacgaagcggtacgattccaactcgggcggtgagcgcgaaattcagcgcaccatgctggagttgctcaaccagctggacgggtttgactcgcgcggcgatgtgaaagtaatcatggccacgaatcgtattgaaacgctcgacccggcactgatccgtccggggcgtattgatcgaaagattgagttcccgctgccggacgagaagaccaagcgacgtatcttcaacatccacactgcccgtatgacgctggcggaggacgtgaatctgtcggagttgatcatggcgaaggacgatctgtcgggcgcggacatcaaggccatctgcacggaggcgggcttgatggcgctgcgggagcgccgaatgaaggtgaccaacgaggactttaagaagtccaaggagagtgtgctctaccggaaaaaggagggaacgcccgagggactttatatgtaaaatccgcgatcacaacccataaataaatcaatactgtttgtgag

SEQ ID NO: 107 - DNA, 2107 bp, Anopheles gambiae
caaccggacagcgtgagtgagcaaaagtgtagcgggggcctttcttctgccacacagaaatcgcaaatataatcatagttgacagcgtcggagcagcgaatttcaatagtcatcttgcgaacagcgacttgcactggaaagaggcttcgcaccagaactaggaacgcgaagacacagcgcaagacggtacaccgatcacaatcaaccgcatcaacgtaaatcccggaacccctgctccatcaactccgtgcaagtgcggtaaaaagagagtggttaaaaaatggccggaaatttggaggatcgtgaaatctgggaagactcggaggagctcggcgaggaggtgctgcgtatgtccacggacgagctggtcagccgcacccggctgatggacaacgagatcaaaatcatgaagagcgaggtggtgcgcatcaatcacgaactgcagacgcagaacgaaaagattaaggacaacacggagaagatcaaggtgaacaaaacgctcccgtacctggtgtcgaacgtgatcgagctgctggacgtggacccgcaggaggaggaggacgacggggcggtcgtggtgctcgactcgcagcgcaagggtaagtgtgcggtcatcaaaacgtccacccgacagacctacttcctgccggtgatcgggctggtcgactcggacaagctgaagccgggcgatctggtcggcgtgaacaaggactcgtacctgatactggagacgctgccggccgagtacgatgcgcgcgtgaaggcgatggaggtggacgagcggccgaccgagcagtactcggacattggcgggctggacaagcagatccaggagctgatcgaggcggtcgtgctgccgatgacgcacaaggacaagttcaagaacctgggcatccacccgccgaagggtgtgctgctgtacgggccgcccgggacgggcaaaacgctgctggcgcgcgcctgtgccgcccagaccaagtccaccttcctgaagctggccggcccgcagctggtgcagatgtttatcggtgacggggcgaagctggtgcgcgatgcgttcgcgctcgcgaaggaaaagtcgccggccatcatcttcatcgacgagctggacgcgatcggcacgaagcggttcgactcggagaaggcgggcgaccgcgaggtgcagcgtacgatgcttgagctgctcaaccagctcgatgggtttagctcgacagccgacatcaaggtgattgcggccaccaaccgggtggacattctcgatccggccctgctccggtccgggcgtctcgaccgcaagattgagttcccgcacccgaacgaggaggcgcgcgcccgcatcatgcagatccactcgcgcaagatgaacgtcagcccggacgtgaacttcgaggagctggcccggtcgacggacgactttaacggcgcgcagtgcaaggcggtgtgcgtcgaggcgggcatgattgcgctccgccggtcggccgtgtccgtcatacacgaggactttatggacgcgatcatggaggtgcagtcgaagaagaaggctaatttgaattatttcgcctaagttggacgaagggagggatgcgtttaggagggaggctactttttttttgttctatttctattccccatcacgatttctacacacgcgtcaacaacgcaacaattgcactgattacgctgaaaatagggcgctaaaactgattgaaatatttttcgataacggagctgagctttagggtaaactacagaaggaaaaatatgcaacacccatgtcgtccataacgttttgctttttgatcacgcctctggaaataaatacacggtcgtctctgttctaaatcagtctttttacattcatttctcgctgtacaggtgataatataactgttttttcctcccgtcgtagagcaaaggtaggcgagcagttattgtttcctttcggctaggtactaaataacataccaattgctatttaatcatgatacactgacaccattcgaacggcacatatgggtcggccccgtggcacagacttaacagtatgcccgcctttggttcaagtctagaatggaccggaccccctatccggctgcctagtgtactg

SEQ ID NO: 108 - DNA, 2437 bp, Anopheles gambiae
ccacacagccaaagcatacagcggtgcaaaaatacaaactgtttttggtcgcaccgtacacgccgttgcaattgttctgtggcctcgtcgcgtgagatcgtctgtcctcccgccaccaccaccaccaccaccaccgccccccgccctcggctgcagatagcctggccaatttacgctgactggtgacgcgcgccagcgcacccgcacgccgaacgaagtgcgacgacgcagccttggtgaagcgaccagtgtgtttcgtgttctttttttttgttttattttgttttgtttgcctctttatttcggaccacgatcgagcccggaggcccaccaccactgacgtagtttttttttttttattgagcgcgttttactatctcaacggaacggtcgtgatcgtgcgcggtcccagcgaaagaggcgccgtgcgccagttcttgccgatccaccggagcagatagaacgctttctgtgtgcgcacaccagactggagaagctcggttatagagggaaactgtatttatgctatcgcgatacgcgccatcgattagcagtgtcggtcgggcagtcggccagtgcggatcgtgcgacgcagtaacgttcgggaaatacacgcgacacgcgcggaatcgtccatcaacctaaacactaaacgacaacactagaacaaacgaaacaaaaggccgtttcatctcaaaccggaagcctactgcggtgttggaagcggcgtgtactgtagcgagtgtttttgcgcgttgtgtaaccgaattttcgcggcggccaggtgcgcgaagggtttttctctaaaagccccagccatagttgtggtgtgccgccttatcttacttgctgcacacatactcacacacacagacgttcgttccggtggtattgtaaaacacgttcccaagtggccggtgtgagtgggtgaaactaaaccccaggcactctagcccgaccagtgagactccagtcgcagccgcagcaacttgccagtcaacgagccaaccctacctaccagtcctaccagccaacgaaaccactctcgtcgtccaagatgagcatgagttcgtacaccgagagcagctcggaggaggacgacctgtcgccgcgcgacaaggtgcagcaaaactcgaagggctatgcggacttctgtgtccgcaacatcaagcagcactcgttcgggcggcacgagatcgagatcgcggagcaggagatgccgggcatcatggcgctgcgcaagcaggcgctcgacgacaaaccgctcaagggtgcgaacatcgtcggctgcacgcacgtgaacgcgcagaccgccgtcctgatcgagacgctcatctgtctcggtgcgaacgtgagatgggcggcgtgcaacatctactcgacgcagaatgaagtagcggccgcactggccgagagcggcgtgccgatctttgcctggcgcggcgagatcgaggaagacttctggtggtgcatcgacaagtgcgtgcacgcggaaaactggcagccgaacatgatcctggacgatgggggcgacgcgacgcacctgatgctgaagaagtacccggtcatgttcaagatgatcaagggcatagtggacgagagcgtgacgggcgtgcaccggctgtaccagctgtccaagacgagcaagctgaccgtgccggcgatgaacgtgaaggacgcgatcaccaagaccaagttcgacagcctgtacagctgcaaggagtcggttatcgacagcctgaagcgcgccacggacatcatgatcggcggcaagcagattgtgctgtgcgggtacggcgaggtcggcaagggctgcgcccaggccctgaaggggctcggctgcatcgtctacgtgaccgagatcgatccgatctgcgcgctgcaggcgtgtatggatgggttccgtgtggtcaagctgaacgaggtgatccgcacggtggacgtggtgattacctgcaccggcaacaagaacgtggtgacgcgcgagcacatggacaagatgaagaacggctgcatcgtgtgcaacatgggccactcgaacaccgagatcgacgtgaacagcctgcgcacgtccgagctgcagtgggagaagatgcgctcgcaggtcgaccacatcatctggcccgggccggacggcaagcgcatcatcctgctggccgagggccggctggtgaacctgtcctgctcgagcatctcgtcgttcgtggcgtcgatctcggccaccacgcaggcgctcgcgctgatcgagctgttcaatgcgccgcccggccgctacaaggcggacgtctatctgctgccgaagaagatggacgagtacgtcgccagcctgcatctgcagacgctcgatgcgcatctgacggaattgaccgacgagcaggcccggtacatgggcctcaacaaggccggcccgttcaagccgaactactacaggtattag

SEQ ID NO: 109 - DNA, 1687 bp, Anopheles gambiae
gcggtttccatcatcttcttcgcgcagacatcggtcgtgctggttgataccgcggttttgactccaggttgaccttgagcgtttttgttcggcacaaagtgtgatttgtttgtttctttggtgttgtgaaaactatttatataccttgtatacaatggcgaacccgaatcaggaaattaagtacaccaagatcttcatcaacaaccagtttgtggatgcagtaagtggaaagacctttcccacggtgaatccatccactggcaagaaactggccgacattgccgaaggtgataaggccgacgttgaattggcagtgaaagcagccaagactgcctttgtacgcacgtccacttggcgccagatggatgcctctgccaggggtgctctgctctggaagctgtctaccctgatggaacgtgacgctaatgtgctcgcttcgcttgaatcgctggacaatggaaaaccattcccaaatgccatgtacgatgtgcagggttcgatcaaaacgttccgatactatgccgggctggctgacaaggtcgggggtgatacgatcccatcggatggacctcatttcacgtacacgcgcaaagaacccgtcggtgtggtgggacagattattccctggaactatccgctagctatgttggcatggaaatggggaccggctctggccgctggctgcacgattgtcataaagccggccgaacaaacgccgctgaccgctctgtacatggcggcgttatcgaaggaagctggcttcccggatggtgttatcaatgttgtgcctggctacggtccgacggctggtggagccatcagctctcatccggagattcgtaaggttgccttcactggttcggttgaagtaggaaagatcattatggcagcagcagcaactagcaatctgaagaaggtttctctggagctgggaggcaagagtccgctcgtcatctgcgaagatgctaatggtaagcgcggtgattcactcataaaaatttccattgcattcgttatctttttcatatccacagttgaccaggcggctatgatcgcctacatggcagtgttcgagaaccagggacagtgttgtattgcggctacgcgtacctttgtacacgagagcatctacgatcagttcgtccagaaagcgagcgaactggcaaaggcgcgcaaagttggcaacccgttcacggaaggaactgttcacgggccacagatcgatgatacgcagtacaagaagatcctcggctacattgaggtcggtcagaaggagggtgcgaaactggtcactggaggcaagacggtcggcaacgagggctacttcattgagcctacgatttttgccaacgtcacggacgacatgacaatcgcgaaggaagaaatattcggcccggtgcagagcattatcaaatatcgcacactggatgaggcgatcgaacgcgccaacaatacctcgtttggattggccgctggtattgtcacgaatgacatcaacaaggccctcaccttcagccatgcggtggaagctgggtccgtttgggtcaacacttacctggccgtagtaaaccaggctccgttcggcggttacaagcagtccggcattgggcgtgagctgggcaaagactcgctcgaaggttacctggagacaaaatccgtctccatccgacttccagctaaaatttaa

SEQ ID NO: 110 - DNA, 2043 bp, Anopheles gambiae
ggcctgggagtgaaaacggtgcaaatcggttccagcagctaagtgaagtgcaaaacgtaaaatcgcaaaacgtcgcgcgtgtctctgccacacagaatgagtaatcgcaataatcgcatcgtgtcggccggcgagcagcagctgccgacgccgttcaagctgtggggcggccgctactccaaagcaaccgaccacgtcctgtcgaaggtgaacaactcgctcaccgtggacaagcggctgtactcggaggacatcgacggatcgatcgcgtacgcgaagagtctggccgaggcgggcctgctgacgcagagcgagtttaaggtgatcgtgtacgggctggacgcgatacgggacgagtggagcaagggcacgatcaagctgctgccgcgcgacgaagacgtccacacggtgaacgagcgccggctgttcgagatcattgggccgcagatcgcgggcaagctgcatacgggccgcagccgcaacgagcaggtcgtggtggacatgaagctgtggatgcgcaatgcgatcgccgacctgcagcgcctgctggtggagctggtcggcgccatcaacgaggcggccgaccggcacatcgacgtgctgatgccgggctacacgcacatgcagcgggcccagccggtccgcttcagccactggctgctgagctacgcgttctacttcaaggaagacttcgaccggttcgatgagttcgggcgccggatgaacgtgctgccgctgggcagcggggcgctggccggcaatccgttcaacatcaaccgccacaagctggcggccgatctcggcttcgacggcgtgtccccgaacagcatgaacgtggtgagcgatcgggactttgtggtggagtttaacttcctctgcacgctggtcgccgtccacatgagccggctggcggaggatctgatcctgtacgcgaccaaggagtacaactttatcgagctgtcggaggagtacacgacgggcagcagcttgatgccgcagaagcgcaacccggacagcttggagctgatccgcggcattactggcccggtgtttggacagcactgtgccatcctgatgacgctcaaggggctgccgtccacgtacaacaaggatctgcagtgcgacaagagcggcatgttcgcggtgtacgaccagatgcagatgtgtctggtgctgatcggtggcatcattcagacgatgcgggtggacgaggatcgttgtctcagctcgctcgggtacgagatgctcgcgaccgatatggcctactatctggtgcgccgtggcattcccttccgggaggcacaccacatctccggcgaggtagtcgcccactcggaaaaggtaaagatcccgattaacaagctgacgctggaggatctgcaggaaattagtccccactttgacgaaacgatcagccgcatctggaactacgagaacagcgtggagcagtacacggtggtgggcggtacatcgcgcctgtcggtgcaggaacagatccgggtgttgcgtgcgttcgtggagggacacgtaccgagctaattagtgagtccatcgaagcagacgacgaaccccgaacgtttctttggccagaaacccccccccccaacccgtagtcagtaaaacgagtcgatataacgcactctctctctctttagatatgtatgtatgtatgtatatttacgcaagtagtagtagtagcagtagtagtagtagttgcagtgtagtagtaatagtagtaggctaccaaatattacattgtgatcacaggattgccccctgacgacagtgcgcgatcctctcgaaacgcatgcaagtgtgttgctatagtttgctcttgatatcttgatcgtttgtcaagcgcgaactactcccccaccccattcggcaggaaggagcagctatataactctgctgtttgtgttaatgttagtgagagcacatgtcggaccttatgcactaagtgtgttcgcaagaaaggaaggtataaaaacactataatggaaagggcaataaaaaatctttcgttttcgtaacattaacgtc

SEQ ID NO: 111 - DNA, 1934 bp, Anopheles gambiae
gctaccacaacacgacggcattttcacgcagtcaatttttggaatacggtgcacgacttgtgaaacgaaaggccaatcgttcttcgtatcattaatccggcctagcaatggaaaacttaactctaagcgagttgtacacatcggaaaaacgtggcaacgatgaaacgggcaaaggcacggcagaggaacccttcaaaaccattctccgggcgatgaagcatgccggcaaggaaccgttccccacgatctacgccgacagcaaggacgagaaagcggaatccccgtacgaggtggccgccaagtcgcagctgaagaagatccaaaagatctgggcccgcgacaacatgaagggcgacaagcagaagcgcgaggaggaagagaaggccaagaaccgggaacagaacctggaggaggcgaagaagatcaccatccaggaggatccgtcctggccggcagccaaatcgatcaagattacgcacggtgccgacaatcggggcgttcgcgttcgcatctacggatgggtgcatcggctgcgccgacagggcaagggcttgatgtttatcacactgcgcgacggtaccgggtttctgcagtgcgtgctgaccgacaccctgtgccaaacgtacaatgcgctcgtgctgtcgacggaatcatcggtgcagctgttcggtacgctgaaggaggtacccgccggcaaaacggcacccggtgggcacgagctgcacgcggactactgggagctgatcggactggcgccggccggtggtgctgatgcaatcctgaacgaggaggcacacccggacgttcagctggacaaccggcacattatgatccgtggcgagaacacgtccaagattttgaaaatgcgcgacgtagtgatgcaagcgttccgttcgcattacttcgaccgtggctacacggaagtgacaccgccgacactcgtgcaaacgcaggtagagggtggtgccaccctgttcaagctggactacttcggcgaggaagctttcctgacgcagagctcccagctgtatctggaaacgtgcataccggcgttgggtgacgtgttttgcgtggcgcaaagctaccgcgcagagcagagccgcacccggcgccatctggccgagtatagccacatcgagggcgagtgtccgttcatcaccttcgacgatctgctcgaccggctcgaggatctgatctgcgacgttgtcgaccgggtgctgaagtccccgtggggctacatggtgcaggagctgaacccgggctttgtggcaccgaagcggcccttccggcgcatgaactacgccgacgcgatcgtctggctgaaggagaacaacgtgacgaaggaggacggcagtttctacgagttcggcgaggatattccggaagcgcccgagcgcaagatgacggacacgatcaacgaaccgatcatgctgtgccgcttcccggcagagattaaatcgttctacatggccaagtgcgaagacgatccgcgccttacggagagcgttgatgtgctgttgccgaacgtgggcgaaattgttggcggatcaatgaggtcctggaagtacgacgagctgctggacggatataagcgcgaaggtatcgacccgaaaccgtactactggtacgtggaccagcgcgtgtacggtacggaaccgcacggtggctatgggttgggattggaacggttcctgtgctggctgctgaaccgctaccacatccgtgaggtgtgcctgtatcctcggttcctcgaacgatgccggccttaaaatgtggggttaaattcatcccctacaaaagacaacccacgttgcgcattatggccggtgtgcttttatcacctgcccaatatctgcatttttgcctgtgcattgattgcttaccaagttctcaaacataaagataataaatattaataccctcaatagcagccc

SEQ ID NO: 112 - DNA, 1363 bp, Anopheles gambiae
cgtacgtgacagctctgcatctcctggaggtaaacatcgtgctctcgaacgaatattgccgagccattttcgtgtgtccttgttgccaccgttttcgccaatagaaaaggatcatttggctgcgtgcacattccccccgccggaaacagtgacccggagtgttcgtttttcggaagtgagcaccacttgtgccacagcgagtttcccaaaccccgaagcacacagctcgaagcatcccgcccttgagaagcatcgtagacagtaacagcccgtggatgcgcttgcacgaggataaccaaggacggaagccaagcaccgccgagtggtacgatatgagcgacgatgatcgggacattgacatagagagcgatgatggtgatgattcggacaacaccaaatcccaatcgcgttccggtgctgggagccatctatactcacaggccgaaaagcgcgctcaccacaacgcccttgagcggaagaggcgcgatcacatcaaggacagtttcacctcactgcgcgactccgtgccgtcgctgcagggcgagaaggccagccgcgcccagatactgaagaaagcggccgaatacatccagttcatgcgacggaagaacaactcacaccagcaagacattgacgatctgcggcggcaaaacaatatgctcgaatcgcaaatccgccacctggagcaggcacgggcgtccggcaacttcgtcgacggtgctgatcttgggcttgcgttccaggacggatcgcgcggttccgacagctccgacattgacgaggttcctaccaacaacaacaacgggctcggtgcgcggcgaaacaagaagatgaaaacgaatgcgaactactagagagagaaagagagagagagagagagagagagaccgtctggccacagtgggcggaatttggtaacattttttcttatggtttcttttcttttgctcgtttttttgcaaagtaacggcacaatcatcggcgttacttcgcgtacgtggtagcttgtaaagtttgctttaaggttacatttacatattattttagctctcgaaacagctcgatttgcgcttccgtacagttctgtttccgtacaaagatcctaacgaattgaatcctttttctttcattgatgtaaattaattatttgttcataataccgcgaacaatatggttgacacaccacaccacggaacaacacttgcaaatttgatgactgtatgcatgaaaaacacaatgggttacgcttgagttatggcagtcgaagaaaaacaaaaacgtatataatattaaattgtaggaaaagtgtcattattgtgcataatcgagagaagagatacaataaaactatatttagcatttc

SEQ ID NO: 113 - DNA, 1302 bp, Anopheles gambiae
atggtgcgattaaacagtgcagccggctcccggtggtgggccccagcgatggccatcctggcggtggcgctcagtgtcgaagcggccgaggtcgcacggtacgataactaccggctgtaccgggtgacgccccacagcgaggcgcagctacggtcggtggccgccatggagcaggcgagcgatagcttaattttcctcgagaccgcccgcaagctgggcgatcggttcgacatcgtcgtcgcgccgcacaagctggccgactttaccgaaacgctcgaatcggactacatcccgcacgagctgatcgagcagaacgtgcagcgggcgttcgatgaggagcgcgtccggctaacgaacaagcgcgccaagggtccattcgattggaacgactatcacacgctggaggagatccacgcctggctcgaccagctggccagtgagcatccgaaggaggtggagctgctcgacgcaggacgatcgcatcagaatcgcaccatgaagggtgtgaagctttcgtatggtcccggccgcccgggtgtgttcctggagggtggtattcacgcgcgtgaatggatctcgcccgccaccgtgacgtacattctgaaccagctcctcaccagcgaggatgcgaaggtgcgtgcactggccgaaaagtttgactggtacgtgttcccgaacgcaaacccggacgggtacgcgtacaccttccaggtgaaccggctgtggcgcaaaacgcgtaaagcgtacggtccgttctgttacggggccgatccgaaccgcaactgggacttccactgggccgagcagggcacgagcaataacgcctgctcggacacgtaccatggatcggaagcgttctcggaggttgagacccgttcgctggctgcgtttgtggagaagctgcgcggtaagctcggtgcatacattgcgttccactcgtactcgcagctgctgctgttcccgtacggtcacaccggggagcattcgccgaaccatcaggatttgaacgagattgccgaggcgacggtaaagtcactggcgaagcggtacggtacgcagtacaagtacggcaatgtgtacgatgcgatctatccggcgagcgggtcgagcgttgactggagctatggggcacaggatgtgaagattgcgtacacgtacgagctgcgtccggatggcgacgcctggaatgggttcgtgctgccaccgaacgagattgtgccgacgggcgaggagacgctggattcgctcatcaccctgctggaggaatcatccgcccgtggctattacgatgagaagcattga

SEQ ID NO: 114 - DNA, 1203 bp, Anopheles gambiae
atggtgaaggagacgggattttacgatgtgctcggcgtaaagcctggctgctccccggaggacctgaagaaggcgtacagaaagctcgcgatgaagtaccatccggacaaaaacccgaacgagggcgagcgcttcaaggcgatctcgatggcgtacgaggtgctgtccgatccggaaaagaaagcgatctacgacgagggcggcgaggcggccatcaagcagggcggtgcgggcgggggcggcttccacagcccgatggacatcttcgacatgctgatcaacggcggaatgggcggcgggcggagggagcagcgcggccgcgacctggtgcaccggctgaccgtgacgctggaggagctgtacagtggcgcaacccggaagctgtccctgcaaaagagcgttatctgtgatgggtgcgacggcatcggcggcaagcggggtaccgtgcacaagtgcgtcccctgcaacggtacgggcatactgacgaaggtgcaccacatcatgcccggcttcatgcagcagaacaaagtgccgtgccgcgcctgccaggggcagggcgaggtgttcgacgagaagcacaagtgcaaaaagtgcgacggccagaagaaggtgcgcgacaagaagatactggacgtgcacatcgagaagggtatgcgcgacgggcagaagatcgtcttcagcggcgagggcgaccaggagccgggcctgcagccgggcgacattgtgatagcgctggaggagagaccgcatccggtgttcaagcgctccggcaaggatctgatgatggagatgcggctcgagctgtccgaggcgctgtgcggcttccagaaggtcattaccacgctcgacaagcgcagcctcgtcatcacgtcgatgccgggcgaggtgatcaagcattccgcgttcaagtgcatcatggacgagggcatgccgcagtggaagaacccgttcgagaaggggcggctcatcatgcagttccgcgtggtgttcccggactcgctgccgggcgaggcggccaagctgctggaacagtacctgcccccgaagccggccgaggagatcccgcaggacgtggagatggtcgagctggtcgagctggatccggagcaggagtcccgcaaccagtacaagaacgcgtacgaggaggacgaggaggacggtggcaccccgggcgtgcggattcagcagtgcgcgaccagctaa

SEQ ID NO: 115 - DNA, 2487 bp, Anopheles gambiae
cgtttcccagctttgtaggtgaatttgtggttcaaaatgagtgcgttggcactggacgaggtgcccggcttttcgctgcacaaagccgaagtagattacgacgatgaggggaacggattcggtggcaagaagggcaagaaaaagtctggtggatttcaggcgatgggtctgagtgcgccggtactgaagggtatcctgaagatgggctacaagatcccgaccccgatccagcgcaaaaccattcccatcatcttggatgggcgcgatgtggtggcgatggcaaagaccggttccggcaagacgggttgctttctgattccgatgttcgagaggctgaagcaacgggaggcaaaggcgggcggcggtgctcgagcgctgatcctctcgcccacccgtgagctggccatacagacgtacaagttcatcaagcagctgggccggttcatggatctgaaggcgattctggtgctcggtggcgactcgatggactcgcagttcgcagccgtacacacgctgccggatgtgattgtcgctacgcccggtcgatttttgcatctgtgcgtggagatggacctgaagcttaactcggtccagtactgtgtgttcgacgaagcagatcggctgttcgagatgggctttggcgagcagttgacggaaacaatcaagcgactgccggaatcgcgccagatggtactgttcagtgcgacgctgccgaagctgatggtggactttgctacggcgggactgtgccagccggtgctgatacgattggacgtggaatcgaaaataccggatacgctcgacctgaagtacatctattgccgaccggcagaacggtacgccacgctgttggtgctgttgcgcgaagttatcccaagcacagcgcaaacggtcattttcgccggaacgcagcatcacgtggagctgatatcgttgatgctgaccaaagcaggtgtcccgaacagtcacgtttactccggtctggatgcatcggcgcgtaagattaatacggccaagtttacccaccgcaaggtgaacgtgctggtcgtgacggatattgcggcccgcggtctcgacatccccacgctggactttgttataaatctccacttcccgggcaaaccgaaactgttcatccatcgtgtcggacgttgcgcgcgtgctgggcgcagcggaatggcgtataccatcttctccaacgacgacgtggcccatctgattgatctgcacatgtttctgaaccgaccgctcgatgtggccgatcggaagacgatgggtatcgtgccaccggacatgcaggaaacggagcacctgctggtgcaggagtacgtacggcacgtcgatctggcgacggcgtatcgggtgagtaacaatgcgtacaagcagtacatcgtaacgcgaccggctgcatcggccgcctcgaacaagcgagcgaaacagtttaaaatcgacgagctgggagtgctggaagacttccagcaggagaaggccgagcccgaggcaggagccagaggaaagaggtggaaaaaaggaaaacccatttcgttgaaaaagaaagataaaaaggaagaggaaaagaaggagcagcaagagaagggaaagacggaaagctcgaacagcaagcccactgttgatgcggacgcgtttaggaacgatttcctggcgcgtatgaaaaactatcgcccgaatgcgaccattttcgagctcaacccgaaagcgcacgcccgtgagctggttgcgatgacgcagaagcgtgaggcggatgaggcaaagatcgagaagcataagcgtaagctggccgagctcgagcaggaagagcaggagaagcagaagagcaaagcaacgacggtggaggatgaggaggagcaaaagggtgctggcgggaaacgtcgcaagggtccggtccgtgacgaggagcactttatcgcgtaccaagcgaaggatgcgatcgatgaagatgggtacgcgatcgataatttcacgcgtcaggccaattcggccgagctgagtgtggtgggcgatacggccgagggacagcggatgcaccggcagctgcagaagtgggacaggaagaagaagaagatggtgaacgtggaaaacccgaaggcgggcaagatacgcaccgagcacggggtgtggattgcggcctcgtacaagacgggccggtacgacaagtggaaggagcgtacgaagctggacgagaagctgctcgcggaacaggcgcaacagtcggacgaggaagatggggatggggcggcaccgagtgcaccgatcgtacagcgccactaccccaccacacactggggccggcacaatgcgaaggccgatctgcgcaagctgcgcgatctggacctgaagacgcccgagcagatagtgaagaagcgcatggagaaggagacgaagatggcacgcgaaaaggcggccaggttgaagaacatccagcgcaagaagcgtgcgttagcgaagcgtcagaagaagggaaagtag

SEQ ID NO: 116 - DNA, 743 bp, Anopheles gambiae
tccgtcaaatcttcatcgcgcacacgtcgtgaccgatcgctctgttccgagatttttaaggaaatttgctcaaaatggcattcggagatgttaagaccgccaacggactgaaggaattggacaaattcctggctgatcacagctatgtcgaaggatacgctccatcgaaggctgatctgtccgtgttcgatgccctgggcaaagctcccgccgctacccatgtgcacgcgctgcgctggtacaaccacatcgcatcgttcaacgctaaggagcgttcggaatggggcggtcaggccctgccacaggtagccggcggcaagccgactgtcgccgccgcaccggccggcggagacgatgatgatgatgtggatctgttcggatcggaggatgaggaagagagcgccgaggcggccaaactgaaggaagagcgcctggcagcatacaatgcaaagaagtcgaagaaacctgccctcatcgccaagagctccatcattttggacgtcaaaccgtgggatgacgaaaccgacatgaaggaaatggagaagaacgtacgcagcatcgagatggacggactgttgtggggagcggccaagctcgtaccggtcggctatggcatccagaagctgcagatctgctgcgttatcgaggacgacaaggtttcggtcgatctgctgacggagacgattcaggagttcgaggattacgtacagtctgtggacattgccgcattcaacaagatctaa

SEQ ID NO: 117 - DNA, 2568 bp, Anopheles gambiae
gcagggcagagtgtattcatttgttaaccgtcgaaggcagcggcttgtccgtccatttctgaccaaacttactgacggcgttttttgtccccttttcctgttggcccccggtgcaaatcggttgtagctgtgtgcggtggtaattaaatcgacaaaaacatcactatgaagtacttgctacttctagtagtgggtgtgttcctggtgtcaggaattcaccaagtgcgtgcggatgatgacgatgacacactgccaatggtggacaatgatctcggcgcctcgaaggaaggttcgcgcaccgacgcggaggcggtcaagcgcgaagaggaagccatcaagctggacggtctgaacgtggcccagatcaaggagctgcgggaaaagtcggaaaagttcacgttccaggcggaggtgaaccgcatgatgaagctcatcatcaactcgctgtaccgcaacaaggagattttcctgcgtgagctgatctcgaacgcttcggacgcgctggacaagatccgcctgctgtccctgaccgacccgtccgtgctggacagcaaccgcaacctggaggtgaagatcaaggccgacaaggagggcaaggtgctgcacatcatcgacaccggcatcggtatgacgaagcaggatctggtgaacaatctcggtacgatcgcgaagtcgggcacggccgacttcctgtcgaagatgcaggacaaggagaaggccgacgggcaggacgtgaacgacatgattggccagttcggtgtcggcttctactcggcgttcctggtggccgaccgggtcgtggtgacgacgaagcacaacgacgacaagcagtacatctgggagtcggatgcggccagcttcagcattgtggaggacccgcgcggcaacacgctggagcgcggttcgcaggtctcgctgcacctgaaggaggaagcgctcgacttcctggaggacgatacggtgaagcagctgatcaagaagtactcgcagttcatcaacttcccgatctacatgtggacgagcaaggaggtggaggaggaggtggccgtcgaggaggaggcgaccgagaagccggccaagagcgaggacagcacggacgaggaggaggaggacgtgaaggtggaggaggaggaggcgaccgacagcgacaagccgaagacgaagaaggtgaagaagacggtctggaactgggagatcatgaacgacagcaaaccgatctggacgcgcaaggtgagcgacgtgaccgacgaggagtacaccgagttctacaagagcctgacgaaggacacgtccgaaccgctgacgcacacgcacttcattgccgagggtgaggtcacgttcaagtcgctgctgttcgtgccgaaggtgcagccgtcggagagcttcaacaaatacggcaccaaggcggacaacatcaagctgtacgtgcggcgcgtgttcattacggacgagttcaacgacatgatgccaaactatctgagcttcatccggggcgtggtcgattcggacgatctgccgctgaacgtgtcgcgcgaaacgctccagcagcacaagctgatcaaggtgatcaagaagaagctcgtgcgcaaggcgctggacatgatcaagaagatcgacaaggagcagtacgagcagttctggaaggagtactccaccaacatcaagctgggcatcatggaggacccgagcaatcggtcgcgcctggccaagctgctccgcttccagtcgtcctcgacgaagaacaaggagtacaccagcctgtccgactacgtggcgcgcatgaagccgaagcaggacaacatctacttcatcgccggcccgaaccgtgccgagatcgagaagtcgccgttcgtcgagcgtctgctgtcccgcggctacgaagtcctgttcctggtggaggccgtcgacgagtacagcatctccgcgctgcccgagttcgacggcaagcgcttccagaacgtcgccaaggagggcttcacgttgaacgagtcggaagagtcgaaggcccgtttcgaggagctgaagacggagtacgaacccctgctgaagtggttgaacgatgtcgcactgaaggacaaaatcgccaaagcccagctgtccgagcgactgtccaactcgccctgcgctctcgtcgcgtcgatgttcggctggaccggcaacatggagcggctggcgctcgccaacgctcaccagaagacggacgacccgcagcgccactactacctgaaccagaagaaaacgctcgaaatcaacccgcgccatccgctgatgcgcgagctgttgcgccgcgtcgaggtcgattcggacgatatcgtggcgaaggatatggcggtgctgatgttcaacacggccacgctgcggtccggcttccagctgccggagacggccgactttgccgacagtgtcgagcggatgatgcgccaaacgttgggcgtttcgctggacgagcagcccgagcaggaggagttcgtggacgaaccggcggctggcggtgaggagggcggcgctgccgccgacgaggacgaagaatccatcgatgccgatggtggtgaccacgacgagctgtaa

SEQ ID NO: 118 - DNA, 1504 bp, Anopheles gambiae
atgtctttcgatgaaacatcggccgatcgcaatgtggagatttggaagatcaaaaagctcattaaaagcttggaaatggccagaggtaatggaacgagtatgatttctttaatcatacctcctaaggatcaaatcagtcgcgtaagcaagatgcttgccgatgagtttggaacagcatcaaatattaaatcccgtgtaaaccgtctatctgttctcggcgcaattacgtctgttcaacacagattaaaactatacaccaaagtgcctccaaatggattagtcatttactgtggtacaatcgtgactgaagagggaaaggaaaaaaaggttaacatcgattttgaaccgttcaaaccaatcaatacctccctttatttatgtgacaacaaatttcacactgaagcactaactgcacttctggccgatgacaataagttcggctttattgttatggatggtaatggagctctgtttggcacgctgcagggaaacactcgtgaggtgcttcataaatttacagtcgacctaccgaaaaagcatgggcgtggtggacagtcggcgttgcgttttgcaagattgcgaatggaaaaacgtcacaattacgtacgaaaagtagctgaggttgcaacacaactgttcattaccaatgataaacccaacattgccggattgattttggccggtagtgcagactttaaaactgagcttagccagtctgatatgttcgatccaagattgcaatcaaaagttataaaacttgttgatgtgtcttatggaggagagaatggttttaatcaggcaattgagctagcagctgagtctttacaaaatgttaaatttattcaagaaaaaaaacttattggtagatattttgatgaaatatctcaggatactggtaaatactgcttcggtgtggaagatactcttaaggccctggagttaggatctgtagaaacacttatatgctgggaaaatctggatattcagcgttacgttttaaagaatcatgctagcgcaacgtctacgacagtattacacttaacacccgagcaagaaaaggacaaatctcatttcactgataaagagagtggcgttgagatggaattagtcgaatcgcaacctctgcttgaatggttagcgaacaactataagtgttttggggctacgttggaaattattacggataaatcacaagaaggtagtcaatttgtacgtggtttcggaggaataggaggaatacttcgttataaggtagactttcaaagcatgcagctggatgaattggataatgattgtttcgacctggaagactattaaacaacaacaagctgtttttaaagtgcatgattgactatacatgctaatggaataatcgtgatgtacacctcttaatatccatcttaaaaattaaaaatatataaagcaaaggataaatttgtaagatcccgttcgaaattggagagatttaaaaacttccataaatacaccattctcccagaaagcg

SEQ ID NO: 119 - DNA, 666 bp, Anopheles gambiae
ggtaagttatcttttcgtacaattaaaacacatgctagggaccgcaaagaaaaaggaattttaaatgatgatataaactagaatgattctctatgatcgtaaactatctcaagctcaacaggactgaaaatataaaaaattagtccacatagtcttgacttgctcgtgtgtgtacaatgttgtaatttgtattctttctttcaatttcagacccaaaacagcagcgcagaaaacagacaaattgattaacaagaccaaaacaatctaaaagacccaacacagcaaacggatggattggcgattgaacagtagaacgaaaacaattgtaaaaggtctaaatacaatccagggaaacaacaaacggacgaaccgattaatggaattagattcgtactaggttatgttgctgattccatctcctctaatccgctgtattcggcattaattccaaaaataatcttgtgcaatagtccaacatatattgcacactattatgaaatccattcatcatgctgtgaatcatcaagcatcttttgttcatgagtttcaggttttagctgccttcaacatggtctttccggggaaatctctcttgcgggtgggtatagcgcaatattgcgaggaaaggtatttcaccatatatcacaatttttacagtataagtgg

SEQ ID NO: 120 - DNA, 3208 bp, Anopheles gambiae
ctgtgcacgcagtcggcgtgttgttgattttcgtgtcgtgtaaagatcccggagaaaatcctgcaagatggttaactttaccgttgacgaaatccgtgccatgatggacaagaagcggaacatccgcaacatgtccgtcatcgctcacgtcgatcacggtaagtccaccctgaccgactcgctggtgtcgaaggccggtattattgccggtgctaaggctggtgaaacccgtttcaccgacacccgcaaggacgagcaggagcgttgcattaccatcaagtcgactgccatctcgatgtacttcgagctggacgagaaggatctggtgttcatcacgaacccggaccagcgcgacaaggactgcaagggcttcttgatcaacctgatcgactcgcccgggcacgtcgatttctcgtcggaagtgacggctgcgctgcgtgtgacggacggtgcgctcgtggtggtggactgcgtgtccggcgtgtgcgtccagacggagacggtgctgcgtcaggctattgccgagcgcatcaagccggtactgttcatgaacaagatggaccgtgcgctgctggagctgcagctcgacccggaggatctgtaccagaccttccagcgtatcgtggagaacgtgaacgtcatcatcgccacgtacaacgacgacggtggcccgatgggtgaggtgcgcatcgacccgtcccgcggttcggtcggtttcggctcgggcctgcacggctgggcgttcacgctcaagcagtttgccgagatgtactcggccatgttcaagatcgacgtggtgaagctgatgaaccgcctgtggggcgagaacttcttcaactcgaagacgaagaagtgggcgaaggtgaaggacgatgacaacaagcgctcgttcgtgatgtacatcctcgacccgatctacaaggtgttcgacgcgatcatgaactacaagacggacgagatcccgaagctgctggagaagatcaaggtgtcgctgaagcacgaggacaaggacaaggacggcaagaacctgctgaaggtggtgatgcgcacgtggctgccggccggcgaggcgctgcttcagatgattgccatccatctgccgtcgcctgtcgtcgcgcagaagtaccgtatggagatgctgtacgagggcccgcacgacgatgaggccgcggtggcggtgaagaactgcgacccggagggtccgctcatgatgtacgtgtcgaagatggtgccgacctcggacaagggccgcttctacgcgttcggccgtgtgttcgcgggtaaggtcgccaccggccagaagtgccgcatcatgggcccgaacttcacgccgggcaagaaggaggatctgtacgagaaggcgatccagcgtacgattctgatgatgggccgttacgtcgaggccatcgaggacgtgccgtgcggtaacatctgcggtctggtcggagtcgatcagttcctggtgaagaccggtacgatctcgacgttcaaggacgcgcacaacatgaaggtgatgaagttctcggtgtcgccggtcgtgcgcgttgccgtcgagccgaagaacccggccgatctgcccaagctggtggagggtctgaagcgtctggccaagtccgatcccatggtgcagtgtatcatcgaggagtcgggcgagcacatcattgccggtgccggtgagctgcatctcgagatctgtctgaaggatctggaggaggatcacgcctgcattccgctgaagaagtccgatccggtcgtgtcgtaccgtgagacggtgtcggacgaatcggaccagatgtgtctgtccaagtcgccgaacaagcacaaccgtctgttcatgaaggcggtcccgatgccggacggtctgcccgacgacatcgacaacggtgacgtgaacgcgcgcgacgagttcaagcagcgtgcccgctacctgtcggagaagtacgactacgatgtgacggaggcgcgtaagatctggtgcttcggtccggacggtactggcccgaacatcgtcgtcgactgcaccaagggtgtgcagtacctgaacgaaatcaaggattcggtcgtcgccggtttccagtgggcttcgaaggagggtgtccttgccgaggagaacatgcgaggcgttcgtttcaacatctacgatgtggccctgcacgctgacgctatccatcgtggtggtggtcagatcatcccgaccgcccgtcgtgtgctgtacgcttcgtacattacggcctcgccccgcatcatggagcccgtctacctgtgcgagatccagtgtccggaagcggccgtcggtggtatctacggtgtgctgaacagacgccgtggccacgtgttcgaggactcgcaggtcgccggtacgcccatgttcgtcgtcaaggcttatctgcccgtcaacgagtcgttcggtttcaccgccgatctgagatccaacaccggtggacaggcattcccgcagtgcgtgttcgatcactggcagatcttccccggtgacccaactgaccccagcacgaagccgtaccagatcatccaggacatccgcaagcgtaagggtctgaaggaaggcctgccagatctgtcgcagtacttggacaagctgtaaacgcttcggccgcagcagcagcagcagcagcaacaacaaacccatttattaatttaccaagtacatttataaaatcgaagctgtgtgttgtgtgtgggctgctgcaaaaccatccgcagcaggacagccaacacagcacaggacttatttacacacagaaaagcaaatcagacactcaaaagcaaggcatggcacgcggggcggtatgatgatttgatttttttattggacagagaagagtttcacacgcacacaccaacacacacacaatacagtcctgcaaattgggactgcactgtgggaccccacatccaaccacagacgcaggctccctttttcgcatggcccccgacaacaacaccaccccagtgtgtgctaattaatttacccacataataagggatgacgattataggaaaaagaaaagaaaagaaaaacaaacgtgtgcgtggggttaagttaacgttttcttcttcatcttctgatgggatggctataagttggaatttacaattacagcaaatagagaagaatccgacgccacgacgccgccgccgctgtgcttaaactaacggcggggctctaacgtcgcgaaacaaaaacaca

SEQ ID NO: 121 - DNA, 1159 bp, Anopheles gambiae
acattgacgcgagttcacttctacggatgccaccgtgcgatttttgctgtccaatctaaacatgtcgacgattaatttaccactaaatttaaccgtgcgcgtgcatccggtggtgctattccagattgtggatgcctacgagcgacgtaatgccgactcggaacgtgttatcgggacgctgctgggttctgtcgacaagggtgtcgtagaggtgactaactgcttctgcttgccccacaaggaacacaccgaccaggtggaggcggaactgggctacgcgtccgatctgtacgagctgaaccagcgcgtcaatgcgtcggaaaacattgtcggctggtgggcaacgggccaggaggttacgaaccacagctcggtcatccacgaatactatgcccgtgagtgcacgaacccggtccatctgacgctggacacctcgctgaccggtgcccgcatgggtatcaaggcgtacgtgtgcgtgtcattgggcgtccccggtggcaagagcggttgcatgttcacgccgatcaatgtggaggtgacgagctacgagccggaaatcgtcggtctgcagctgtgcatgaagacgatcggcgtgcagtcgaacccgagccgcccgcgcaccgtttcgccgatgctcgacctggcgcaggtgaccgatgcctcggacaagctgctggccctgctgtccgacgtgctcgcctacgtggaggatgtgctgagcgagaagcagcaaccggagaacaccgtcggacgcgcgctgctcgatctgatccactcggtgccgaacatgacgggagaccaatttgcgcaaatgttcaactcgaacgtcaaggacttgttaatggtggtcacgttgtcgcagctaattaaaactcaactgcaattgaatgaaaagctaacgtcactcacatcgttcctcaactgagaaggggtgcagcgcaattgttaaaccgcagcttagctggccaacggccggctaagaaaggaacagaggaggcatagaggaggattgcttgtgcaagagaggagaagaggggtggggtctgtgtcaggtgtccgaaaaacagtggacgataacgataaattattccagacttgaaaatcgtcgtacggtattaataaacgacagcattatcgtgctggggaatgaacacagaaa

SEQ ID NO: 122 - DNA, 3190 bp, Anopheles gambiae
cgggagagacgcggcgagttcgacattcccgaaacaaatttcagagttttttttttgaattcttcacatcaactccccccatacgtttagtatggtctcggaagattttcccgataataaggtggtagtcatctgaacagtgatagttaaccaaactgacagtaaacgcgatagtgtaaacatggtcaatcaattgctgcaacagtcgaaagactgggtgctgcggaacaaggtagcaaccttcctttccgtcgccctgttcgcgatggtcatcaccacgattgcgctggccgtttcgaacaacagcaatgcgagcgatctggaagagtgcgaggttcagcttgctcccttcctgtccaccaccaacgtgccgacgaccgagtcgtccgatgctaccacgagcgagcagcaaactacaaccgaaggaacgggaggtgcgaccaccaccaccaccgtgtcgatggatacatcgcccctgcccgaggtaaccaccgtcactagtgtgtcgaccaccactaccgcaccggacgttatcaactaccgactgccggacgatactataccgctgcactacgatttgctgctgcatcccgatctggagaagaaaacttttgccggcacggcgaagattacgatttggagcgtgcatgccaccgatcaggttgtgctgcacagccacgagctgctcgctattgggcggatcacgttcaaatgtttgaatgattcgacctacacatacatcaacaccaacgttgaccgggagcaggactttttgaagatcaatctcaacaaagcactgctggccaactacatctccgagctgacgatcgatttcaccggcaggctggatgcgggcatcgtcggattctactccagctcgtacagtgatggaagcggtggtacaaagacgattgcgacctccaagtttgagcccacgttcgcccgccaagccttcccgtgcttcgacgagccgcacctgaaggccgagtacacgatccacatggtgcatccgtccggcgatgggtacgccgcactgtcgaacatgaacgtcaaggagacggtggcggacaaaccgtccgccggcctgagcacgaccacgttcgagcgaagcgtcagcatgagcacctacctcgtggtgtttatcgtgagcgatttcctgcaccaggaggtgctgatagtgcccgagcatggttcgtcgtttccgctgcgcgtgtacgccacaccgttccagcaggagaacaccgcgtacgcactcgccactgcgcgcaccatcatcgagtactatgtgaagtactttggcattgcgtacccgctgcccaagctcgatatggccgccataccggactttgtgtccggtgcgatggaaacgtggggcctggtgacgtaccgcgaaacgtccatcctgtacaacagcgagacgagcagcaccgcgaacaagcagcgagtggcgggcgtcatcgcccacgagctggcccacatgtggttcggcaatctcgtcacgatgaagtggtggaacgagctgtggctgaacgaagggttcgcgagctacatcgagtacaagggcatggacgccgctcacccggactggggcatcgaggagcagttcatcatcgacgatctgcacggtgtgctgaacctggacgcgacgctcggctcccatccgatcgtgatgtcggtggaaaacccgaaccaaattacggaaatcttcgacacgatcacgtactcgaagggtgcgtccgtcatccgcatgctggaggactttgtgacgccgcccgttttccagcagggcgtcaagcgctacctggagaagctggcgtacgcgaacagcgtgtcggaggatttgatgcgcgagctggacgagctggtgccggacgtgagcgttaccgacgtgatggacacgttcaccaggcagaagggtttgccggtcgtgacggtcgccgaaaacgcgctgcagtacgtgctgcgccagcagcgcttcctcgccgatcaggatgcgaacgaaacggaagagtcgccgtacgggtaccgttggtacataccgatcacgtacctggccagtacggacgatccggcgacggcggcaccgcgccgcatctggttcccgaacgatgccagccggccggagctggtgatcgataagccggcgggtagcagctggatcaagctgaactatcgccagattgggtactatcgcgtcaactatccgatcgcgatgtggcaacagttcggcgaggcgctgcgcaaggaggtgaacacgttcacgatcggcgaccgtaccgggctgctgaatgatgcgtttgcgcttgcggacgcctcactgctggcgtacaaccatgcgctcgagctgacgcgctacctgagcggagagactgagtacgtgccgtggtcggcgatcgcgagcaagctgaagaacattcgcaacctgctgtacaactaccagtcgtacgatgacattacgacctacacgcaaacgttggtcgatgctgcggtaaaatcggttggctgggaagtacccgcggaaggcggacacatgacaaacttgctgcgcaccaccatactggatctcgcgtgttccttcggccatccggcgtgcctggaggaagcgagcaaacagttccgcggctggctcaacgccggtgccgtcatccatcccgacctgcgctcggtagtgtacacctacggcatacagtccggcgttaccgtggccgactgggacaaggtgctggaacgcttccgtcaggagaacgatgcgaacgaaaagacgaagctgatggtggcgctcgcctcctatccggaccagcgcaccatgcgccggttcctcgacctgtcctgggatacggcgctcgtgcgcacgcaggaccagctcagctgcattcagtacatcgcggcgaatcgggccggcgagcaggcggcctgggagcacgtgcgcgaaaactggccccggctggtggcccgcttcggcatcggcgagcgcaacctggggcgcatgataccctcggtgacgggccggttcacgacccaggcccgcctgaccgagctggaagatttcttcgcccgctatccggagtcgggtgccggtgcgaccgcccgccgccaggcgctggaaaacatccagaacaacatcagctggctggagcgcaacgaggcgaatgtggcggcttggctgaaggaggcgacggcaccgcagtaa

SEQ ID NO: 123 - DNA, 2733 bp, Anopheles gambiae
atggttggtcgacgatcgcttggagggatccgtacggggggtacgaagaaggaagaaatactcttaaacgttcaggtgaacggcgatgacgagatcgatctggtgcccgtcaccaagcaaaaggattaccgacgcagcgcatccggcgtcgacgatcgggaaggcgatgaggaggaatcggacgagctgtcggacaatccggactccgacccggacctgctggagacggaggacggccggctgatactggacatgaagcgcagcaagcactgtggcaagtgtaaaaagctgttcaaatcgtcggcggaaaagaaagaccacaaatacaagtgcccgggcgtggtggatgaggtgcaggacgttatactgaaggagcgcaaggcggcgaagcacgcgaacccgggcgaagagttccacaagtactgcaacccgaacccggacaatccctgctactgctgcggggaggatgtgagcaccgcccacgtcggccacattcggtgcaagttttgcccgaaatcgttcaaagcgtacgagtacatggagcggcacctgagctcggtccactccgagtcggacgcgttcccgtgcggctactgcaacgccaagtgcagcacgcagtcggtgctggacgagcacgtgaagacgcacgacgagggcaaaccgttcgcgtgcatggcgtgcgggaaagatttcacccgccgctaccatctggaccggcacgagaagcacaccaagtgtggcacggtcacgaaagagatcgcggtgctgccgtgcgaggtgtgcgggaaggagtttacgcgcatcgacaatctgcgcgaacacttgcgctcccacatgggacagggcgcccggaagcgcgactaccagtgtccgtactgtgcgaaatcgttctacggctcgtcgctgctgaacatacacatccggacgcacacgggcgagaagccgttcccgtgcgatctgtgcccgatgtcgttcccgtcgaccggtgcgctgcggaagcatcgccgcaagcacacgggcgagcggccgtaccgctgcgacgaatgttcggccacgtttgcggcgcgcgaaacgctcaaccggcaccggaagacgcacacgggcgagaagccgcacgagtgtgaccagtgcggcaagcggttcatccaggccacgcagctccgggcgcacgcactgacgcacagtggcgagaatgcgttccagtgcagcgagtgcgacgcgtcgttcaaccggaaggcgcggctgaacgatcacatcaagtttacgcaccggggcgaacacccgcacgagtgtgaccagtgtccgaaaacgttcctgcgcaaggaggatctggcgcgccacctgcttatccattcggagagcaagccgtttgaatgtttggtgtgcaataagtttttcaccaccaagcatgcaatccagctgcaccagcgaacgcacgacgaggacaatccggtacagtgcaaggtttgttcggggacgttcaagcgggaagactgcttgctgcgccacatgcgctcgaaacatcgtgactacttggaccaaatcatcgaggacaccgagaaggaaaagatgaaaaagctgatcgccaagagggacgcggaaaaggaggcgacggtcgaaattgacggcgccgtctatcagatcacaacgatggaggacaatccagcgcagacggtggaagtgttcgaggtggtggagattccggccagtaccggaaatgcgacgcccatcgcgctgcctccaaccacctcggtcccgtacgacctgctgccgatcacggaggatacggaggtcattttaggtgcaaacgaggaagtggaatttattgacaaattgaagacgcaatccaccataccaccacctgtagtggtagccgcgaagagtgtgaaaaaggaaaaagattcgctgaaggatgtaaagctgctgccggccccagcggtcgtgactgttgcagccgaacccttacgtacaaagccagcggagccggtggttgttgcgaccgctaagccgaaggaagccaaggttgtgagcattaagggcagtgaggcgatctcaccaccgaaacggcaaagcgttccgagcgtcccgaaaccgagcgcaagtgctgcaacctcacaacaaaagccgaaagctgtaacaccccgtccggcaaaggagctaccgacaaaggcggcaactccttccccgaagcaaccgaaagagcaatcgaaccttcccaccgtgctggcggtggaaagtgtgaagcgtgtcaagccggaaccacaagtgtcaccaccgccagtagcactaccgccggcagcttcgcgtccgaaagaagcaaagacaaagccgctgccgatggcggaggaaccgaaagcaaagcgcaaacgggaatcgaaatcgtccaccacgccgaagcgtgcgcgcgtgatggatgaggacagcataccgatcttcctgagcgatgatatgctggagcaaaagatatcggaactgctgcagatgctgatgggcgacgacatgctgaccagcttcggctggccggacgcaccggtggaggaggtgctgggccgcgtcatccgcggttgcggacatcagccggcaaagggcgaggaggtcggcgaccatacgacgcgcatgcgggagaacacgaaaatactgttctccgttacgatggacgacgaagacattaaggcgctgctgaacaatcacacggtcgatgaggtcatcatgcatgtactgaagaacaaatga

SEQ ID NO: 124 - DNA, 2010 bp, Anopheles gambiae
gccgaagaagaagataggctgaaaatctggagaagaaagagagtgcgaaaaaggaggtggtgcgtttgccccgtgtgtgtcgtcgtgaaattcacgagctgtgtgtgatcaattagttttgcttccgcatcgccacccgatacccgatttcgcctatcgcgctgagccgtgccacggttttgcagtttgccagcgctcccgcgtccgtcggttaacttttcccaggggtttgcattgtgcgttacggcttgtaaacggctgttttgagggcagcagcgagcgtcgtggggtggtagatatttttggattcccatccgttcgagcgttcccatccgggctaaaagcgtacgccagtgtgtgacattgccaaaatgtttatctgggactggttcaccggcgttctaggttacctagggctgtggaaaaagtctggtaagctgctcttccttggcctagacaatgctggcaaaacgacactgctacacatgctgaaggacgaccgactggcacagcatgtcccaacgctccatccaacttcggaggaactttccataggaaatatgcgcttcacaacgttcgatcttggcggacacacgcaagcacggcgtgtatggaaggactatttcccagcggtggatgcgatcgtgttcctcatcgacgcctgggaccgaacccgtttcaccgagagcaaaaacgagctggactcactgctcacggacgaagcgctttccaactgtccggtactgatcctcggcaacaagatcgacaaaccgggcgcggcgagcgaagaagagctgcggaactacttcgcactgttccagctgaccacgggcaagggcaaagtgccacgctccgagctgcccggtcgcccgctcgagctgttcatgtgttccgtgctgaaacgacagggttacggtgaagggttccgttggttagcccagtacatcgactaataatagtatggtggtgttcggtggcaatacgtttattcaattttttttttgctttttcgggtatcaatgggtgattgcggggtcagtgaggagaagcgagcgcagcggataaacaaaacaactaccgaaagtcttattacttacccaaacccacgtacacacatacattaaaacaaaaaaataacttcaaatcaataggaaagcggatcgcggttctcctgcaaaatatgtgtgtgtgatccgtgcattattgggaaaaactgtgaaaaagtgcagtgagttcgagtcaacctggatatgtgctttgttcggtcctgcgggccagcgggcggtgctgtttttggtgccgaacaaagggacacggacagtagtagtgccggggtaatgttttaaagcaattgaatagcatgtgcgccgcgtgtaagagagcttgcaaggcaaaagaacgcttaaaaggaatggaggaaggcaacagaaagcattcccgcttttactgttaaaaaggaaaatgaaaaacaaacaaaaaacacacacacaaacacatactgtccatcttgaaatagaccggcgaggaacatttgatcaatcgttccacgaaaattgcataatgatgcctgtattaatctagtatgcttttttgttttgttataatgctcattcgaatgcgggacagttctgactcagtgttacacatgtagacgatgcgaaatcatctcacccttgggtatgctaagcactcagtttcatcgctgctattgcttaactcctttaacgttcaattcatccattgcttcgaagttctattcatatccgcgtcacaatattgataaaagacacttttcttcgggaatagaacaaattcaacaacccttgatagtgaccgtcataggtgaaaccaattttataacttaaaaaaccaccatttgcatctgtgagaaggtttgtgtggatacgagcgcgttaccgagcggataaaaaccgaaaccattgctggagtgtggaaaatggccagagttaaacacgagaacatgaacatgaatgaaacgatcatttttac

SEQ ID NO: 125 - DNA, 2354 bp, Anopheles gambiae
cagtcttgcggttgaagtttccagaagcggtttgatactgtataaaatctggtggcgtaaagcacgtgtcgaaaagaatagagaaaaaggcagtgcagtgcataacgcagaattgctgaacgagtcacatccgtgtgaaagtgaaattggtctcagttctaccgtaggaaaagccacaaaactcatccaagatgccggaaccacaagagggcgagaccttcgcatttcaggctgagattgctcagctgatgtccctgatcatcaacacgttctactcgaacaaggaaatcttcctgcgtgagttgatctcgaactcgtccgatgcgctggacaagatccgctatgaatcgctgacggatccctcgaagctggagtcgggcaaggagctgttcatcaagatcatcccgaacaaggaggccggcacactgacgctgatcgataccggtatcggcatgacgaaggccgacctggtgaacaacctcggaacgattgccaagtcgggcacgaaggcgttcatggaggcgctgcaggccggcgcagacatcagcatgatcggccagttcggtgtcggtttctactcggcgtacctggtcgccgacaaggtggtggtgacgtcgaagaacaacgacgacgagcagtacgtgtgggagtcgtcggccggcggctcgttcacggtgcgcccggacagcggggagccgctgggccgcggtaccaagatcgtgctgcacatcaaggaggaccagctggagtacctggaggagagcaagatcaagcagatcgtgaacaagcactcgcagttcatcggctacccgatcaagctgctggtggagaaggagcgcgagaaggaggtgagcgacgacgaggccgaggaggagaagaaggaagagaaggaggagaagaaggacgacgagccgaagctggaggacgccgaggacgatgaggacaagaaggacaagaagaagaagaccgtgaaggtgaagtacaccgaggacgaggagctgaacaagacgaagccgatctggacgcgcaacgcggacgacatctcgcaggaggagtacggcgagttctacaaatcgctcaccaacgactgggaggaccatctggcggtgaagcacttctcggtggagggccagctggacttccgcgcgctgctgttcgtgccccgccgcatgccgttcgatctgttcgagaacaagaagaagaagaacaacatcaagctgtacgtgcgccgtgtgttcatcatggacaactgcgaggagctgatcccggactacctgaacttcatcaagggcgtggtcgactcggaggacctgccgctgaacatttcccgcgagatgctgcagcagaacaagatcctgaaggtgatccgcaagaacctggtgaagaagtgtctggagctgttcgaggagctggccgaggacaaggagacgtacaagaagttctacgaccagttcagcaagaacctgaagctgggcgtgcacgaggacagccagaaccggcagaagctggccgatctgctgcgcttcaacacgtccgcgtccggggacgagtactgctcgctgaacgactacgtgggccgcatgaaggagaaccagacgcagatctacttcatcacgggcgagagcatcgaccaggtgaagaactcggcgttcgtggagcgcgtgaagaagcgcggcttcgaggtgatctacatgacggaaccgatcgacgagtacgtgatccagcagctgaaggagtacaagggcaagcagctggtgtcggtgacgaaggagggcctggagctgccggaggacgaggccgagaagaagaagcgcgaggaggacaaggccaagttcgagaacctgtgcaaggtgatgaagtcggtgctggagagcaaggtggagaaggtgatggtgtcgaaccggctggtggactcgccctgctgcatcgtgacgtcgcagtacggctggtcggccaacatggagcgcatcatgaaggcgcaggcgctgcgtgactcgtcggccatgggctacatggcgggcaagaagcatcttgagatcaacccggaccatgccatcatcgagacgctgcgccagcgcgccgaggccgacaagaacgataaggcggtgaaggatctggtgattctgctgttcgagacggcgctgctgtcctccggcttctcgctggacgagcccggaacccatgcgtcccgcatctaccgcatgatcaagctgggtctgggcatcgacgaggacgagccgatgacgacggaggagagcagcagcggtgctgcggcggcggccccagcgtcgggtgatgctccgccgctggtggacgactcggaggatctgtcgcacatggaggaggttgattaa

SEQ ID NO: 126 - DNA, 1358 bp, Anopheles gambiae
caagaaaatcgttgccgcgtatagatcaaagctattcaagagccagtgtattccgggaagtgtgtgaaaaccctgtaaccaaagagaaaagtttgaagaactgttctgtacagttaattaacagagtttagaagtttcgttgattttaaagaaagagttcacaaacagctatcaagatgccggaaggaccagaagccgagaccttcgcattccaggctgagattgctcagctgatgtccctgatcatcaacacgttctactcgaacaaggaaatcttcctgcgtgagttgatctcgaactcgtccgatgcgctggacaagatccgctatgaatcgctgacggatccctcgaagctggagtcgggcaaggagctgttcatcaagatcatcccgaacaaggaggccggcacactgacgctgatcgataccggtatcggcatgacgaaggccgacctggtgaacaacctcggtacgattgccaagtcgggcacgaaggcgttcatggaggcgctgcaggccggcgcagacatcagcatgatcggccagttcggtgtcggtttctactcggcgtacctggtcgccgacaaggtggtggtgacgtcgaagaacaacgacgacgagcagtacgtgtgggagtcgtcggccggcggctcgttcacggtgcgcccggacagcggggagccgctgggccgcggtaccaagatcgtgctgcacatcaaggaggaccagctggagtacctggaggagagcaagatcaagcagatcgtgaacaagcactcgcagttcatcggctacccgatcaagctgctgaagaagcgcgaggaggacaaggccaagttcgagaacctgtgcaaggtgatgaagtcggtgctggagagcaaggtggagaaggtgatggtgtcgaaccggctggtggactcgccctgctgcatcgtgacgtcgcagtacggctggtcggccaacatggagcgcatcatgaaggcgcaggcgctgcgtgactcgtcggccatgggctacatggcgggcaagaagcatctcgagatcaacccggaccatgccatcatcgagacgctgcgccagcgcgccgaggcggacaagaacgataaggcggtgaaggatctggtgattctgctgttcgagacggcgctgctgtcctccggcttctcgctggacgagcccggaacccatgcgtcccgcatctaccgcatgatcaagctgggtctgggcatcgacgaggacgagccgatgacgacggacgagagcagcagcggtgctgcggcggcggccccagcgtcgggtgatgctccgccgctggtggacgactcggaggatctgtcgcacatggaggaggtcgattaa

SEQ ID NO: 127 - DNA, 2354 bp, Anopheles gambiae; identical to SEQ ID NO: 125

SEQ ID NO: 128 - DNA, 2354 bp, Anopheles gambiae; identical to SEQ ID NO: 125

SEQ ID NO: 129 - DNA, 1358 bp, Anopheles gambiae; identical to SEQ ID NO: 126

SEQ ID NO: 130 - DNA, 2169 bp, Anopheles gambiae
atgtcacagcgagcgaagcgttccggtgcgtcgacgccggtcccggtgcaggccagcaccccggtgcagcagagtgggagcggtgcgacgggtgcgtcggcagcgcaccaccaccacagcgcccgcccggccagcccgctcagcccgacgcgccactcgcggctgcaggagaaggccgacctccagaacctgaacgaccggctggcatgctacatcgaccgggtgcgctacctggagcaggagaactcgcgcctcacgatggaggtgcgcacctcgcaggacacgaccacccgcgaggtgtccaacatcaagtcgatgtacgagcacgagctgtccgatgcccgcaagctgctcgacgatacgtcgcgcgaaaaggcccggctcgagatcgacggcaagcgcattctcgaggaaaacgacgagctaaagaagcgtttggagcgtaagacgaaggaagcggccgacgccgatcggaacgcacgtgcccaggaagcgcgcgccaacgagctgtcgaccaagtaccattcgctcgtgtcggaacacaagaaggcgaaggacgaccagaaggagctggagaaggagctggccaagctgcgcaagcagctggatgcgctgcgcaagaacctcgaggacgagacgctgacgcgcgtcgagctggagaactcggtgcagacgctgcgcgaggagctgacgttcaaggatcaggtgcaccagcaggagatcaccgagacgaagacgcgccggcaggtggagatcagcgaaatcgatggcatgctgtcggagcagtacgaggcgaagctgcagcagacgctgcaggatctgcgcgaccagtacgatatgcagctgcgcgtcaaccgcgaggaaatttccgatctgtacgaggtcagtgcgcctagaaaagactcctctgtaaaacattgttttattaacaaaaaatgtatgatgattgttttgttctgtttgcaggctcgtcttcgcgatctggagcagcagatgaaccacgagcggttgcgccacgccgacgagaaggccaagatgatggaggaggtcgagcgcctgcggaaggaaatctcgatgcagctgcaggagtaccaggacctgatggacatcaagatttcgctcgacatggagattgccgcgtacgacaagctgctcagctcggaggaggaccggctgaagataacgcccggcagccagacgtccatcttctcgcagtcgagcatgtcgggcagcctgtcgcgcagcggggtggtgcgccgcacgcccagccgtgccgcggccaagcgcaagcgcacggtgctggaggagtcggacgagcgcagcgtgtcggactactccgtcacctcgtccgctaagggcgacgtcgagatcgtggaggtcgacccggagggcaagtacgtgaagctgcacaacaaatccggcaaggaagtacaaatcggtggatggaccgtgctgcggaaggtgggcagcaacgaaaccgtgttcaaattccaccgctcgctgaagatggacggtggcgcctttgtgaccgtttggtcgtccgatctgggcaaggatcacgagccgccgacgacgatcgtgatgaaggggcagaagtggttcgccggtgacaacatgactacgcatctgctgaatgccgaaggggaggaggtagccgcctcggagcgtgtgaagcgaatggtttcgactgccgcctcgcgccaccgtgaatacctcggaagctacggagaggagcttcaccatcaacagggtgaaccccggggcgacgagaagtgccgtatcatgtaatagcacgcacgcacggatcaaccaatcaacacaatatggaagccacatggagcgtgcgcgtgtggtggagttaatatataattttatctctttaaacactacacatatttgttctgccgccgaaccttcgcccttcttcggcccgcgatgacggcgacctgggaaagggaagcgggagaagcggtggcggcgtatgttgtaagcgaataatttaaaaattatcgcccacagcggggtaaagctgtgcgcacaattgacatccacaaaaaccagaaaagaactctatgatagataggtatgtgttttgttgtttgcgttcttcaaaaacaaacgcaggaaatccgtattaagcccagaactagaaacgacggaaacgcgttg

SEQ ID NO: 131 - DNA, 1848 bp, Anopheles gambiae
gccgaggctagggcacgacgggcggacaagcagcacggaagtcagtccgcgacggtcacggtttgcagcagtgctccagtagctcctccagtcaaacgcggtggtctagaagcgaagcgttggaattgtctgtggcattgctgagagtgctcgtcacaacccccaaaaacacagacacaatgtccggcctgttcaacctgcggcgctacggtgcatccatcgcccggcaccatctgctagcctgcggtggctcaacctgccgacggcctccaccgcacgcgtttgggcgcgcgctgcacacgaccgcggcgctggaccgtgtcgtctcctttcacctgtccgatattggcgagggcatccgggaggtgacggtgaaggagtggtacgtgaaggtgggcgacgtggtcgagcagttcgacaacctgtgcgaggtgcagagcgacaaggcgtcggtcacgatcaccagccggtacgacgggaagattgtgaagctgcaccacgacgtcgacggggtggcgctggtcggcaaaccgttgcttgatttcgacgtggtcgacgaggaaggcgatgacagtggtagcagtagcagcagcgacagcagcagctccgacgaggaggacacgaaagcggctgcccagcaggcgggtcaggtggcggcgacggcagcatccggcaaggtgcttgctacgcccgccgtccggcggatagcgatggagaacaaggtggacctgtcgaaggtaccggctaccgggcggaacggacgcgtcctcaagggtgacgtgcttgagttcctggaggtgataccgaagggtacggtcaagccccatccgtcactggtggccaaggagcagcggaaggcggaaccgacggccccgctcgatctgaagcaggccgaaacggtcgttccactgaagggagtcgccaaggcgatggttcgctcgatgacggacgcactgaaaataccacactttgcgtactgcgacgaggtggacgtgacgcggctggtagcggtacgcgccgagttgaaggaggaggccgccgcccggggcgtgaagctcacctacatgccgttcttcctgaaggcggcctcgaacgcgctgctccagcacccgatactgaacagctcgttcgacgagccgtccgagagcgtcatctacaagcgctaccacaacattagcgtcgcgatgcagacgccccaggggctggtggtgccgaacgtgaagagcgtcgagcagaagtcgatcctgcagatagcgcaggacctgaacgcgctgcaggagcggggcgccaagggggccctcacgccgaacgattttgccaacggcacgttcgccctgtctaacatcggcattattggcggcacgtacacgcacccggtcgtaatgacgccccaggtcgcgatcggtgggctcgggcagacgcgggtcctgccccggttcgatgcggacgggcgggttgtgccggcccacatcatggtggtcagctggacggcggaccatcgcatcatagacggcgtcacgatggccagcttctccaacctgtggaagcagtacctggagaacccgaacctgctgatgctgggagcgaagtaggcggagaacggcaaaccgcgacgcaaacgaaaagaaaacattcctttcctcccacaggggcgagaaaaagagacagatagatagagagaaagagagagagagagagagagagaaccctctaatgtgccgatattgcatttactagttgtctaaggctctttatataatcccataccgcatgcgcgactccctatatgactttcccggaggtgctacgtgcgtatgtcatcgaatgacataccggagcagagctcca

SEQ ID NO: 132 - DNA, 2761 bp, Anopheles gambiae
cgaatgcgggcattctggcacagtgcagtgctaccgctggtcgggtaaagatttcaccaagatagttgggcaaaagggaggtgcgcgagtgtgtctccggtgcaacttctgtgtctgcgtctgtgtgtatattcgtctgtgatactctgtagtgtgtgtgctcccgtgtgtgtgtttgtgcacaatcagatcagaattccatttccttcccacatccgaggcaggccgggacatggcaacaaccgtcttcaacggctacccaatcatgcaaagatgtcagcctgagatggatagcagcagcagcagcaacgcgacgaagcagtcggcggcgaaggaaaaaccgagcgcaccgtcacggcaccgcgtagtaggtaatgagctgcagagcgtgaaacagcaaccgtcccagcgacagcaggagccttcccgtgtgccggaccgcgccgaagcaaaccaagtgccgacacactactcgcaaccaggagccatcggtgacagacgcagccggaccgcagacaggaccgcaccaaccaacagcagcagcagcagcatcgccagcagcaacatcagcatgagcacgccatcgttcaaccgtgaccgtcttgggcagtgggccgccgaatccgacggcgaaatcgcgggttcaatcgctggcttcgatcgactccgcaatggaaagttcaataagggtctgtccttcagcatcgaggagcggcaggtgctgggcatccacgggctgatgccggcgatcgtccgcacggaggaggagcaggtgcagcactgcctggagctgctgaagcactacaccgacccgctgaacaagtacatctacctgatggggctgctggatcggaacgagcggctgttctaccgcgtgcttgcctcgaacatcggcgagatgatgccgctggtctacacgccgacggtcgggctggcctgccagaagtacagcctggtctaccagcagccaaagggcatgtacatcacgatcaacgacaagggccacgtgtacgaggtgctgaagaactggccggaaagtgacgtgcgcgcgatcgtggtgacggacggcgagcgcatcctcgggctgggcgatctgggcgcgaacggcatgggcatcccggtcggcaagctcgcgctgtacacggccctggccggcatcaagccgagccagtgcctgccggtgacgctggacgtcggcaccaacacgcagtcgatcctggacgatccgctgtacgtggggctgcggcatcggcgcgtgaccggcccggcctacgacgagttcgtgcaggagtttatggaggcggcggtgcgccggttcggccgcaactgtctgatccagttcgaggactttgccaactcgaacgcgttccggtttctggaccagtaccgccacgactactgcacgttcaacgacgacatccagggcacggcgtcggtcgcggtggccgggctgctcgcctcgctgcgcatcacccgcaccaagctggcggacaaccgcgtgctgttccagggggcgggcgaggccgccctcggcatcgcccagctgtgcgtgatggcgatgaagcgggacgggctgacggaggaggaggcccgccagcgcatctggctcgtcgacagcaaggggctgatcgtgaaggaccggccgaccggcggcatcagcggccacaagcatctgtttgcgcacgagcacgccccggtcggtacgctgctggaggcggtgcgggagctgaagccgacgatactgatcggtgcggccgccattgccggcgcgttcacgcccgaggtgctgcgcacgatggccgcgaacaacgagcggccggtcatcttcgccctgtccaacccgaccagcaaggcggagtgtacggcggagcaggcgtacgagcatacggacgggcgggcggtgttcgcctccggctcgccgttcgccccggtcacgctcggcgaccggacgttccacccgggccagggcaacaactcgtacatctttccgggcgtcgcgctcggcgtgctgtgtgccggcgcgtccaccatcccggaggagatcttcctgctgtccgcccagcggctcgccgagatcgtgacggacgacgacctggagcggggcagcctgtacccgccgctggaaaacatcaaggactgctcgatcaagatcgcgacccacatcatggagtacgcgtacgcggaggggctggcctgcacgcaaccggagccggacgacaaggaggcgttcgtgcgcgcccagatgtacgacgcgagctacaagcccgccgtcccgtccgtgtacgcctggccgaagctgtaagaaggaatggcgcaataggagagaaggggagagagagagagagagagagagcgctcaccgagtttccaattctgtgttttggttgctactgttttggcgcgttgtttgtttttgatttttgttttattttttaattaactctcgcggtgttagatcggtggttttgttttgttttgtttgtagtgtgggatgcaatacccccccccccctttcttccctttcccgccttccctttcagtttaaatgtgtccgttacacacgttacgtagtgttattattttgaacctttttttgttatatcgtgtccctttttcttgcttaacctgcttttctctcctctggctcccgtaccttgtgcttcgaggatttgtgtataacacatcgcttgtgagcgtgaagcatcgaacaaaaaaaaaagaaacatccacacacaaacacgcaaaaaaacactgttaactc

SEQ ID NO: 133 - DNA, 2613 bp, Anopheles gambiae
atggacacaggcaggcctcgcagacgcagcggctccagcatcgtggtgctgggcggtgatgacaccctgaagccctccatacctattgatgactatcaggaggacttggaaatgtacaatatgttagcggcaaaccaggataatggaccacaccgggaaatggctgtcgatgtacctgaatcgttcatagccagaaacaaaacgcctccgcgctacccaccgccacgcagcacggtgacggcggcgtcggcggcggccagcacaccggcaacacccgcgtccacccagctcaatggctcgtcgaaaccggtgccaccgccccgggatcatctgcggatagagaaggacggccggctcaccaatcgcgcaccagtacccgctccacaagtgccagatcgtaagattgtgccgaacgcatcatcacagcaccagcatatcggccaggtcctggaaccgaccccggatcagttagatagcattaagaagttccaggagcaactgcgacggcgaagggaggacgaggagcggatagcggcccagaatgacttcctgcggaacagtttgcgcggctcgcagcggctccgcgcgctgcaggacaacccgatcgagaagccgccggtcggcgtcgacaacgaggcgtacgcggacgatgaggtggtggcggtggcagcggagaagattatcgggtacggcgagctggtggcggcactgcagcgactccaggggcacctcaacaagcacggcctggcggcactcgctggcagggtgacggcagcccagagcctgctgctcggtccgggcatcgcgcgggccctggccgtccggacggcggtcctcgagcggcggcgcccgaagataccgaaccccatctgccccaatgctcaagcgctagcaaaggattgcgtcgaatcgctggcccagtcccgctcgcaaaccgcgatcgagctgtgcgatctgctgtccacgtacgagatggagggtctgctgctggcgcacgatcggatcgcctcgaccacggaccgttcgccgatcgcttcgtacggtggcagcccgatcaccgtcccggtgccgctcggcacggccagcaacaacaccaccagcaacaacaccaccaccagcaacaacagcatcaacaataacaccttgaccagtgcggtgaaaccggccactgtcatgccatcaattccaaataacgctagtttagtgaacaataacaataacaacatcgctaagagggaaccaatgagtgtaccgctcggggtgctgcgcgacggcagccaggaccacatcaagatcatccagatcgaaaagtcgtccgagccgctcggtgccaccatccggaacgagggcgaagcggtcgtgatcgggcgggtcgtacggggcggtgcggccgaaaagtccggcctgctgcacgagggcgacgaaatactggaggtaaacgggatcgaaatgcgcggcaagtcggtgaacgatgtgtgcgccctgctcggctcgatgaccggcacgctcacgtttctggtcgtgccggcgggcgtaccgcagatactgcccgggctcggtatgcgcgatccgcccgtgctgcacgtgcgggcccacttcgactacgatccggaggacgacctgtacataccgtgccgggagctgggcatcagcttccagaagggtgacgtgctgcacgtgatctcgcgcgacgatccgaactggtggcaggcgtaccgggagggcgaagaggatcaaacgctcgccgggctgataccgagccagtcgttccagcatcagcgcgaatcgatgaagctggcgatcgcgggcgaggtggggctgcgcacgcgcaaagacatcaacgggaaggcgggcggcggctcgaccctgctgtgcgcccgcaagggacggaagaagaagaagaaggccagcagcgagcatgggtacccgctgtacgcgaccgccaccgcggacgatcccgacccggaggagatactcacgtacgaggaggtggcactgtactacccgcgtgcctcccacaagcgaccgatcgtgctgatcgggccgccgaacattgggcggcacgagctgcgccagcggttgatggcggattcggagcgctttgccgcggccattcctcatacgtcacgagctcagcgggagggcgaagtgccgggccaggactatcacttcatctcgcggcaacagttcgagtcggacatcctggcccgcaagtttgtcgagcacggtgaatacgagaaagcgtactatggcacatcgctggaagcgatccgagcggtggtcgctagcggcaagatatgtgtgctgaatctgcacccccagagccttaagctgctgcgctcgtccgatctgaagccatacaccgtgctggtggcaccgcccagcctggaaaagctgcgccaaaagcggatacgaaccggtgaaccttacaaggaagaagaactgaaggaaatcattgccaccgcacgcgacatggaggcacgctggggccatctgttcgatatgatcatcatcaacaatgataccgagcgggcgtaccatcagctgctggccgagatcaattcgctcgagcgggaaccgcagtgggtcccgagcagctggctgcacaactag

SEQ ID NO: 134 - DNA, 1497 bp, Anopheles gambiae
atttgtgcgagctgcttcactttctcctgcacaaaaactcattttttggtatcgtaagcaacagaaaacagactaaacatgagtccaccaactacacagtacggtatacaaagtaccgccggtgcagttccagtgaaaaacacaaagggtgaaatatctatgcaaaaggtgaaagtgcatcgatacgtgtcaggaaaacggccagaatatgcacagtacgccagcagtgacgaagagtcggaagacgacgatttcctggagcaccgtcgagcgaacgaagagcagcagcaacgggaagaatcagacgataacgaactgccagacgatgtcgatgatccccgtatccgacgcctgcaagcgattagggccgaaacgcaagatgacctggaacgggagcgcaaagaacgacaccggacgatacacgagccggagctggtacaatcggacgaagagaatgaccgtagcgatgccagcgaggacaatcgcagacagcggtacagcgacgatgagcgggaacaagcgaatgcgacctcccgccggcgacgcatctcccttggctccgagtccgaatcggaggccgagctgagcgattctgagatcgagcgcaggcgcaacctgctgaaagcaaaaatgctgcagcagaagcaacgcgaggaggaggaattgctgcagaagcaggaggaggaaggcatgtcggattcggaagagtcggagagctccgagtacgaggaggaaacggaaagcgacgaggagaacgaaccccggctaaagccgctgttcgtgcgcaaaaaggaccgcacgacgatcattgaaaaggagcgcgaagccaaccgccagaagcagctcgagtatgagtcgaaaaagatggccaaagaacgacggaaacagacgctccggctggtggaggacagcattaagaaggagttggaaaagacgaaggttgaaaacgaaccgtcgctgaacgacgtcaacacggacgacgagaacgacgaggtggagtatgaggcgtggaagctgcgcgaactgaaacgcatcaagcgggaccgcgaagagaaggaacagatcgagaaggaaaagcaggaaatcgagcggctgcgcaacatgacggaagaggaacgccggcaggagctgcgcaacaacccgaaacaggtgacgaacaagaacgtgaagggcaagtacaagttcctgcagaagtactaccatcgcggcgccttctacctcgacgaggaggacgacgtgtacaagcaggacttctcggccccgacgctggaggaccatttcgacaagacgatcctgccgaaggtgatgcaggtgaagaactttggccggtgcggtcgcaccaagtacacgcatctggtcgaccaggacacgaccaagttcgactcgccgtgggtagcggacacggccaacacgaccatcttccactccgagcgggccggtggcatgaagcaggtgttcgagaagccttcgctttatcgcaaaaagcgcgatgcgtag

SEQ ID NO: 135 - DNA, 1786 bp, Anopheles gambiae
atggtgtggccgtgttctcagcgccagcgcgagctggaggaagcacgcgcacgggccgcccagatggagaaaacaatgaaatggtggtccgactgtacagccaactggcgcgaaaagtggagtaaggtacgaaccgaacgcaacaaggcccgcgatgaggcgaaacagctgcgcagcaatctggaggcggccatcaaagagtccaactcgtacaagcgggaaaagtgcgagctggaaatgcaaatcacacagctcaagaaggagatggaaaaggtgcacacgctcatgatgaagcatgcgggccggttcaacaaagcctccctggacgcagcggacgaaccggaccgtgatgggcgcggtgacaacaactgttcgccagacatctcctccgacggactgaagaacgtcaacagcgaggatggtttggtgacgaagctgccgaacctaccggacgacggtgccggtgtgccagttgctgccagcgcgaacgccgatctcgacatcgaggagtacatcctgcagggtggcgccatgccgaaacattccgtagagtttaaggacaagagcgaacagatggcggaagagcgccgactcatccagcagctctcgaaggacgactacgacgaggactatctgctgcagaagatcacgatgctgcagctccggctggacgatgcgcagaaaacgattcagatcgagcgggaggagaaaaatgccgtgcatcgcaacctggaaaagacacgccaggacatgcaggagctgcgcgacaagtgtgaggagctgcgggcagcgaaacaggatgccgtgcgcgagctgttgacgctccaggagcagcaccgggtggagatgcgcatcacgcacaactcgctgcaggaagagagtatcgcacgggaaacgctggaaagacggctgtgcgagctgcgaaccgagctggagcgactgcaggcggaaaatgcggccgagtggggcaaacgggagcggctcgagacggaaaagctcaacatggagcgggaaacgaagaagctgcgggcggagtgccaagatttgcaagaacggttggagcgcaagggacgtccgctggtgaacagtgacgtggagcttcgctccctgcagcaggaactgctcgaaaaaaataaggagcttagtgacattcgtcattcacacagcaaaatgaaaaagatgctgtcagaggcaaacaccgagctcggtcacgcggtacgccgtgcggagcagtacgaaacggaggtcaaacggttgcgatcgcgtgtggaagagctaaagcacgagctggcctccgcggaggatgagctcgatgccgcctgcaatcacgtgcgtcggctgcagcgcaccaacgaggaactgagcggacagactgaaggcttgcaggtgcagatacagcatcttcagacgagactccgtagctcgcacggctcgaccagtctcctttcggccaacgaagataatagcgataatgaatgatttgttaagcaacttgactggactggaggaccggtgggaatacaacgacacacatactctcaggcaagaacgacacaatggtacaggatgggccattgtattacccaagaagtcttacatacatcaaccactactggtatgctctctaaatgaaaacccaattaagcagatgcgaacgacacttaggtttagtcgtaaactggtaatactctcagatactgtagcagagacctcagtacttatgcggtagcgataacgaaacaagtattaatcacgcaaacgatgattcctcatcaaaatttacttc

SEQ ID NO: 136 - DNA, 1976 bp, Anopheles gambiae
cacacgtgcgaaggttgagccgtacgttgtgctgcacagtgaaattaatctcatcttttttcccgtaaaatagtacattaacttattaaaatagtaccttcacgatgggtgatggtgatttcagctcggtgacgctttcgagcgcaaaagctcgccagaagaaactttgcacgatgcggctaaacgacccggtgaagaaaccgtactacaaagataccgacagtttcggcgcccgtatgctcagcaagctcggctggacggagggcaaggggctgggacgggatgagaacggaatcaccattcccatctcgaaccgggtgaagctggacacggaaggggttggtttcgtgggcggtagggacgacatgtggacgcagcatgaggcaggctttaccgaactgctccggcgcttgaacggtgatgagagtgaaccggccgaaggtgccggtgacgccgtgatcgaccccaaaagccaggtgcaatcgctcgaggagcggtcgaagcaatcgcgcgcccgtgtgcactacacccggttcacccggggcaaagatttgagcagagtgaacgagaaagatttggccaacatttttggcaaacgttcgctgaccgagagcagcaggccgagggaagaggaggagcagccggcttcgagcgggggtgagagtgccgaggaggatcggcctgttttaggtttgtcaacgattaaggcaagcatgtcgatgcaggattatttcaaggagaaaatgaaacagagagctgccgcgggcaatggagtagcaccggtggaggcaacggttaagacgaacggacagggcggtgaggaggaaatggtcaccgaagacacgcatgatggtgagaagattaaaaagaagaagagtaagaaaaaagcgaaagaaaccgaacaaactgttgaaccgatggaggaagctgtagccgttgaagaagcaccagcaactaaaaaatccaaaaggaaaagagagcatttggaggagaacgagcaagaagttttggtgaatggagattcggttgaatcggaaagcgaaccatcggaaccggtgaaaaagaagaaaaaggcaaagaagcacacctcaggacaggaacccactgtcgagtcggcctgtgcggtcgcagaagaagagatggtacagatggtagatgatacagttgctgccgaggagcccgtgaaaaagaagaaaaaatctaaaaaacaaatctctgaaccggagctcaaagtagaaccatccagtgaggtgacagaagaagaaaaggtagttgcgactgtggaaaacactgccactgtcgatgagccggtgaaaaagaagaaaaaatccaagaagactacctctgatccggaaccaccagtcgttgagtcaaccgaagaggtggcagaattagagccacccacagacaccactgccactgtcgaagaaccggtgaaaaagaagaaaaaatccaaaactcccaaatcagaatcctctacagaagaaggcgcggtggaaaaccccacaccggaaccaaacactgtcgaagctgaccaagaaacggccaacaccaccgaaacgggtgcctccacatccgcaaagaagaagaaaaagaagaaaggcaaccgagcagccagtccagcagacggagaagcagccaacaacgaaccagcatcatcgccagccgtgaacggcggtaccacggagccagcatcaaacggtaaggaaagcgtcggtccgatggatgaaataacgctgcaggtggccgcagccaacgcactttcggccgagtacgcgggcaagtcggaggaaacgacctgcaaagtgaaggtcgaagtgctgaagtacctggacgaggcgcgtttcgctggctctaattttggcgatattatcggttacagattaacggaggacgtgaagctcgtcaagaacgctgcatcgaaggagggtggcgacggtggtccatcgaggaaatttaccccacggcggaggtag

SEQ ID NO: 137 - DNA, 1369 bp, Anopheles gambiae
cccgtgcaccgtgccgcgactgcctaataataggcctgcgcataaccggccgcgcaggctgaaatataaaaagactgtgtttgtcggtcgccgaataaggcgaataagacccgcctgaaggaaggaagcagccgtagttatcagcgacggcgcttctttaaaatcagtcgctcacgagctgtaatcgagtagagtcgttctaatctaaccagctaagcaccatgtctgagaaggagaagaaggtcaagaagaagaaggcgtcgtccaaggatgacaccccagcagatacccctggtgcagacaccccggcggcaccgaccccctcggactctgcggccggctcgcagcgcggctcgacccgcggctcgtcgtcccgcaaggcaaagaaggccccatcctcggtcttcgttctcttctcccagaagcagatcgccgaattcaaagaggctttcgcgctaatggacaacgacaaggatggtgtcattggcaagaacgatctccgctccaccttcgacgccctcggcaagctggtgtcggacaaggagctggacgagatgctcggtgaggctacgggaccgctcaacttcacccagctgctgacgctgttcgccaaccgcatgtcgggtggtggccaggatgacgacgatgtcgtcatcaacgcgttcaaggccttcgacaccaacggcaagatcgatggcgagaagttccgcttcgccctgacccactggggccaggacaagttcaccgaggacgaggttgacgatgcattcgatcagatggtcattgacgataagggctacatcgacactgctgctctgatcggcatgctcaccggatccgaggagggagaggaagaataaattttataattaaaagccaaaaacaaaaccaaaaaactaacctaaaaaaaatctaaacaatgaattctgtttattttgtataactaccttcgtttcgaagttcgtctttttttttactatacacacactgtcattcgatcgtttttgttttgcgcctatgttttgtgtttgtagttatgtttgtgttctttttttttattgacctcggaggccctaagcttgttgtgccatgtgcatcaccaccgtcactggtctaggtgacggagggttgtgagatacaatggccacagtgtgtccagatcaaggaagaaaagataccatcaacatgaacattgatagcaacaacaacatcaacaacaacaacaacagcaacaacatcatcaacaacaacaccaaataaagatcgcgaagcaaacacgtttaatgggacagatactaaaccaatagaagctagcattaagaagagagaatgtgaagaagagcaattaaagaacatcaggaatgagagc

SEQ ID NO: 138 - DNA, 5892 bp, Anopheles gambiae
atgcgttatatctgcttcgaggatgcccgggtgtggatacctcacccggaaacggtttgggaaggcgccgtcgtcgcccaggactacaagcaggacgacaaacagctcaagctagtcaccgaccgcggggtagagcacacggtaccactgaaaaccccggccgatctgcctcccctccgcaaccctaccatcctgatcgggcagaatgatctcaccgccctgtcctacctgcacgagccggacgtgctgtacaatctcgaggtgcggttctgtgaccggcaggcgatctacacctactgcggcatcgtgctcgttgcgatcaacccgtacgccgagctgccgctgtacgggcccgacctgatccgcgcctaccggggccacgcgatgggcgagctggagccgcacatcttcgccgtgtcggaggaagcgtacgccaagctggagcgggaaaagtgtgacatcagcatcatcgtgagtggcgagtccggtgcgggcaagacggtttcggcgaagtacgcgatgcgctactttgccgccgtcggtggcagcgagtcggagacgcagatcgagaagaaagtgctggcgagcagcccgatcatggaggcgatcggtaacgcgaagacgacacgcaacgacaacagctcccggttcgggaagttcaccaagctgctgttcctgaacaaccattcgatggcgctgacgggcggtacgatgcagacgtatctgttggagaagtcgcgcgtctgctttcaggcaccgggcgaacggaactaccacatcttctaccagctgtgtgctgggcgggagcaatggcccgagctgatgctggaccatcaggacaagtttcacttcctcaaccagggccagtcgccgaacattagcaagctgtcggatagggaccagtttgaggatacgctgggggcgctcaagacgctcgggtttgatgatgcggagattggggacattatgaaggtggtcgcgtcggtactgcatctggggaatgtggtgtttaaccaccggcagaagagccaaacatcggaggtggacagtgaggcgtgctcgattgcgagcaacgatttgcatctgaacgttgcctgcgacattctgcagttggatcgaagcgagctgcgcaagtggcttgtgacgcgccagattgagtcgatgaacgacagcgtgctgataccgatgaacaagcagacggccgaggcgacgcgggacgcactggcgaagcacatctacgcggagctgtttcagcacattgtgcagaagattaatcgcaatttggcgggcagcaagaagcaaaactgttgcttcataggtgtgctcgacatctacggcttcgaaacgttcgacgtcaactcgttcgagcagttttgcatcaactacgcgaacgagaagctgcagcagcagttcaaccagcacgtgtttaagctcgagcaggagcagtacctgcgcgagggcatcgagtggaagatgattgacttctacgacaaccagccgtgcatcgatctgatcgagtcgaagctcggcatactggacctgctggacgaggagtgccggatgccgcggggcagcgacgactcgtgggtcggcaagctgatggaaaagtgcggcaagtatccgcacttcgaccggccccggttcggcacgagcgcgttcctgatcaaacacttctccgacacggtgcagtacgagtcgcgcggctttctagagaaaaaccgggacacggtttcgcgggagctggtgagcgtgctgaaagcgtccgggatgcggctctgccagcggttgatggtagcgcaggaggagggcggtggcgatggggatgcgaagaccgcaccggcggctggggtgaagattatggttagtgcggcaagaacgcagccgatgactcagaagcagcagcgaaaaaccgtcggttcgcagttccgcgagagcttgacacagctgataacgacactgcacaacacgacgccccactacgtgcgctgtattaagcccaacgacgacaaagcaccgttcaaatgggaagcaccaaagatcgtgcagcagctgcgcgcgtgcggcgtgctcgaaacggtccgcatatcggccgccggcttcccgtcccgctggaagtacgaggacttttacgaacgctaccggctgctgtgcaagcgggcccagatcgtggactggcacgtgaaggccacctgcacgaacatcgtgcgcaactggctgctggacgaggacaagtaccggctgggcaatacgcagatctttttccgtgccgggcaggtcgcttacctggagcaggtgcgcagcgacacgcgcaagaagcacatcatcgtggtgcagtcgctgatccggcggttcgtctgtcggcgccggtacctgcggctaaagcagacggcactggggctgcagcgccacgcgcgcggaatgctggccagaaaacgcgcggacaatctgcgcaaaaaccgtgccgccatcatcatccagcggtacacgcgcggctggctgcagcgcaagaagtatgtgcagctccgcacagccgtactggggctgcaaacgcgtgcccgcggcttcatggcccggcgcaagtttcgcgcagtgctcgacaactacaaggcgaccgaggtgcagcgcttctgccgcggctatctggcccgccgacggtaccgggcacggttggaccacattatcaagtgtcaggccgcggtgcggcggtttctggcccggcgtgcgttcaagaagctgaaggcggaggcgcgcaccgtcgcccacatccagaagatgtacaaggggctggagaacaagatcatcgagctgcagcagcggcacgacgtgctgtcgaaggagaacgctgcgctgaagaagcaaaacgtggaggtggtcgagatgcgccagaagctggacggcatgaagcggctggagggtgagctgaagctgctgcagctgcagctggtgcagaaggacgaaaagctgatgctgtcgatccgccagctggagggtgagcgggacgagaagatgcagctgctcgaggagaagcagcgcgaggaggaggaacgggcccgggagcgggacgcgttcgagcaggagctggcgaaggtgcggcgcgaggtgaccgagatcacggccgtcacgcagatcgaacaggcgcggttggtgtcgcaggcggacacggaggagattcatgccgcctaccagcgcacggtgaaggacaaggacgtgctggagaacgagaatgtcgcgctgcggcaggaggtgcgccggctgcagcgcattgcggcggactcgcatgagctgaaaactcattcacgctccgtcagcaatgcgtccagcacgaacgaggaggactacggctacacgtccgggcggaacacgctggacattcggcgtgcctcgccccatccatacgaagacccttcggattcgactgtaggcgagtcgcccgagaaggaccaaacggccatcatactgcgcatgcgcaagctgttcgaggaggaaaagtccaagagcgagcagctgcggaaggagctcgcccggctgaagaaatcctccaccttcagcacggaagactcgatccgtgcgtccgagctggaggttgagaacgagaagctgcgccaggactacaacctgctgcgcaacagcatcaagcgtggcgtcgagtcgcgcgagatggacgcccagtacggggcgctgcaggaggagctgaagcgccgccgggaggagtgcatttcgctgaaggccgtcctggcgcagcagagccagtcgctgcgctcgctcggccaaacggcaaacggggcggaaacgagcctgcggatacacgacgagggcgagctgatggaagcgttccaggcgcagaagctggtcaaccggcagctcgagtcggagctgcgcgccatcacggacgcgaacaatgaaacgctcgtcgagaacaatcgcatcatcgacgggttgcggacggagaacggggagctgcaggcgatactgcagcagcacgtggagcaggtcggggaggaggtggacctggagacggtgcggcagaatgagcagtatctgcggcacgagctgaggaagtcgacggcggcgtacgtggagctgcaggagcagctgaacgagctgctggcgaagaacaatgagctgctgaagaagaacaacatcctgtcgaatcggttgcgcgaccacgggctgaacgattccatcctgatgaacgacgagttccacagcatggtggcggtggtgaagaagcagacgcagtcgtcccagggcatactgaagtaccggcaggaggacgagagcaagataatgcagcgactggtgacggacctgaagccgcgggtcgctgtgacgctagcgccgagcctgcccgcgtacgtagtgtttatgtgcatccggtacacggatctagtcaacatggatcagctcgtgcggtcgctgctgacgcgcttcgtgcagatgatcaagcggctgtaccggggcgcgaactcggtggaggtgcgcgtcatgtggctcgcaaatacgctcacgctacacaatctaatgaaacagttcggcggctacaaagactacatgaagtacaacacggacgtgcagaacgcgcagcagctgaaaaactttgacctggccgagtatcggcaggtcatccacgaaacgatcatctcgatgcacagtgtgctgatccggcaggtgcaggacagcctgaagcagtacattgtgcccgccatactgcatcacgacgagacggcgcggggcaagagccggcgcacgatgtcgctggacatttcgcccgagcagggccgatcggagccggagctgttggtgcagcagctcggctgcgtgtacaaccatctgagcagcttcgggctggagggatgctacatcgagcagatcttcaagcagctgatgcactacatctgcgccgtgtcggtgaacaatctgatgctgcgcggcgacctgtgcatgtggaagacgggcatgaagctgcggtacaatatgggctgcctggacgactgggtgcgcaagatgaagatgggcccggacgtgatgaaaccgttcctgccgctcaaccagatctcgtcgatactgcaggcccgcaagacggaggaggacgtgcatacgctgctggagctcagtacggccctgtcgaccgcgcaggtgttgaagatcatcaaatcgtacaagacggatgattgcgagaaccagatccggccggccttcattgagaagctcacgcagcagcttaacctgcgctccgagcagcgcgaatccgacacgtacatgatggacgaggagctcgtcagcccgctggtcgtgctgttcaagtacagcgaaatcaacctggaggagattgacttgccgccggagctgaatctggagggtttggttaccaagatctagacttaattgcgcaaaagcgactacttactgttagaaaaaaggggagctcctttgctctaatggaactcatgttttgctacgcttaagttaaggttgttaggaagtgtgtgtgcgtttgttgtttttcgaacgacttttcctttggcttgtttttttttcacctcaacaacccggtgaatagtggctgcgtgcaaaacaagacaccactaccatacctgaagaaaaagtgcaattggatattacttccgtacgcaaacgaaatccaatcaatcattcccattgccggacgacttgtttttcttactagcatcgaatcacgagcgattgttaagcgcgtaagttgttttcgttaagtttataaaacgtcgaactttaaggggggcgcgcgtttgtggtgttgtgtgggtggggagaaaatgggaacgtaaactgactgaactcgattggactttactgtgaaacgtgtgtgcctactctaactccgtaaggccgtttggcccccgtttgggaaag

SEQ ID NO: 139 - DNA, 1661 bp, Anopheles gambiae
ccatcgtgtgccgtcggaagctgtcttccatgtaaaaattctcttcccgtgtgtggttttgccgtcgtcccagcagcaatctcccgtttccctgcaagtagcagcaatcggacaaagattgccggtagcacacgttgtgatcgctcagcagcgtacataggaaattagagacagcgcccaaacatgacgaccggtgccaagacggaatccgcgtcggagtgcgaggtgcccgactttgtcgatgcgcccggctacctggacccgttctcgcgccgctacatgatgaaacagttcatccagtcgctgccggaagcggcccagcagcgggtgaacgcgctgaagcatctgcaggtcgagtacaccaagctggaggcgaagttcttcgaagaggtgtaccagctggagtgtaaatatcagcagctctaccagccgatcgtcgaccggcgaaaggagatcgtgtccggcaaggccgacccgacgccggaggaggcggcctgggtggatccaccgcgcaagaaggaggacggcgaggacgaggaggagcaggaggaggaggacgacgagattaacgagaagctgaagaagatggcgctcaactaccacaaggagctgccggcgaacgggcagggcatcccgaacttctggctgatggtgttcaagaacacggaagcgctggccgagctggtgcacccgcacgacgagccggtgctggagtacctgcgcaacctgaacatcgtgtacgagaaggagccgatgtcgtacgtgatcgagttccacttcgacccgaacccgtacttcaaggacacggtgctgacgaagaagtacttcctgcgctgcaaaatcgacagtgacgagccgttcagcttcgaggggccggaaattttcaagtgcaccggctgcccgatcaactggaacgcgggcaagaacgtgacggtgaaaacgatcaagaagcagcagaagcacaaacagcgcaacgccacgcgcatggtgatgaagacgcagccgacggaatcgttctttaacttcttctcgccgccccgcgtccaggaggacgacacgatagacccggaaacgcagttcctgatcgggcgcgacttcgaggtcggacacttcctgcgcgcccgcatcatcccgaaggccgtcctgtactacaccggcgaggtggtggacgatgacgacgacgaggatgatgaggaggaggaggaggaagaggaggacgacgatgaggatatggaggatggggatgatgaggaggacgaggaggacgacgatgacgatgaggaggaggaaagtgcgccgaagccaccggcggcggcgagcaatcgggcgaagaaggcgaagggtggccgtggagccggtggcggcggcggcggcaaaaagggcgagcagcctccggaatgtaatcagcagtgaggcggagaggtgataagaagagagagggccggatgggtgtagtgtgtgtgtgtgtgtgtgtggtcaattcatggatagcaagaacaacctacaccaattttagccgctcgagccgtcgtcatcatcgtcctatttgaaacgtgctgctcctccaccataaacacaattttgtttgtttctgtgtgtcgtgttctttatgagcgttgacgttctagttgcacaccccgccaacacctgggtgcactcag

SEQ ID NO: 140 - DNA, 1094 bp, Anopheles gambiae
ttacatcctgccgtgccgtacgcagcgatacgcagcgagctgcgaaaaccgaattttccctgttttgtgttgttttccgcgcttttactttcttcacacaatgagcagtggtgccgacgttccaagcgatgctccagcccactgccccggcacacagagcgacgatgcgggcaaagcgtccgcgtgtgccggctgccccaatcagcagctgtgtgcgaccggtccgaaagggcccgatccggcaatcgcactggtccggcagaagctggccgacgtgcgcaacaagctgctggtgctgtccggcaagggtggcgtgggtaagagcacagtgacggcgctcctctcccgtgccatggcccaccgcaacccggacgagaactttggcgtgctcgatatcgacatctgcggtccgtcgcagccacgcgtgctcggtgtgctcggtgagcaggtgcaccagagcggttcgggctggtcgccggtgtacatcgaggacaatctcagcctgatgtcgatcggcttcctgctcggcagcccggacgatgcaatcatctggcgggggccgaagaagaacggcatgattcgccagttcctgaccgaggtcgactggggacagctggactatctggtgctggatacgccgcccggcacgtccgacgagcatctgtccgcgacgaccttcctcaaggggacggacggttcgtggggcgcagtgctggtgacgacgccgcaggaggtcgcgctgctcgacgtgcgcaaggagatatcgttctgcaagaagcttgccatcccggtggtgggcgtgatcgagaacatgagcgcgttcgtgtgccccaagtgcacgaccgagacgcgcatcttcccggcccggactgatggcggcggcgccgaacagatgtgcatcgagatggaggtaccgtacctgggccagctgccgctcgatccgcgcctcacgaagtgctgcgatgaggggaaagatttcatcaccgagttcccgaccagcccggcggtggtggcgctggaggagatcgtcacgaaagtgagacagttttttggcgacggaaagggcgaacggcaataaaactgcattccggttg

SEQ ID NO: 141 - DNA, 4070 bp, Anopheles gambiae
atggggggcgtacagtcggccaacgatggccgggaaactcaaacaaccgacagggagtcttcgcacatgtccaatcacacgcccccaagcgtgcccgttccggacagcgtggccgcactgaaaacagatgacgaattacacgatgccacaatcccgccgcaagaacaagatgaccctgagccggtcggtgacgatgcaccacgctcagcgcacgatagtgatgctgcggccgaaagtgacgatagtatgacggaaaaatgtcaagcacgcaagatgaccgtcgagttggctaatttccgacgtgacctacagcagaagcgacagctgcaccagtccaagctggtggcggtaaaggacgagctggagcatctgcgcaacgcgctggcagaggagaagcgacgcaaccgggcactaatcaagtacgtccagcagcaagagctgcagctgacaaagcaagcgaacgacggagagggcgctgaagaaaccccagcgtgtggtgccgtgagacgcgaagcgctacagatcgtagcgagcggtgagaacgcaccactggaaccggccgaacgagtgaacgcggaagctgcggaggatgaacgacacgatcagagttcatcggccggcggacaaagcgtcgagcgggcggacgacgacgagcggttagcgttgaagcgagagctggctgagtcacagcacgcgctacagtgcaccaccggtgagctgctcgagctgcgccacgagctggctcagttgagaacgcagcttcgcgcgcaacaggacgaagccgaggcggagagctcgcgacagtgcggcgcagcacggacactgaaagcggaactggccgagacgcagttccggctgcagatatcccaggcggaggcactgtcgctacagaccgatgtcgaccagctgcgcaatcaggtgaaatcgctcaaggacgtgatcaaggcgggaaaggagattatcgctattcgggaggatcaagttgagcagctgaaaggaaaactacgccagatagaggacacactgcaggagcgcgagctgcaaattatgtccgacgatttgcgtcgggagtatgatcgacagctgacaaacattcgcaacctaagagatctgtacgaggagcgcgaacgtgtctcgagaatggagcgcgacaatttggtccgccagttggacctgaagaagaacgaactagcgaccgagcaggaaaaaaataaaaacctggaagcgttggtggaaagtttgcagacggatctgacccggctacggacggagctggagcagacgcaggataagttggcccaatcgcaggccgaatcgaagcagctgcagctcgagatgggagttgtaaatcagttcatttcaaagttcctgctcggcatgagccgcaaacctaccgcaagcgacatcaacatcgacaagctggcagccgtgctggaagaaaaccgagatctgttaatcgagatgactaaggacgaggcggaaaccatcgatacgggagcgttcctgccgcgtgccctttacgacctaatcacggaagtggacgaagcgaacgagctgccgcccggtaacgatggaaaggaagaggatggggccgaggccagcggcgaggacgagttcactgatgtgcagaaggcatcgccggaacagattgctgacaagttgccaaaagtctggcgggtgctgattgagctggtgaaccatcaggaacgagcccagccggtcccgtttgtggaaggtggcgagagcgaggaatgtctcaagtcggtacagacgcgcaacggaccgaaaacggtcgttagtgttagcaagacgtacatcaaactgaaggatttaatattggagaagaaatcgctcaagaaggaaactaaccgactgcggacgttaaattcgcatctcgaacgaaggctcgattcgcaggagaagcgtctgagtgctgtgagtttggagctgacaaaaacatggcatctggtgggaaaaatgcaacgccagcatcgtcagctacacactcaggagcaaattctacgctatcatctgcaacaaaagcgccgactgctcagcgaactcaaggaagagctcgagtactgtcgtttgaagtggtcggctgcgcgtgagaaaaacatcgaatccgagggccaatggaagtcccttaaagccgactttgccgcccgtcgaaagcaggactcgctcaacaactcaggcgaaagtggctacagcgacgagcagccgtccgacgaggaggatacgcacgtgaatcggaagtcaagtttggctaatcaacagtcacccggcttcagtggaggagcggcaacgggtttggagtcggacaaatggagccagatggtcggccgattggataagtgttttgttgggagctctctgtccaatatctaccatctcgccgtggcaagcgtgttgcgaaaggtgcacagcgagtcggacatgaaatcgctcgagaatgtcgaacgggcgaaccaattctgcaatgaaaagatcgaagatttacccatctttccgttcgaggaagacgagccgggccgggaggagccggaagagattcctgcggtggtgctgcgaaagaagcgtcggtcggcctccaaaaagggcaagaaaaggcacaatgatgcgggtcagccggaatcggcacaggatatgtttcttcgtttgatgaaccttgccgcgggtggccaggacgaggtggatgaggacgaggaggacgacgatgccgacgagcaggactttgagcgtaccggcacagggaatgacgatgccgagggcgagtacagcgagaacgaaagcgccagtgagctgagtgaggaggagctggaatgtttggagatggcagtaatggacgaacgtgccgaatcctcggttacgcaggaacgcctccaaggcccggatgcctcgtcacactctgacgcggatcgggagctgtcgagtgaggaactattccaacggaaacgagaagcacgtttgcaaagaatggccgagctcaattccaggttggaccgctactcgtcaccaacacctacggcgtccccttcggaggctccagtccaaacggagagtggggaaacgggcgagacctcccaatccaagacggacgaacaggtagtgctgagtgaagacgaacagaagtatctgcagcgacgggcggaacgattggagcggctggaacgggaagcgaaggagttccgcagcaggctttcgaaaacggtccaccggggtaccgaaatatctgcccagatcgatgagatccacaatggcttcatggcccgacaatcggactcatctcccgtgccgggatgctcgggcgaggcgcaatcgagcagggtagacctgtcctgcctcaccgaaaaggagcgtgagtacacatcggcccgggccgagcgacttgaacggcttgaaaacgaaagtcagaagctactgaagcaaatgaatcaaacaatgcgtcggggcagcagtcttacgacgaagctggacatgttgcatactcggtacggttccccggcggctaatgaaccggaagccaatgtcgaaaccagtgccaggcccgaacagcaaacggcaaatggcgatgaacttgggccggaggaaactcccaagccagaacctgcagtggagatggaagagaccgttccgcaggagcaggaggaacaagattatgctgtcggtggaccttacgtgcccatgggaccaatagagctggtgctcgtgtcggacgaggaagtaatggacgaggtcagcaacctgctggaaggggaaacgcaacacagtttggaagactccaacgaaagccctgagtcccaatcttagaaagggactgcaaacgatcccaaagcaacctacctcgtacgaaaagacaaccacagcagattgccaactactgctgatagtttgtagaaagagagaacttgtgggtgatttcttttgctgacgaagaggcaaatagaacggtctttaattgaggtaacggaggcgtcgtaatcgaaaacagggtgaaactactgaagttatatcaaatatgtttcataagcaaagctactctaagtgtattctttccaatttaataa

SEQ ID NO: 142 - DNA, 1103 bp, Anopheles gambiae
cagtcggcatctgtccgagaaaatgagcgctattatattcgatgagatatcgcggtgaagtcatttcgaaagatttcctgtgaagcaacttgaagtgttgttacaattttgcgtgaaaaattttcatcgtatttgcaaccattataccatcggagctattaccacttacagtttagtgctgaaatctgttgtaaaaaataaaagaaagacacaaccggcaaacaaaataactttcaaacgcaacaaacgcttcgaaccaccgtgatcgtgtgtgtgtgtgtgtttttgtttaatttgctgtgtaaagtttgaacgttttcaacatgaaagtgccaacttctgcatttgttgccgccgctactgaggttgccgatacatctgaaacggcacattctggccgtacgatggcgagaactatgacaattgagccaagtcttagtagtagtaatcgtaccagtaaacgtacgatttcctcctcctcctcgtcgtcggcggcctccgactcttactgtgtttcgttggctgtaggaccgctgtggtggcctgatgtcccaacaatcaggaccgatcacgatagggcctctcccttgaaggaatacaatcgcaaggattctttcgattcgacaacgaccaccgcttcctctgagtactacgatctggatttccccgaatcaaccgtcgactatttgaaccatcaggaggcagctgtaattcaagaagtgctgagtcaatccgccccaacgccgattactctgaagctcttcgtaacaccccaaaagtgcagcagctgggaaacggtgtttaacccaatcgaaaacattctgtacgtgtcgctgccgtctgcaatgtcgcacgaggcgtcgaaacactcgttcatttcgctgctcgaattcgccgaagagaagctggaatgcgacgccgtcgtactgtgcatccgcaaggaccgcctcgaccgcccgaacctggtacgaacgttctcttttgttggttttcagccgctcagcccgaagtcgccgctagctccaccacatatcgacgagcagcagaagaatgagtatctcttcatggtctacagcattgaggagtagaaaacacggtcggaa

SEQ ID NO: 143 - DNA, 3438 bp, Anopheles gambiae
gccaaggtgaagaccagttcagtgatcaataaataattgttctgttttatttgaaatattcatttcgccatttgtgctattgttggtatcagaaacattcatttaaaaaatctcaattacatcgaatctgttcgttcgcagtttgtcgtaagcagcctattagcaagacactagcaaacagggaatagagagaagcaacgtgtgtttgtgtgtgtgtgttgctttgacttgggcatagatggggagggaatagataccacaaattaggcaaaagaagtaagaaaataagtagcgactctttctaacagcaacaacgggtcgtgtgtatttgtgccagctttaaagccatcgcaatactgggagttctattggttgctgtgcacaccagttgaggtattcgcagttctctcacattttgtggttgtgtgcgcttccttcttcgttctcgctcacactttctttacggcattgagtgatacaggcgcgatctagatggcaccactgtttgcgttggacaaccggtgcgaaagacgcgagaggctcatccccactcagatctaccaaaacaactacggacatgcgatgcactactaccaacccatgatcgactatctcgatacgaagagtgcgagtgccgagcagtcccctctacccgatccgcgctgcccgtacctgccctacaccgaggagcgcggtctaaaccgctatcacacagggtacttccacttccgaccgtactccgaccgggaggttgtccgactgtcggaggcagcagttgacacggcggaacgctacctacccgattaccgattcgatataaagcgctcagtactcagtgtgaccgcgactgccgacgcagctaggctcaagaagcacgtacccgcggacagtgtgatcgatcgttacaatcggaaagtagccgtacggaacgcacagcacgcagccgacgacaaacgtgacaggatggcactgactaagcgcactcatttttacggcaaccttaaggactcggactcggatctctcgccggagctaaagaaagcgatcaagggaaaatcggccgatcagatcaagaacatcttgctgaacgagtcgcgccggactcgcgagtcggaggaacgttccctgaaccaaatcagcagccggttcagctcgtctgtgtcacgccaggcggtgggtagccgtgccaacagcgaggtacgctacattgtcaagcgatcgactagcaccgtcgacgttagccaggctgccgaggaagcctccactcagtacaaggctgtccacacctccgtcgataatgtgcgccgggagattaagaactttgccgtcaagacacaggaattcctgcacgacaccagcaagcagacgagcatcgaaatcgagcagctgaatgcccgcgttgtcgaggctgagaccaagcttaagagcgaggtccagcgcatcaagaagaagctgcagatccagatcaccgagctggagatgtcgctggatgtggccaaccacaccaacatcgagctgcagaagactatcaagaagcagtcgctgcagttgaccgagatgcaggctcactacgaggagatccagcgccagctgcagtccactgtcgaccagtacggcattgctcagcgtcgcatccaatcgctctccggcgagctggaggagatccgcatcaactacgattcttcgctgcgtgctaagcgtcaggtggaggtgtctctcgaggaggccaccactcgtattaacgagctgagcgttgtcaacgccaactacgcttcgctcaaggctaagcttgagaccgaactgcaaaccttggccgttgactacgaggaagtcacccgtgagctgcgtgtcagcgatgagcgctaccagaagattcaggttgagcttaagcacaccgtcgagctgctgcacgaggaacaggaaagaatcgtcaagattgaagccatcaagaagtcgctggaagttgaggttaagcaactgtccgtccgtctggaggaagtcgaggtcaatgccgtggctggtagcagacgcatcatcaacaagcttgaggctcgcctgcgcgacatcgaagttgaactggacgaggaaagacgaaagcacgccgaaacgatcaagattctccgcaaaaaggaacgctctgtcaaggaagtgtacattcagatcgaggaggatcagaagaacattcagattctgcaggacgccctggagaaggccaaccagaagatcgctgcctacaagcgtcagctaaccgaacaggaacaatcctcacagcagtgtgtcaccaaggttcgccgtttccagcgagagctcgaagctgccgaagaccgtgccgatgtggctgagagcaatctgagtctggtccgtgccaagcaccgcacgttcgtcaccacctcgaccgtgcccggatcgcaggtctacctggttcaggaaactacccgaaccatcaacgaaacttcatcttaaatttagcaatgtcccttgccgccagagtgcccttacagttggccgaagcgtcgttaatcctggaagaatatgcgacgactgaaaatcggaacaagcgatctagcaacctccagccgggccgatcatgtgggttaccactctggacaccgcacgcagccaattggttcttttcattattttatccagtttcgttcaaatacggtcatgtgtacgtgttgtgttttgcagaaattctatgcccttccttggtccttagctcttctccttttttttcttgcccttccttacgttcactgttttatatatccctttttgttgtgtatagttatgtttaacattagcgtcttcctatttttattttattacgaaacaacgttagaaggataaaacacagcatcagctggaaagttattcgaacatacacaaatcgacaaaccagacaagagcgctcactgcgtacacagataacatctgagaagctgtatatcaacaaaagctctttacattagatactttaaatcttaacgaaattgtgtttgtttgtgtcatatgaactcgtttactatgtgctgttcgtcgttgctgctctgaagaaatgtggatactctaccctctcgatcatgggtcaacgcgatctaccgacctgagccaactttaaaaagatcaactatgatgaggctgtaaaaacaactgaaaagccaaaccagaacagcacacaagtcgcttgtaaaggaaaaaataaagtttattgataaagattattttaccaaaataacaatgctactatggagtgttattgctagtagacgatttaaaaaaacggtattcaaaaggcataacgcatgcaatgttatgaacgagtggatctatgatttttttacgcatgtactgtatgataaagatttattattaataaaacaaatcatctaaattaatatttatcaattgaactgcatatcgcatattgccatctta

SEQ ID NO: 144 - DNA, 1091 bp, Anopheles gambiae
actgctttgaccattcgtcgctgaaaggaacgctgcgttgaaaggaaagcgcaaaaaacaatccctgaaaagaatcatccagccgcaacgtcccacaaacttgccgaaaacgcaacttgcagcagaatctctccatctaggtcaagaacagcgaatagcgattaaaaaatacaccatgggccgcaccaaggaaccgaaaaacacgaacggaaacagcgggaacgatagtgacaccgaggaagagtacgtggtggagaagatcgtggaccggcgggagcgcaagggcaaggtagaatatctgctcaaatggaaggggtacgactcgggcagcaattcctgggaaccgcgcgaaaacctcgactgccccgagctgatcaaagcgttcgagcagtcgcgcacggatgcggcgaaaaaggatggtgcggccgccggcaagaagcggacgacaacaaagaagaagcgaacgggcggcgaatcggagaacgacaacgacggctcggacgatgagggacgcgacgacaacgcgtctaccaagtcgaacaaatccaaaagcaacgatgacggcggcgatcccaagcaggcggatggggaagcggtcgaggagctgaatggcttcgagaagggctacgtgccggagaagattctcggcgccaccgagggagacaatgagctgctcttcctgatccagtggaaagacaaggacaaggcgcagctggtcaaatcgaaggaggcgcgcaagcactgtccccagcttgtgatagacttctacgaggagcgcctcatctggcagacggtcgatcagtcgcaggtagattaagtgcgaaagagcagcggcgcgggagagggagcagtagacgacgggcccagggaacggatgcgggagcgaatcccgtgtgcgacgctagacggtttacttttaatgacgtttgagtttagaattagaatgatgatttcggttatctttccgcaaatttttgtgccccccattattactatttttctctatctctctctctttcactagttgcatgtcgactccccccactactacccccctatcccccctcatctcctttactcgacaatatctg

SEQ ID NO: 145 - DNA, 1151 bp, Anopheles gambiae
attcacaatagaaagaaaagcaaagaaacaacacacggtccgttttcggcaataaatacgggttccgggtggaaaaaactggtcacaaaggttccgctacaatacaaaacggtatccactcggtgtgcgcgatggcagacggtaacagttccgatgaggatttctccgacgattgggcgctgtactcgcgccggccggagtggtccgacattacaccacttccccaggacgacggggagaatccggtcgtgatgatccagtacagtgagcgctttaacgatgtgtttggctatctgcgtgcgatcatatcgaggcaggaaaagtcccagcgcgccctcgagctgacgaaggacgcggccaagctgaatgccgccaactacaccgtgtggcagtaccggcgggacattctgaaagcgctcaacgccgacctgtacgaggagctgtcctacatcgggcgggtcattgcggacaatccgaaaaactaccaggtgtggcatcatcggcgcgtcatcgtcgaatggttggacgacccatcgagcgagctggcactgacggagagcattctcgacatggatgcgaagaactatcacgcctggcagcaccggcagtgggtcataaagaactacaacctatttgacgatgagctgcattacgtggaccggttaatatcggaggacatgcgcaacaattccgcttggaacgagcggttcttcgtgctgaagcacggcggcttcacgccggaggtgctcgagcgcgaggtcaactacgtcattacgcgcgtgggcctgatcaaaaacaatgaaagcccgtggaactttttgcgcggtctgctgcagcagggcaccggcaagctggcccagttcccggtggtgatcgagttctgcgaggcactgtacaacgacggcatccggtcgccgtacctgctggcctttctggtggacctgtacgccgagcaatacttcgatgtgatcgagtcgggcggcaatgaagcggtggccgaggagtaccaccagaaggtgcaggatctgtgcgagtcgatggcgaaccagcacgacaagatacgctgcaagtactggcgctacattgcggaaaactttcggcggaaagcgtccgagcgggtggcggccggcggcggacgaaatggcgcgtga

SEQ ID NO: 146 - DNA, 1922 bp, Anopheles gambiae
gttcggcttgtcagccacgtttattcccaaagcattgcggattgcgtacggcgttgcggcattgcggctgaaaatcgtcctgaaatttcatcatccgcccaatttggcatagcgcacaaaccactttcaaattgttacctaggctgccgtaaaaatggtgctcgatttggatctgttccgcagcgacaagggtcacgatccggagaagatccgggagaaccagacgaagcgcttcaaggatgtggcactggtcgagacggtcatcgagcaggacaaggagtggcgccggtgccgcttcaacatggacaactacaacaagctgaagaatctgtgcagcaaggagatcggcgagaagatgaagaaaaaggaaccgcagggcgatgagagcgagccgctaccgcagtcggtccaggaccagttgcgcgagatgcagctgacctcgctgaaggagctgaccgtcaaccagatcaagaaggtgcgcacactgatcgacgcagcggtggtggaaaatgagcagcaaatgaaggaggtggaggcgaagaggaacgcggctctgcgcgaggtcggcaaccatctgcacgagagcgtcccggtcagtaacgacgaggacgagaaccgggtggagcgcacgttcgggaactgtgagacgcgtctgaagtactcgcacgtcgatctgatcgtgatgatcgacggtatgaatggggacaagggtgcggtggtgtcgggcggtcggggctacttcctgaccgggccggccgtattcctcgagcaggcactgatccagcacgcgctgcacagtctgtacgcgaaagactacacgccactgtacacgccgttcttcatgcgcaaggaggtgatgcaggaggtggcgcagctgtcccagttcgacgaggagctgtacaaggtggtcggcaagggcagcgagcgggccgaggacggtacggcgacggacgagaagtatctgattgcgacctcggagcaaccgattgccgcgtaccatcgggatgagtggatcccggaagcgtcgctgccgatcaagtacgccgggctgtccacctgcttccggcaggaggtcgggtcgcacggccgcgacacccgcggcatcttccgggtgcaccaattcgagaaggtggaacagttcgtgctgacctcgccgcacgacaacaagtcgtgggagatgatggacgaaatgatcggcaacgcggaggcgttctgccagtcgctgggcattccgtaccgcgtggtgaacattgtgtccggtgcgctgaatcatgccgcctcgaaaaagctcgacctggaggcatggtttgccgggtcgggtgcgttcagggagttggtatcgtgcagcaactgcttggactatcaggcccgccggctgctcgtgcgttacggccaaacgaagaagatgaatgcggctgtggactatgtgcacatgctgaatgcgaccatgtgcgctacgacgcgtgtgatttgcgccatcctcgaaacgcatcaaacggaaacgggcgtaaaggtccccgaggtgcttcagaagtacatgccggagaagtatcgcgaagagattccgttcgtgaagccagccccgatcgacgtggagcaggccgcggccgaggcaaagaagggcggcaaaaagggcggtgaaaagaagagcggaacggctgcataaaagacatacactggcataggttaatcgaaatcgatcttcaacccaatagcgacgtcattaagcacatgtcgatcgggcacacgtactagaatcgcagccgtcgtcgtctaatttatttcaaatttactcagttctaccatgaatccggcgctgaaagcatttagacagtgcatttgcttgaagctgaagctctatcggtaataaagtgttgttccccatccgcttgtgcagctgctgctgaagtggatcactaagc

SEQ ID NO: 147 - DNA, 966 bp, Anopheles gambiae
atgctgacggtgacggctggtacggctacacatccgtcccacacggaaacagcggagcaaacggcagagaccaccgccgccaccaccaccaccaccacaaccaccaccaccatgtcgaacaagctgaacaacccgaagcgccgcgaggtgacgggctcgtcgtcatcgaacagctccatctcgtcggtcggtgccggggacagtggcatctcggccgacctggcctcactgttcgagtgtccggtgtgctttgactatgtgctgcccccgatactgcagtgccagagcggccatctcgtctgcaccagctgccgctcgaaactgacctgctgcccgacctgtcgcggctcgctcggcaacatccgcaacctggcgatggagaaggtggcctcgaacgtgaagttcccctgcaaacactccaaccacggctgcaccgtgtcgctcgtctacacagaaaaggcggagcacgaggaggcgtgcgagttccggccgtacctgtgcccgtgcccgggcgcgtcctgtaagtggcagggttcgctcgactacgtgatgccccacctgatgatgtcgcacaagagcatcaccacgctgcagggcgaggatatcgtgtttctggccaccgacatcaacctgcccggtgcggtcgactgggtgatgatgcagtcctgcttcgggcaccacttcatgctggtgctggagaagcaggaaaagtacgacggacatcagcagttttacgcgatcgtgcagctgatcggatcgcggaaggaggcagaaaactttgcctaccgattagagctgaacggcaacaggcgtcggctcacgtgggaagcgatgccgcgctcgatccatgaaggtgtggcgagcgcgatccttaactctgactgtttggtgttcgacacgtcgatcgcgcagctctttgccgacaatggtaatctcggcatcaatgttactatttccgtcgtttaa

SEQ ID NO: 148 - DNA, 3550 bp, Anopheles gambiae
catcgtcatcgctgcttcgcgttcgggtcgttgtcttcgtcgctccctgctctgtgcgcttgcggttatagctcggtaaccctccgtagcctgtagttaagagactgaaccagattttcgtcacctaccaaaaacccaatagaaacgcatcaacaaaggaagtgtgcacgtcgtagcaagctgcgaccaggataattgtgattgtgctctcgggaaatccggcatccagtgaggcgacaggcgaagtgtgaaaagcgtgcggcgtgtgtgtgtgcccgttttcccacccatagcacggattacatttgccaaaagcgaatcggttttctgcagagaggaagcttgagtcgaatcgaagttttgtggtaacatcccccctccgttcggaagcaatccgaagaaaccgttcttcaaatggccgacagcaagaacgatgatttggcaactgccatcctgaagcgcaaggatcgcccgaaccgcttgatcgtcgacgaagccgctaacgatgacaactcggttatttcgttgtcacaggcaaaaatggacgagctggagctgttccgcggcgacacggtactgttgaagggcaagcgccggaaagagacggtctgcatcgtcctgtcggacgagaactgcccggacgagaagatccgcatgaaccgggtggtgcgcaacaatctgcgcgtctggctcggcgacgtggtgatgatccagtcctgcccggacgtcaagtacggcaagcgcgtccacatcctgccgatcgacgacacggtcgagggtctgtcgggcaacctgttcgacgtgtacctgaagccgtacttcctggaggcataccggcccatccacaaggacgacacgttcatcgtgcgcggcggcatgcgggcggtcgagtttaaggtggtcgcggccgatccggagccgtactgcatcgtcgcaccggagacggtgatacactgcgagggcaatccgatcaagcgcgaggaggaggaggaaacgctgaacgcggtcgggtacgacgacatcggcggatgccgcaagcagctggcgcagatcaaggagatggtcgagctgccgctgcgccatccgtcgctgttcaaggcgatcggtgtgaagccgccgcgcggcattctcatgtacggtccgcccggtacgggcaaaacgttgatcgcgcgtgcggtcgcgaacgaaaccggtgcgttcttcttcctgatcaatgggccggaaattatgtccaagctggcgggcgagtcggagtccaatctgcgcaaagcgttcgaggaggcggagaagaactcgccggcgatcatcttcatcgacgagatcgacgcgattgcgccgaagcgcgagaagacgcacggtgaggtggagcggcgcatcgtgtcccagctgctcacgctgatggacggcatgaagaagagctcgcacgtgatcgtgatggcggccacgaatcggccgaactcgatcgacccggccctgcgtcggttcggacgcttcgatcgcgaaatcgacatcggcattccggatgcgaccggccggctggaggtgctgcgcatccacaccaaaaacatgaagctggcggacgacgtcgacctggagcagattgcggccgaatcgcacggtcacgtcggggccgatctggcgtcgctctgctcggaggcggcgctgcagcagatccgcgagaagatggacctgatcgacctggaggacgaccagatcgacgcggaggtgctgaactcgctggccgtctcgatggagaacttccgctacgcgatgaccaagtcgagcccgtcagcgctgcgcgaaaccgtggtcgaagtgccgaacacgacctggaccgacatcggcgggctggagaacgtgaagcgcgagctgcaggagctggtccagtatccggtcgagcatccggacaagttcctcaagttcggcatgcagccgtcgcgcggcgtgctgttctatgggccgcccggttgcggtaagacgctgctcgccaaggccatcgccaacgagtgccaggcgaacttcatctcggtcaagggcccggagctgctgaccatgtggttcggcgagtcggaggcgaacgtgcgcgacatcttcgacaaggcccgttccgcgtcgccgtgcgtgctgttcttcgacgagctggacagcatcgccaagtcgcgcggtggcaacgtgggcgatgcgggcggtgcggccgaccgcgtgatcaaccagatcctgaccgagatggacggcatgggggcgaagaagaacgtgttcatcatcggggcgaccaaccggccggacatcatcgatcccgccatcctgcgcccgggccgtctggaccagctgatctacattccgctgccggacgagaagtcgcgcgaggcgattctgcgcgccaacctgcgcaagagcccggtcgcggaggacgtggacctgaactacgttgccaaggtgacgcagggcttctccggtgccgatctgacggaaatctgccagcgggcctgtaagctggccattcgtcaggcgatcgaggcggaaattcgccgcgagcgggaccgtgccgccagccagaacgcggcaatggatatggatgaggaagatccggtgccggaaattacgcgcgaccatttcgaggaagcgatgaagtttgcccgccgttcggtgtccgacaacgacatccgcaagtacgaaatgtttgcccaaacgctgcagcaatctcgtggattcggtactaacttccgattcccctcgggacagggcgcctccagctcgcagggccagggttcgtcgcaaccgacgagcaataatcccggcgacaacggtgacgacgatctctacagttagattgccccgcgcccggccagtgtagatccatataatatccccctctccccttaacctagactataaacagtcgtcgggcctgccgccacagctgctagctgcggggtgtgcagtctttcaactaaagaatcattgccgtgcgtgcgtttgtgtgcgtgttgagggaggggaacatatacaggttttgccttcacaacaccaccaccatccctttcccgtttatatcattctttctttccgctcgtcatcttagaaacagaaacagaaaaacaaagctatgtgtgcagatcgaggattagtagcttctagggaaagagcaaacatatgactggtttatagtagaatgcgatctagtagtagtaagaatcgacgattactgtagcaaaaggccccctctcgcttggtccgtgacactcaccgtctcacttatggtcgatgtcgagaggagaggcagctgtagtgtcgcgaaggaaaagatgagggaaaggttggtgaataaacggggaggattgctaaacaatagagggaaaacgcgcataatatgaatgaaggtagaggcaggcggacgtgcaagacttgcatctgcaattcgagctcaatggagaagggatttataggcggcggcgtaaggtggtgttgagactgcagcagaaaacagcagcttgtggtaggcgtcttattcgtaatgatgatttttgaagcaaataagaaatgcgataca

SEQ ID NO: 149 - DNA, 1585 bp, Anopheles gambiae
atggaaacaatctttgaaatacagcggcgcttgcacgaagagtgtgaccggctggtgatggccatgtcggaggagttgatgataccaaagaagacgactaaagagaaagtgctagcggaccaccggataaagatctatctcgagcgataccagacgtgctcgaagtcgctgctggagctgtaccaggacaaggacggcgagcggaagcaggaaatcaccaacatgagcgtgaacgagttcaaagagttttacagccagttcaatgggctgatcgagttccattccaaccacggcaacaatgtggccgtaccggcatcgatcgagttcgacaagctgaaggagcagctgaacgatccggcctacctggccgaggtggtgaagtttagcgacgtggaaaactatggccagtacttggatctgcacgaatgctacgacaacttcgtcaatctgaagggcatcgacaagatcgactacattacgtatctgtcggagtttaacaagttcgccgacataccgcgcaagcagaagaacctcaagtacaagggctacctgcagctgctgcacgactatctgcactcgttcatcacccgcagcaggccgctgttcttcgagctggagcacacggtgaagcgcaacgagctgcagttcgaagacatgtggaagaacggcatcgtgccggggtgggagaaggtgcgcgacgtcgacgacgacgcgctgatcaatttgaacgagttcggcaaatgggaggacctcacgtacctcgggctggaccggctgaaggccgccctgcaggcgctcggcatgaagtgcggcggcacgctggaggagcgcgcgcagcgcctgttcgcctcgaaggacgacaaaaaccaggagaacgagcggaagcggatgatgaacctaaacaaggagaaggatatcgcgcagctggagtacaagatcgcgaagctggcggacctggtggacgaccagatttacgagacgaagatcaacctgcagcgcaagcaggcccgctacacgctggacgagagcgacgaggacagcatggacgaggaggaatcggacgatgacgacggcatcccgtacaatccgaagaatctgccgctcgggtacgacggcaagccgatcccgtactggctgtacaagctgcaccagctgcactttacgtacgagtgcgaaatctgcggcaactacaagtacaacgggccgaaagcgttccagaaccacttttccgagtggcggcacgcgcacggcatgcgctgcctgggcatcccgaacacggcccactttgccaacattaccaagatcgaggatgcgctggtactgtgggacaaggtgaaggagcaaacattctccaagatgtgggtgccggccaacgaggaagagtttgaggattcgcgcggcaacattctcagcaagaaggtgtatcttgacctgcagaagcaaggcctgttgtaggaaagtgcattgcgaggattggagggggcgaaacggaataaaaacagcaaacgaacacacaacaggacacttatctctccgtctgctccctccgccccccggggttggcgccagagcaagagcaactcaa

SEQ ID NO: 150 - DNA, 24848 bp, Anopheles gambiae
ccagtcgagcaggagaagtgaaagtaagcagttcgcgtgtgcgcgtgtggcgcgaccgtccaaccgttcttcttcgtttcgcaaaagggggggaaaagtacacaggagaggagagaaaaacacagtcagcgactgacgcgcgatagcgaaagccattccgtgtgcgaaaaacgcgcctttttcgcccacatgctagtgccactgtgacacgaaaacacacgctacgaagaagtgaaaccaggagcaacgaaatcaaacgctgctgcaggagcagaatccttcccccataagagcagagtggaggagagtggttggtagggaagcgttagtctgagcgcaccaggaaaacaaaaaccccccgtcccggaaactttcgcccgagggtggtggtggtcccgtatccaccgcagcaacaaacaaaaaccatggccgaccatgatttcgcgcccagcttcacgcaaaagccgcagctgcgccaggaggacgacggcaaccggttgatattcgagtgtcagctggtggcgaagccgaaaccgaccatcgaatggtaccgcagcgaggagctgctgtccgagaacgcgcgcaccaagttcaagatccaatcgttcggcgagaacaagtacttcgtggtgctcgagctcgacgacgtcatcgataccgatgccggactgtacaaggtgaaggccaagaatcggatgggcgaggtttccgcatcgatcaatctgaacttcagccgtaagcaaatcgacggtgtggcaccgacgttcatcaagaagccctccatcaagcaggagaacgatggcaaacgactcattttcgagtgcgaaattaaggctgacccgaagccacagatcaggtggtcacacaacagtaaggttatcgataatacaccgaggcataagtttaaagtacaaaatgacggtacactgtaccgtgccaccctagaggtcgataatgtgacgttcgaagattcgggtaaatacaaggtgacagccaaaaacgagctcggagagtcgagtgcaacgatcagcctgaacttcgacagtgagtatagcgttccctggcggcaaaagcgccaaagccttctgattgccatggctggcaggttcagcagtgaggtcgaggaggaccaaaaccactgctacttgatccgcttcacgatcaaggacgtgaagcagctagaccggggtgtgtacagtgtgctagcaaagaataagcacggcgactcgacggctgttatcaatctgaactttgattccagctcgaaactgataaatccggagggtaaaccaccccgattcccacagaagcccaccatctcccagaagggtgacgtgctttcgatggaatgcattttggaggcaatgccggttgcggacattacctggtatcatggtcaggaccgtatcgaggatggcgaacgattcaagatcctgcggaaggccatttccatcgatacctacctgctcacactgcagatctcgctaccgaccgccaatgacggaggcatctaccgctgccatgctttcaacccgttcggggaaagtaatgcacacattacgcttaacttcaaagcgaatgaaaatgagcgcggatttgcaccgtcgtttgtggagaagccgaagatcataccgaacaagctgggcacgctgataacgatgaagtgtagatgtagatcgaaaccgaaaccgaccgtcaagtggatgcgaaagaagcaggaggtgacatcgtccagcaaggtcgcgctggaggtgaaaaccgtggacgaggacacgtacgagctgacgctcaacatcaaggatccgaacgcggacgatggcggcagctactcgtgcatcatcagcaacgagtttggcgagagcagcgcgacgctcaacctgaacatcgaggcggaacaggagacgaccaagaacgcgcccatcttcgtggagaagccgcacatcgtttcgctggacaacggcaagctggtgcgcatggagtgcaaggtgaagaccgacatcaagccggacatcacctggacgcgggagagccgcctgctgcaggaaacgtcgaagctgaagatgacgatgacgcaggagaaggacgtctatcatatcacgctcgtactgaaggatccacagacggaggactctggcacgtacaagtgcaacatcaagaatattctcggagagttaaatgccaatttaatcctcaacattgagattattccggtgataaaggaaaaaccgaaactagttacgaacattaagaagcgtaccgcttcaatcgagtgttcggtcgcgtcccgcttcaagccagagtgtgtctggatgaaggagactaccgtgatcaaggagacgcaccgacacatgatcaagatcgaggaaacgcgcgagggcgagttctcggtcaagctcaacattgtcggtttgagcgaggccgacttcggtgcctacaagctggtggccaagaacgataagggccaggcgacgtcgcaggtgatcgagatcaaggacatcgtgttcgagaaaccgcccgcgacgaaaccgatcatcgatgccaaattcaaggatgtggaagtggacgagggcggcgatctgacgcttgcggccggtttggcacaacccgaccggcacttcaaggtgtactggatgaagaacaaaacgatcctgaaggcgagcgaaacggtcatccaggagtttaccgggcgcatggctaagctagtggtcaagaacgtaaccgtagaggacgccggttcgtacaaggtctctattagcaatgacacccagagcgacgagtgcgagtgcaaggtgaaggtgattgccaaaccgaagccgaaggacgaggaaaaaccgaagaagaaaccggccaagaaggtcgaggaggaggagaagaaggaggagaaggtggagctgaagaaggtggccaagaaggtggatgaggagaaggccgaggaggagaaggtgcagctgaagaaggtcgacaagcaggacctggacaagcaggccgaggaggagaaggtgaagctgaagaaggtggagaggaaggagaccgagctgaaggtggaggagcagaaggtgcagctcaagaaggtggagcgcaaggagggcgagctgaaggtggaagagaagaaggctgagctgaagaaggtcgagcgcaaggaggccgagctgaagatcgagggcgagaaggtggagctcaagaaggtcgagcgacgagcgtcggaggctaaggtggaggagaagaaggtggagctgaagaaggtcgagcagccggagaagatcgaaatcaaggtcgaggaggcgaagaaggtcgaaacgaagaaggaggagaagatccagatcaaggtcgaggaggatcgtcggggatcgataccgaagatcaaggaggaacccgcccctgcccagaaaggcttggaagctccaagcatcgaaatcatccgcgacaagggtagccgtcgtggttccttcatggacgatcgtcgcccaagtttgctaatcaacgatgatcgacgaccatcaatcgatgtgcgtcgtccgagcattcaagatatggatgagaagatcaaccaaccgtcgacaccgttgcgagcgatcggcgaggaaggcaaggcagccatcatcgtggacttccaggagagctactcggcagtagaagatcaaaccggctacatctcggtgcaggtcgagggtaatcccgcaccgacctggaagttcttcaagggcattaccgagctggtggacggtggtcgctacaagcatcacaccgacggtgaaagcaacacgatcacgctctgcatccgcaaggtgaagccgaacgacgagggcaagtacaaggtggtcgtctcgaacgcacacggcgaggacagtgcggacgtgcagctgtacgtgtcggacgcgagcggtatggacttccgcgcgatgctgaagaagcgaaagtacgccaagtggggcaaccaggagaaggacccggactggggcgatctgaaggaggtggagaagccgaagccgcagctgaaaaaagtggagcgcaaacaagacaccttctcgaagccactggtcgatatcacctgcaaggaaggtaaagacaagaaggtagtgtttgaggccacgttcaccaaacccaattccaaggccaagtggatgttacgtaaggatgaaatcttcaatggctcgaagtacaagttcaagacggatggtgacaactacacctgtaccatcttcaacccgaaggtggaagacggtggcaagtacacgctggagattgcgggtatttcctgcttcgcctacctgaccgtggaggaggcggacccggtgtacaagttcacgaagaacctgaagaaggcggagaagggcttcctgacgcacgactgcacgctggagtgtgcggtcgacaactcgctggcaccgatcagctggtacaagggcgagacgaagctggagaacagcgacaagtacgtcattggcaaggatctgaacggcacggtgacgctgatcatcaaaaactgtacggccgaggatgcggacacgtaccggtgccagatcgagaagcagacggacaagacggaaacgaagctgaagatcctggagtacaactacaagtttacgaaggtgctcaagagtcagcagctgttcgtgaaggacacggtcacgatggcctgcgagctggaccacgtgctgggcaaggtggagtggttcaagggcgacgagaagatcgtcgaaagcgacaaggtccagatcgtgaaggatggccgcaagcacaagctggtgctgaaggatgtcgccaaaacggacagcggcgtgtatcggtgcgtcagcaatgcggacaagacggaggccgaaatctttgtcaagcgaccgaacaagttcatgaagaagctgagcgacacggttggaaacgaaaccgagaagctggtgctggatattcaggtccaagacgaggaggctgatgtggcgttcttcctgggcgagaccgagctgaagaaggatggtcgcatcgacatcatcaacaatggtgacggtacgcaccagctggtcttcaacaagctcgagctgaccgacgccggcgaaatccggtgcgagtgtggcccgctcaccagcaagtgtacgctgaagatcaacaagaaggaaacgaagcccaagttcgaggtgccgccgaagatcgaaacccctgccaaggtggagaaggtagtggaggtaccattcacaaccggtgagtcgcgccagtcgaaggtggtggcaaagttgtacaaagatggtaaaccggtaccaccggaagacgttgatatagttgtagagaacgataagcttgtgctgaagttcaagaagaccgaattcaaggattcgggcgagtacaagattgaactggcaaatgccaccggtacggaagagcataccactaatgttgtgttccaggacataccgcagccaccgcaggatctgggctgcaccggcatctaccagacgcggtgtgtcgtcaagtggaaggcgccggagaacgacggcggtgcaccgttggagaagtacgtggtcgagcggcaggacgtgttcaagcggtccggctgggacgtgattggggagtcgccgggcgatcagtgcaagtttaactgcaacgatctcgtgtccggccggcactacaagttccgcgtgaaagccatcaacaagatgggcgagtcggagtactgcgcgatggagaacgacatcattgccaaggatccgtggacggagccggacccgccgcgcgatctcaacattgccgactgggacaaggactttgtcgatctgcggtggaaggtgcccaagtcggacggcggtgcaccgatcacgagctacatggtggagtacaaaccgtacacggcggcgaactggaagcactacgccgacgtcggtgcggccgagctgaacctcaccatccgcgggctgacggtgggcgaaacgtttgagttccgcgtgaaagcggtcaatcagggcggtgcgagcaagccgagcaacagcacggaaccgctcaagatccgcgaccggtacgtgaaaccgttcattgagggtgagggtctgcagccgatcacgctgaagaagggccaaacgatacgctactacgcgcagtacggtggcgagcccgagccggaggttgtttgggagaaggatgacatactggtgatatgcgattccgagaagcgaaaaacgatcgacgttgaaagcggcgctaccacgatacaggtacggcacgcggtccgctccgattcgggcgactacaagctgcggctgaagaacagcagcggcgagtttgtgacggtcggaaaggtgttggtgctggacgtgccgacgcaaccgatcggtccgatcaaaatcgagaaggcacgcgcaaaccatgtggtgatcagttggcaaccgcccgaagataccggcggctgtccgctgaccggctatctgctggaaaagatggacgtcgagaacggtacctggctgcaggcgggtgagtgcagcggcgatcagctgacgttcgacttccagcatctgcagaagggtcgcaagtttgagttccgcgtgaaggcgtacaacaaggagggcgaatcgacgcccctggaaacgctgctggccgtcaagacggtcaacccgtacgatcctcccgaggcgccgggtaagccggctgtcgacgactacggcgtagactttgtggagctgaagtgggagaagcccgagaaggatggtggtcgtccgatcacgcactacgtcatcgagtgcaagaacaagttcctcaccgactggaccgagtgtgcgaagacggagaacgacgactgcgtgggtaaggtgcacggtctgaaggaaaaggtcgtgtaccagttccgcgtccgtgccgtcaacaagggtggcgcctcgaaggcttccgagccgagcgataaccacaccgtcaagcacaagaacctgaagccacgtattgatcgtaccaatctgaagaacattaccatcaaggccggcaagtcgatgatctggtcggtcgacgtcaagggtgaaccggaaccggagatcatctggagctggcgcgacgatattccgctgaccgagacgcaaaacatcaagattgagaacggcaactaccacacgaacttctcgatcaaggaggcgaagcgcgtggacacgggcaagtacaagatcgtggcccagaacgtgaacggcaaggacgaggagacggtcgagctggtggtgctgggcgcaccgggcagaccgcagggcaagctcgaggtgtcgaacgtcaccaagaagggcctgaagctgaagtggaagaagcccgccgacgatggtggcagcccaatcctggagtacaagatcgagaagctgaagaaccgcaacggcaagtgggtccgctgcggtacggtaacgggtgggcccgaaatcctcgaggcggacatcaccgggctggacgagggagcgacgtacaagttccgcgtgatcggcgtgaatgccgagggtgacggtgagccgctagagtcggacgaggtcgtggcgaagaacccgtacgacgagccgtggaagccgggcacgccggaaatcgtagacttcgacgacaagtccgtcaagctgaagtggacggcgccgaagtcggacggtggtgcgccgatccagaagtacgtgatccagaagaaggaccgcttcaaggattgggaggacgtgagcgaggttgatggcggcgagacgtcggcgacggtcgacggtctgaaggaaaacaccgagtgtcagttccgcatcgtggccgtcaacaaggctggccggtcgcccgaatcggacgcgacaaagtcgcacatagtgaagcatcgtgcactgaaaccgcgtatcgatcgtaccaacttgaagccgatcgtcgtccgggccggcaagatggttcactacgatgtgaacgtgaagggtgagcccgagccggagattacctggattttcaaggagaagcccatcctgggcgatgacaattacgagatcatcaacaaggattacaacaccaagtttacgctcaaggacagtctgcgcaagcacagcgcggtgtacaagatccaggcgaagaacgagcacggccaggatgaggccgaggtcgaaatcacgattctgtccagcccgagccgaccgaagggtccgctggaggtgaaggacgtcaccaagaatggctgcaagctgaagtggaagaagccggacgacgatggtggcaaaccgattaccggctacgagctgcagaagtacgaccagaaggtgggccgctgggtaccgatcggcaaggcgccggccgatgccgaagagttcgacgtgaccgggctgcaggagggccagcactacaagttccgcgtgaaggccatcaacgacgagggcgaatcggagccgctcgaaacggaggagtacatcgtggcgaagaatccgttcgacgtgccgaaggcaccgaccgatgtggtcatcgtcgactgggacaaccagtcggccacgctggagtggaagcggcccaactcggacggtggtgccgccattacgggctacttcatcgagaagaaggagaagggagagtccaagtgggagccggcggtcaccaccagctcgcccgagtgccgtgcgaaggtggttgacctgccggagaagcgtgtgtatcagttccgtgttagtgcgatcaataaggcgggtactggcgaggcgtcggatccgaccaacttccacactgtcaagcaccgttacctgcgtccgcgtatcgatcgtaccaacctgaacccggtcacgatcaaggcgggtctgtcggtgcagtacgatatcgacattgagggcgaaccggcaccgaccgtgaaatggttccacggcgagaaggagctggcgaccgatgccgactacaagatcgacaacgtggactacaacaccaagttcttcatcatgcgtggtcgtcgcaatctgaccggcaagtacacgattgtcgccaccaactcgcagggcgaggaccgtgccgaggtggagatctgcatcctgagcaaaccgggcacacccgaaggaccgctcgaggcgtccgacatccacaagcacggctgcaagctgaagtggaaggcaccgctggacgacggcggcatgccgatcgaaggctacgagatcgaaaagctggacccgctgacgggacaatggattccgtgcggtcagagcgcaacacccgaggcgaacatctccggcctgcaggagggcaagcagtacaagttccgcgtgaaggccttcaacaaggagggcgacagcgagccgctcgagatggagacggtgatcatcgcgaaggacccgtacagcgtgccgtccaagccgggccgcccgcagccgaccaactggagcaaggactttgtcgagctggagtgggccgccccgaagtccgacggtggcgcaccggtcacggagtacatcatccagaagcgcgacaaggcgtcgcgcaagtggcaggacgcggccacggtgaagggcgaccgtacgcgcggcacggtggaggacgtggaggagggccacgagtacgagttccgcgtggtggcggtgaaccgggccggccagtcggagccgagcgacatctccgactcggtcgtggcgaagatgcgcttcctggcgccgaagatcgatcgcaagaacctggacaagaagatactgcgcagcggccagctgctgaacgtggaggcggacgtcactggcgagccggccccgaaggtgacctgggagttcaagggcaagccggtggacggcaaggaggacgagcgcatcaagctggacaacgaggagtacaagacgaacctggtgatccgcaatctgaagcgctccgacgccggcatctacaagattacggcgaagaacccgtccggcacggacacggtcgacctggagctggtcgtgctggccaagccgtccaagtgtatgggcccgctgaaggtgacggacgtgacggcggagggctgcaagctggcctggctgccgccggaggatgatggcggcgagccgatccaggcgtacatcgtcgagcgcatggacgtggacagcgggcgctggattcaggtgtgcgagacgcgcttcccggaggcggacgtgaccgggctgcaggagggcaaggagtacatgctgcgcgtgaaggcggtcaacagcgagggcgagtcggagccgctcgagacggacacgagcatcaaggcgaagaacccgtacgacgcgccgagcgcaccgggcaagccgaagccgaccgactggtcgcgcaagttcgtcatgctggagtggaaggagccggaaagcgacggcaacgcgccgatccagaagtacatcatcgagaagaaggacgtgaacagcaccaagtggcagaaggcgatggaaacggacgggccggagccgaaggcgaaggtgccggatctgttcgagggcacgacctaccagttccgcgtgaaggcggtcaacaagggcggtcacagcccgtactcgccggtgtcggatccggtcacggtgaaggatcggttcgcgccgccccgcatcgaccgtaccacgctgaagaacatcacgctcaagggtggccagtcgctgcggctggactgcaagatcagtggcgagccggcaccgaccaagtactggctgctgaacaaggcgcgcgtcgacaaggatagcccggacgtgcgcatcgagtttgaggattaccgcgcgaagctgaacattagcagcgtgacgcgcgcgcacggcggcatctacgagattaaggcggaaaatgcgtccggctacgatgaggcgcagctgacggtgaccgtgctggacaagccgaccgcaccggagggtccgctgaaggtgacgaacgtgcacaaggagggatgctcgctcaagtggaacccaccgctagacgatggtggcgtaccgatcgagtactacaacgtggagaagttcgacaaggagacgcagcgctggctgccggtgggacgcacgcacgacacccacatggatgtggccaatctggagccgggccaggagtacctgttccgcgtgtccgctgtgaacgatgagggcgtttcggagccgctggcgacggacacgtacatcacggcgaagaatccgttcgacgagccgggcaagccgggcacgccggaggcgtacgattgggacaagaacttcgtggagctgcgctggacgccaccgatgacggatggtggctcaccgatcacgaagtacatcgtggagaagcgggtgcacggtacgatcaagtggatcaagtgtgccgaggtgctgggcaacaagtgtgaggcgaaggtgaccgagctgaacgagggcgaagtgtacgagttcaaggtgcgggccgtcaacgaggccggacccggtatctggagcgaccacagcaagccaatcacctgcaagccgcgcaagctgccaccgaagatcgatcgtcgcaacttgaagaacctgagcgtggccattggcgagccgttcgggttcgacgtgaagatctcgggcgagccggccccagacgtcgactggacgatcaacgatcgcatggtgacggtgacgacgacgcgcacgatcgacaacgtgccatacaacagcaagtttgccaaccagaacccggatcgacgcgattccggcaagtacgtgatcaaggcgacgaacaagttcggtaccgatcaggtggagatcaccgtcacagtgagatctaagcctgcggcaccggaaggaccgctggaggtgaaggacatgaccaaggatagctgcaagctggagtggaaaaagccgaaagatgacggcggtgtaccgatcgatcactacgtgattgagaagttcgacccggacaacggcatctggatgaatgcgggcaaaaccgatggaccgatcacggagttcccggtggaagggctggtgcctggccatcgctacaagttccgcgtgaaggctgtcaatcccgagggcgaatcggaaccgttggaaaccgccggaacggttgttgcaaaggatagcttctctgttcctgacacaccgagcgcaccaacggttgtcgattggtcggagaaccacgcggtgctgaagtggccggagccggacgacggtggcagcccgattacgggctacatcatcgagaagaaggacaagtacagcccgatctgggagaaggcgatcgagacgaactcgcccaaccctaccgccacggtcgggggcctggtggagggcaacgagtaccagttccgcgtgattgcgctcaacaaggccggcccgtcggatccgtccgactcgagccgcacgttcacggcgaagccacgctttgcgccgcccaagatcgaccggcgcacgattcgcgatctgtcgatttcggccggctcgatgctcaagttcgacgtggccatttcgggcgaaccggcaccgaagtgcgagtggcgcgtgaacaaagcgatcgtcagcggcggtgaccgtcggctggagattctgaacacggactacaactccaagttcatcctgcggccggcgaaccggggcgactcgggcgactacgaaatcacggccaccaactcgtccggccgcgatcacgtgctggtgcaggtgacggtgacggacaagccgggcccgccggagggcccgctgacggcgtccgacatcacgaaggaaacgtgcaagctgaagtggaagcgcccgaaggacgacggtggctgcgacatcgagtactaccagatcgagcgcttcgacgacgacgtgaaggcgtgggtaccgcacgcgcgcagcgtggaaaccaatgccgacattaacgggctgcaggacggcaagaagtacaagttccgggtgagcgcgatcaacgcggagggcgaatcgaagccgctcgagatggccggcgacttcattgcgaagaatccgttcgacgagccgtcggcaccgcgcgactgcaaggcgaccgactggggcaccgacttcgtcaagctggcctggcagccgccggtcagcgacggtggctccccgatcacgggctacgtggtggaggtgaaggacaagtacggcgagtgggagcgcaagatgacggcgccggccgatgctaccgcggcgaccgtgcccgacctgctcgagggccagaagtacgagttccgcgtgcgcgcggtcaacgacgcggggccgagcgatccgagcaacgcgacgccaccgatcgtgtgcaagccgcgcaaccagccgcccaagatcgaccgcaccaacctggtggaggtgcgcatcaaggcgggcaacaacgtggtgttcgacgtgaaggtgtcgggcgagccggtgccgacgacgcgctggtccatcagcaagcgcgaggtgaagccgaccgaccggtacaagctgcagaactacgactacagcaccaagctgacgatccggtcggcgacgcgcgaggaaagcggcacctaccagctggacgcggagaacgagaacggcaaggatacggccacggtgcaggtgacggtgctggacgtgccgagcccgccgggcggcccgctcaaggtggtggagattaccgccaacacggccgtgctcgagtggcgtccgccctcggatgacggcggcctgccgatcgataactacatcatcgagaagctggacgaggtcaagggcacgtgggtgtacgcgggcgactcgggcagtgcgcggtgcagggccgaggtggacgggctgatcgagggacacacgtacaagttccgcgtgcgggcggccaacaagatgggcaagtcggagccgctcagcatggccaactcggtgctggcgaagaacccgtaccgcgcgccggaccgaccggagcaggtcacgatcaaggactacgaccgggactacgtcgagctggagtggaaggcgccggagaacgacggtggctcaccgatcaccggctacgtggtggagaagctcggcaagtactcgagcgactgggagaaggcggtcgaggtgcccgagggcgacgtcacgagcgtgaaggtgccggatctgatcgagggcacggcgtaccagttccgcgtccgtgccatcaaccgggcgggtgagggcgatccgagccggccgaccgagtcgcacatcgcgcgcagcaagaaccagccgcccaagatcgaccgcaactacctgtcgaatgtgaagattcgggccgggcttacgttcgagtttgatgtgccggtgagcggcgagccagtgccggccaaggagtggtcgcacaaggacaacatgatcatcaacaccgaccgcatcaaggtggtgtacgagaactacaggacgaagctgcgcgtgatcgacgtgaagcgggcggacagcggcgtctacacgctgaccgccaagaacaagaacggcatcgacattgcgaacgtgaacgtgacgatactggacgtgccggcgccaccggagggcccgatccggcacgagaacctgtccaagacgggcgtgacgctgatgtggcgcccgccgaaggacgacggtgggtccgagattctgcactacgtggtggagaagctggacacggacgcgctgcgctgggtgccggtgggcgaaaccatctccaccaagatccggccggacaatctgatcgagggccactcgtaccagttccgcgtgcgggccgtcaacaagcagggcgagtcgacgccgctggtgacgtcgcagccgatcacggccaaggacccgtacaacaagccggacaagccgggcaagccggtggtggtagactggagcgaccatcacgtcgatctggagtggagcatcccgaagaaggatggcggcgcgccgatcacgagctacatcgtagagaagcggccgcgctacggcgactggaagttcgccggcgagtttaccgagctgtacaaaccggccgccaaggtgctggagctgaccaaggacgaggagtacgagttccgcgtgtgcgccgtcaacaaggcgggcgtgagcgacccgagcgaaccgtccgagccggtcgtgtgcaagtcgcgcttcgtctcgccgcacttcaacaagaacgcgctgaaggatctggtcgtgccggtgggcaagaagattgcgtacaacatctcggtggaggcgtcgccgcaggtgacggcggtgtggaagcgcaacggcgcggtcattcccgagtcgcagcgcgttatccgcgaggtgtacaacaacgaggtgtcgctcgagattccgttctcggtgcgcgatgacagcggcatgtacacgctgattgtgaagaacgagtgcggcgagtactcggcgtcggccaacgtgaccgtgctggacaaaccggccccgccggagggaccgctgcgcatcaccaacatcaccaccgagggatgccggctggagtggaagctgccgaaggacgacggtggcagcccgatcacgcactacgtcatcgagaagatggacatgtcgcgcggcacgtggacgaacgcgggcatgagcacctcgctggtgaacgagatatcgcgcctcatccacaacaagcgctactcgttccgggtgaaggcggtgaacgagatcggcgagtcggagccgctcgactgctcgcacccgatcgtcgcgaagaacgactacgaggagccgtcgcagccgccgaagccggaggtgcgcgactgggacgccaactcggtcacgatcggctggaacccgcccaagtcggacggtggcgctacgatcacggagtacatcgtgcagaagaaggagaaggacagcccgtactggagcaatgcgggccgtgtgccgggcatcaagcgcgacctgcagataccggacctggccacggagacggagtacgagttccgcgtgattgcggtgaacgcggccggcgagtcggaaccgtccgacgcgaccgatgcggtgctgacgcgttcgcgcttcatcgcaccgaagatcgtgacgccgatgcgcgatatggtggtgaaggccgggttgatcttccatctggacatcaactttacgggcgagccggtgccggaggtggtgtggacgctcaacggcaagccggtgcagacggacaagcgcacgacgatgacggcgctgggccaccacacgatcgtgcacacggtcaactgcaaccggggcgactcgggcacgtacaagctggtggtgagcaactcgagcggtacggacgagggcagcttcaatctgaccgtgctggaccggccggatccgccgcagggcccgaccgtgtacgaggagatcacggagaagagtgtgacgatctcgtggaagccgccgctagacaatggcggctcggagctgaccgggtacgtggtggagaagaaggatctcacgcacggcggcggttgggtgccggccgtcgcgtacgtcagcccgaagtacacgcacacggtggtgccgcggctgaacaagggcaacaagtacgagttccgcgtgatggcggagaacctgcagggccgctcggacgggctgatgagcgcccatccggtggtggcgaaggaccagttcgtggtgccggggccgccgaccaagccggacattatcgacagcgggtacgagcagattacgctcagctggaagccaccgatcagcgacggcggttcgcgcatctcgggctacatcatcgagcggcgcgacctggcgacgggccgatggatccaggccaacaagtacccggtgccgaacatcgagtacacggacacgggcgtgatcaagggccaccagtacgagtaccgcgtgtcggccgtcaaccaggccggccagggcaacccgagcgactcgtccgtcaagtgctgggcgcgaccgatgcagcaagcccccgcgctcaacatggacagcttcagcaagcgcacgatcaaggtgcgggcgggcgagccgatcgtgattacgatcccgctggtcggtgcgccgctgccgacggtggagtggtcgcgcgccggcaccaagataccagaaacgtcgcgcgtctccatcgacacgaacatggagcagacggtgttccgcgtggacaacagcaaccgcaacgattccggcacgtacaagatcaaggccgccaaccagtacggcgaggacgtgaaggagttcgaggtgattgtggtcgaccggccgcagccaccgaagtacgtgtccgggctggagacgacgcaggacagcgtgacgctcaactgggacgcaccgtcggacgacggtggctccgagattaccggctacagcatcgagtacaaggagttcccgtcggacaactggaagatggtgtacggtacggtgccgcgctgctcgcacaccgtcaagcatctgacggagaaccacgagtacgtgttccgcgtgcgagcggagaacatctacggtgcgtcggagccgaccgaaagcaaaccgatctcgccgaagagcccggacccgccagaggcggttgacaagccgaccgtcgccgactacacgcccagctcgtgcacgatcacgtggaggccgccgcgcgtacagacgcgcccggttgtgggctattacgtggagaagcgcgagcgtggcacgggcgagtgggtgcaggtcaacaactacccgacgaccaacaccacctacacgatcccggatctgatggaaggcttccggtacgagttccgcgtcaagacggtcaacgaggtcggcgtgagcaagccgagcgaaccgaccgatccgatcaccgcgtcgcaccagcgcaagcgcccgaaccagccggacccgccgtcgatcgacaagattacgcgcaacagcgtcaacctgtcgtggcgcacgctgcgccgcgacgcgaaggagaagatcaggggctacatcgtgcagtaccgcgtgaaggacgacgagaagtgggtcgatgcgaacgcaccgaccgagctgattgcggaccaggcgtaccgggtggagaatctggaggagggcaaggagtaccagttccggctgattgcggtgaacgagattggccagtcggaaccgtcccgaccgagcatcacggtcacgttggccgagcagccgaacaaaccgatgatggatctgagcaacgtgcgcgacattactgtgcgggcgggcgaagacttcaacattcacgtgccgtacacggcgttcccgaaaccggtcgcgacctggttcgtgaacgaggagctgctggacgaccgggacaagcggttccacacgcagctgacggaggaggcggccagcatcgtggtggtgaagagtgtccgcgcggacacgaagcagtaccggctgatgctgaagaacccgtccggctacgacattgcgacgtgcaacgtgaaggtgctggaccgtccgagcaggccggagaacattggcgtggagtcgtacggtggcgagcatctggtgctgtgctggaacgccccgctggacgacggaggttcgccagtgacgaactacgtggtggagaagaaggacaagaactcgaacgcgtggacgaaggtgagcagctactgcacgacgacgtacctgaagattcgcaacctgcgcctgaaccagctgtacgatttccgcgtgtacgccgagaacaagtacggcctgtcggagccggcccaggccgactcgatcgtcgcgaagcatccgttcgatccgccgtcgcagccgggcacgccgagccgcgtcgagacgacggaggacacgatcacgatcacctggacgaagccggccagcaacggtggctcaccggtgacgcactacatcgtggagaagaagctggcgaccgagggccactggtcgaaggtgcagcagggcacgctcaaggacctgatgtgcaaggtgtcgggcctgtcggagaaccacgagtacgtgttccgggtggcggccgtgaatgcggccggcaccagcccgttcagcaacccgtccgatccgatcatggtgagtgcggcgttcaccgcgcccaagatcacgtccgacattggcatgcgcgacatactggtgatcgcgcgcgatccgttcaagatcatcgtgccgtacacggcgacgcccaagccggacgccatctggatggtgaacggcaacgaggtgtcgcgcaacgaccgcatcgagctgtcgatcaacgacacggaggcgatcttcaagaacgacaactcgaagcgcatcgactcgggcagctacacgatccatctggtgaactgcgtcggcaaggatacggcctcgtgccgcgtgctggtggtggacaaaccgtcgcccccgatcggcccgctggaggtgtcggagattacgcccgagtcgtgcacgctgtcgtggaagacgccgctggacgacggtggcagcccgatcacgaactacatcgtggagcggtacgagccgctcggctactggacgaaggcgagcagcttcgtgcgcagcacgcactacgacaacatgggcatggaggcgaacaagccgtacaacttccgcgtgcgggccgagaaccagtacggcgtgagcgatccgctgatactggaggagccgatcgtggcgcgctatccgttcaccgtgccggatccgccgaacccgccgcgcgtgtcggactgggacgcgaactacgtcacggtgacgtgggagcgcccgctgatggacggtggttcgcgcatccagggctaccggttcgagtaccgggacgtgctggagggcacctggattacgaacaacttcctgatcaaggacaacagctaccaggtgtacaatctgctgccgggccgcgagtacgagttccgcgtgcgggcccagaacgctgccggtgtgagcaaaccgtccgcctcgtcgaagaagttcaagatccacggcaagatcacgccaccgacggcgccgggagcgccggccgtcgtgaaggtgggcaagagcttcgtcgatctcagctggacgccgccggcgagcgatggtggctccaggattctgggctactacgtggagcgccgcgacattggtggcgcccggtgggtgaagtgcaacgagagcaacatcccagtgacggagatgacggtgacgaacctgatcgagggcggagtgtacgagttccgcgtgtacgccgtgaacaactacggcgtgtcgccgccgtcggccgagacgcgctcggtgcgcatcggcgagcagctcaacacggaaaagccggaatgggtcaagcggctgaagttcaacctggtgccgctgggcaagtcggtcgagctgacgtgcgaggcccacggcaagcccgaaccgacctgccgctggttgcgcaacggcaaggagatcacgcacggcggacagtacgcgctggagagcaagaacggcgtgttttcgctgcacatttccaacgtgacgtaccgggacgagggcgactacacctgcgaggcactgaactttgtcggtgtgatccacacgaccggtgcgctcaagatcggcgtaccgccgaagctggtcaacatcccgtcggacgtgtatctggtgaagggcgacaatgcgaagatcaagctcggcttccacggcgaccagccgatggaggttaacatctcgaaggatcgcgagaagctggtcgagacggagcacatcaagtacacggtgttcgacgactacgccgtcatctacatccgcgacgtgctggacacggacaagggtgtgtatctggtgaacttcaagaacgacagcggtagcgtctcgtgcaacgtcaacgtgcacgttaccggcctgcctggaccaccgaccggtccactgctggtcagccacgtcaccaagaacatgtgcacggtgtcgtggaagccgccggcgcacgacggtggccgcaaggtcacgcactacattgtggagcgtcgcgacatcaagtcgcagcactggctgatcgtgtcgaactacgtgaaggagtcgcagctcatcatcaagggcctgatcgagggctcggagtacctgttccgcgtgtcggccgtcaacgagaacggcatcggcccagcgctggagggcgttgatccgatcaaggcgcgcggcccgtacgacctgccgtcggcaccgggcgtaccgatcatccacgaggtgggcggcgactttgtcaacctcgagtgggagaaaccggtgtcggacggtggcgcccgcatccagggctactggatcgagaagcgcgaacaggacacggacacgtggcagcgcgtcaacacgacgctgtgcgtgatctgcacgatcaactgtgccaatctggtggagggccgccactacgagttccgcgtagcggcccagaacgagatcggcgtgtcggagttctcgaaggcgtcgcagctggtgaaggtggaggatccggatgtggtgaagccgccggaggtcgtgaagccgctcaacacgctgacctgcgtgcagaaccgtggcgtcgagtttgtgtgcaagattacgggcgtcccgcggccacgcattacctggcacaagggggcgcgcgagatctgttcgggctcgcggtaccacatgtacagcgacggcgacacgcaccatctggccatcaacgacgtgttcggggaggatgcggacgagtacacgtgccgtgcggcgaaccggggcggcgtgcgctcgaccaaggcgtcgctgatcatcaagtcgccgccgaagctgaacgtgccgccgcgcttccgcgacaccgcgttcttcgacaatggcgagaacatcgagatcaagattccgttcaccggcttcccgaaaccgcgctgccactggacgctgaagggcgagcagatcgagtcgggcagccactaccacatcgagacgcgcgagcgccacacggtgctgacgatccgcgacggctcgcagctggactcgggcacgtacacgatcacgatcgagaacgagctgggccaggatacggccgacatcaagatccagatcagcgaccggccggacaagccgcgcaacctgacgatcgaccagatcgggctggaccacgtgacgctgagctggctgccgccgtcctgggacggtggtgccagcatcaccaactacatcgtggagaagcgcgaggtgccactgtccacttggattcgggctggcactacacgcttcaatcagctgatcataccgcacctgtcgccgggccaccagtacgagttccgcgtgttcgccgagaacgtgtacggccggtcggaaccgtccgaccagacggagctgatcagcctgaaggatctcggcatcaagccggccaagcgcgtcaagtacgagctggacgagcacggcaagccgaagcggcagggcaagaaggaggccatctccgactacgacgactacgtgttcgacgtgtactccaagtaccatccgaagccggtcgagatctcgaacaagtgcgtgtacgatcagtacgaaatactggaggagatcggtacgggcgcgttcggtgtggtgcaccggtgccgcgagcgcaagacgggcaacgtgttcgctgccaagtttatcccggtgtcgacgaacgcggagcgggagctgattcgtcgcgagatcgacatcatgaaccagctgcaccaccgcaagctgatctatctgcacgacgcgttcgaggatgaggatgagatggtgctgatctacgagttcctgtcgggcggtgagctgttcgagcgcatcaccacggagggataccggatgtgcgagcaggagatcatcgagtacatgaagcagatctgcgaagcggtcaagtacatgcacgagcgcaacatcatccacctggacatcaagccggagaacgtgatgtgccagacgcgcaacaccaaccaggtgaagctgatcgactttggtctcgcgaccaagctcaatccgaacgagatggtcaagatatcgaccggtacggccgagtttgcggcgccggaaattgtcgagcgcgaaccggttggcttctacacggacatgtgggcggtcggtgtgctggcgtacgtgctggtgagcggcctgtcgccgttcgctggtgaaaccgacatcgacacgctcaagaacatcaagcagggcacgtgggagttcgacgaggtcgcgttccgcgacgtgtcggaagagtgcaaggactttatccgccggctgctgatcaagaacaccgagaagcgcatgacggcgcacgagtgcctgagccacgcgtggctgagcgacacgtacaacagctcgacctcggtcatctcgatcgagcggtacaagcagatccgcgacctgatccgccgcaagtacgagaactgggcgtcgttcgtgctgccgctcggccggctgtccgagtactcggcgctgcgcaagctgctcatccagaagtacaagatccacgagacgtcggtcgaccggcgccaggcggcgccgcgcttcgtcatccgcccgcagtccgccttctgctacgagggccagagctgcaagttctactgccgcgtgattggcgtggcgacgccggtcctcacctggtaccacaacaaccaggagctgaagcagtcggtgaagttcatgaagcggtacgccggcgacgactactacttcatcatcaaccgcgtcaagctggacgatcggggcgagtacatcattcgcgcggagaaccattacggttcgcgcgaggaggtcatcttcctgaacgtgcacccgatgtcgaagcaggtgccgatctacaagccggaaacgctgaccattcgcaagcgcgaaccgagcccgcgtccgttctggcaggaggaggccgattcggccccgtcgttcacgtttgcgctgcgtccgcgtgtcatgcagctgcgcgacacctgcaagctgctgtgctgcgtgaccggcaaaccgatgccgtcggtgaagtggtacaagaatggccgcgagctgagcaagtacgagtacacgatgacgcacacggacggtgtggtcacgatggagatcatcgacacgaaggtggaagattcgggcgagtacaagtgcgtcgcggttaacccgctgggcaaggcggaaacgtcttgcgttgtgattgtggaggatcaccgtatcgagcagcagatggctgccaagccggaggtgaagaaaccgagcatcaagaagccggaaccatcgaagacgtctgcgtcgggctcacgcctcggtgcaccgacgaacgaggcacgatcgaggaactcgactcgcgaactgatgccattgcaatcggacagcttgatgcatccgccagagttcaccaagcagctgaaggatgtgatcgctgcggacggtgagccgctgcagctgaactgccacgtcaatggtgacccgctgccgcagatcgtctggacgaaggatggcaagaagctgagctcgtccgacgtgatcgacatcaagtacaagtcgggcattgcgagcctgcgcatcaacgagctattcccggaggattcgggcgtgtacctgtgcacggccaagaactccatgggagaagcatccacccagtgcaagctggatgtgaagaagggaccgacatcgacgtcccgtccggagggcaagggcatcccgatcaagcccccggtcatcaagaagcacgccgagtccggctactacaaggacggctcggaggtgttcgtctcgtgcagcatcaactgtgccgatccgttcagcgtgatctggctgcacgacaaccgggagattaagaactcggccgactttgagtatctgagcgatggagacatccacacgctgcacattgccgagatcttccccgaagatgccggcacgtacacgtgcgaagcgttcaacaagggcggtgaaagcttcagctcgtgcacgatcaccgtactggcgcaggacgaccagaaggacaagcccacctttgccaaattcccggcctcgctcagcgtcctcgacggggccaaggcggtgttctcctgcgaaacgtacgaggcgccgtccaagctgcagtggtacaaggacggcgagccgatcaacgagtcctccaaccggtaccggttcgtgaagaaggacaacaagtacacgttcaccgtggccaagtgctcgtttgaggacattggccagtaccaggtgcgggtggtgacgcgggctggcgatgcgctcgcatcgttctcgctgaacgtcagcgcctaa

SEQ ID NO: 151 - DNA, 4499 bp, Anopheles gambiae
atggagcagtttgagcaactactcacgtgttgcgtgtgtctcgatcgataccgcaacccgaagctgctaccatgccagcattcgttctgcatggaaccgtgcatggacggtctgatcgactacgtcaagcgacaggtcaagtgtccagaatgtcgggcggagcaccggataccgtaccagggcgtgcagggcttcccaaccaacgtcaccctgcagcggtttctcgagctgcacatcgaaattacgggcgagctgccagacccaacgtccggtcaggtgatggaacggtgcaacgtctgctcggagaaggcgtactgtgcgctgtgcgttcactgcgacaagaagatctgcgcggactgcaagggcgcccacatggacatcctgcggcgtgagatcagccgcatcaacaaccagatccggcggggactgcaccggctgaaggaggtgctggccgtggtcgagaagaatgcctccaacctgcagaacaactgcacgagcgtgtcggaggagatcgacgagatctatcggcggctgcagaaggcgctcaaggaccggaccgaccatctgcggcacgaaatggacaagtacatgtcgaccgagctgaagaacgtggtggcgctcaaggaaaacctcgagctggagattgccaacatccagagcaacgcggacctggccgagaagtacatgaacgattcggtcgagtgggacgactgcgagctgatggacacgaaggagatcttcctgcggacggtcgacttcatacgcaacttcgactgcgaaacgatggactacagccggaaggtgcgcttcatcatgaacatcgacccgaacaagctgatcaacgaggtgtccgcgtacggtgacctcaacctgccgaaccacggcggggcggcgacgagccaaagccaggggctgctgcaaccgccgcccggtccggggctgatgcgctccaagagcgatcaccggctggcggcccagttccgccagcagcaggaagcgcagccctggaacgcggacgaggagccgctgctcggcgggcgcaagttcggcgagcggcccccgaaaccggccgcccaggagcgcgaccggtacggtggtgagtcgcggtacggccgcggcacgaccgactacgactacgacgacgacacgacgtccgctagccgcaccgggaagggccggttccggtcgcgcttcgcccgctcccaccagctcgataacgattcggacaacgaatcgaaatcgaacgccaaatcggcggccgagctggagaaggagcgcaacaaggtgtccagcacggaggactgcgccaagggcccgctcagcggtatcttccgcctgatggactcgccgcgcgtcatgaagcgcctgcaggaccaggagaagggcaagaaggaaaagaaggcatcgccggcgacgaccccaacgctcgctaaaccctcgccactgggtgtgaagccgaagtcaacgccgaccgctgctgcccgccagctgtccgaggacgatgagattgcgaagatcaagcgccagaacaagggcgcgtccgggtcgagcacggcggcgcaggtgacggcggccactgcggtcaccgaaccggaacgccccacggcggaccgtgtgtccgcactgaaggcgggccgtaccgcgacgccgaccggcagcgacgatagcgacagtgccacgtcaccggcccgtcgctcgtcgccccacgtcgaggccgacagcgatcaggacgattcggaatcgaaccgccgtaccgcgcgtcaaacctccgtcggcagcaagccggcggccggagcggcggcagcaaccaaaaagtcgtccgtcacccgctctgccagcagcgaatcgaactcgtcgagcgaaagctccagcccgtcgcccgtgcccgcttcgacgcgcaccgacccagaggtaaagccgaaaacgatcctcaagaacgcgaacgagaacgccagccagcgcaacggcactgccagcccgaccgaaacggccaaaaagccgttccagagccggttcctgccgcaaacgcagccaccggcgcagacggcgccggaaaagaaggaagagtcggagagcagctccgaggaggaatcgtcctcggaggaagagtccgaagaggaggaagaggaagaggaggagaagccagcggccgcgcccgcaccagcagcagcggccaccagcactgcccgctcttccccgatcaccaccacgacttcctcgtcgcgcacgacacacgacacaccgagcagtccgctgtttgggcgcgtgtcgcgccaggattcgtccgacagtacgcgcaagtcgtcgcgcgatgagctgcgcacgtccagcggctactccagccccacgagctaccgcagccagaaccactacgagcgcgacgaaagccccaagtacggttcgtcctcgagcggctcgtccgcgctgcgctcgcgcaccaccagccacgcggccgaaccggaggacaacaaatatggcagcggttccgggtacacgagccgcttcctgaacaagagcaagagcacggcggtcgtcgcccccgaggacgatgccacggacgattcggacagccggtacggggcgggtggccgcagccggttcaccgcgctgcaggaccgccggacccggctggcccgcagccgctcgtcgcacaacttcggtaatgacgacgaggaggatgaaccggtgtcgccgaccaccacgtcaccgtcggcttaccttgcctccaggtacggtgcgtcctcttcactcgcctcccagccgtcggacctgtcccgcagccgctcgacgcacgccctcaagtcgcgcgaaccatcgcccgaacgcaacagtacgggcgccggtggcgacaaggacggagccgccctgagctcgtgggcccgctacctgaagaacaagtacggcaaccgcacgaccaaggacggcaaggactcgcccagctcgtcctcctccacctccgggctcggatcgtcctccctgtcctccccatcctccgcctcctcctcctccgcaacgtccgggtccagtgcgtcggcttcggctgccgcccggcgactcagcctcggtctgccgttgcgccagaccgacctactcagctcggacgacgattcaaaaaacggggtaggctcccctacctctcctacggcagcagcagcggcagtagccggtatacccggggcagcaggtatgtcccctaggacgcagtacctgcagaagcgccggcagctgttccagataggaggtcgggggagcgaaccaggttccttcacgtggccgcgcggcatcgccgtcggtccggacaacagtatcgtcgtggcggactcgtccaaccatcgcgtgcaggtgttcgactcgaacggcatcttcgtcaaggagttcggccagtacggcaacggggacggcgagtttgactgtttggccggtgtcgcggtcaaccgtatcggtcagttcatcatagccgatagatacaaccatcgcatacaggtgctcgatccggccggtcgttttctgcgatcgttcggctcgcagggcaccaccgatgggaaattcaactacccctggggcatcaccaccgatgcgctcgggttcatctacgtttgcgataaggaaaatcatagaattcaggtattccaatccgatggatcatttattggcaagtttggcacctgcggcaaggaaaagggccagctcgaacatccgcactacatcgccgtctcgaacacgaaccgcgtcatcgtgtccgattccaacaaccatcgggtgcagatttttgacgtcaacggtcgcgtcctgacaacgttcggcggcgaaggctccgaggaaggtcaatttaaattcccaaggggcgttgcggtggacgatcagggctacatctgtgtcgccgactcgggtaacaatcgcatccagatcttccacccggacggcagcttcctgcgcgcgttcggctcgtggggttcaggcgacgccgagttcaagggactcgagggcgttgcgatcatgtcgaacggcaacatcctggtgtgcgatcgggaaaaccatcgtgtgcaggtgttttagtgtgacggttgttcgaggttgctgttaatggggcaatggcgtatatttgagcatacatcaatgaagttgtcatcaagtaccaaaacgaattgctgcacccgcagagcgttacacttaagccgtattttgtgtcaccaacccttccttagcctaattaatttcaaattgttctcttaatgtttcatcgatgcaaaacacctttcattcgtatcactaataggaatggatgtttgaagcagtttaccgacaaattcaacgtacacccatcaacataagcacagtggaatatgtaatgcgcccaatcgttcgctcgtaagctaataagcgaacgatggtttaatatgacggtaatggttgaacgttacattaccgctagtggtggctttttgctagttagttagatggaaataaaggttttttctcttctttgtctgaagttttca

SEQ ID NO: 152 - DNA, 1245 bp, Anopheles gambiae
aggttcgcaccgactccggccgggggtcacatttcattctagcgagatccgcagcatcgggcgccacttccggggggcacacgcaccaagcaagttcagcactttcccgcatttttcggcacagcaccacgcgctccaaccgcctccaacatgtcggtcgttgatgatctggacaaagctcagctggaactgctccgcaatgcgttcaacgcgttcgatcaggagaagaagggatgcatcggcacccagatggtcggcaccatcctgagcatgttgggccaccagctggacgacaagatgctgaaagagatcatcgacgaggtcgatgcggacggttcgggcgagctggagttcgaggagttcgtcaccctcgctgcccggttcatggttgaggaggatgccgaggccatgcagcaggagctgaaggaagccttccgtctgtacgacaaggagggtaacggctacatcaccacccaggtgctgcgcgagatcctcaaggagctggacgacaacctgaccaacgaggatctggacatgatgattgaggaaatcgattctgacggttccggtaccgtcgatttcgatgaattcatggaagtcatgactggtggtgatgactaagagtcatccggacatccctggaacccaacaacaaacacaccaaatcaaaacaaagccaaagaaaagcctaaaaaaactcctctacacccatcttcgttaagtttcttcttcatcagtaatggggggcaataccagcccactcctctacgtgtggctgacacactctctctctcactttctgagctgagctctactcttccacgggtttcgtcttccgcctttttgcgatctaaaagctttaacgaatgaagaacattggaaagggacacggaaaggcggaggaacagcatttcacggagcaaaaggggcccaccaacatcatcacaaaaagccgctccagctatcattgttgctaaaaaaaaaaaggttgttcaaagagatacacattctaatccgttccgttcgcgtatccgtcgagcgctaatcggcttggttctttagcttcgtacgcgttccttcgctacttgtgccctgctggtgcttcttctgggaggagagcttggaaatgtattaccaaaccaatgttgatgttgatcttatagtgtaagcgagggcagagttacagcgctgaataaacaacaactattgcggaaagccttctaaacggtttccgtagaaaaccaa

SEQ ID NO: 153 - DNA, 1374 bp, Anopheles gambiae
tccttacagttttacgttaaagttggaaccgactactactgtaccgtttgctctacggacgatccggttaaggcggactgtctgaaaagcatggcgcaccacttggccgaagagcatggtcaacaaacgcacctgtgcgagttgtgtgatgtcatatttttccagaaaccatcttacgtcgcccatttagccgaacacagcgcctccgacgatcaggacatggaacgcggcgtctcattaagctgcaacgtgtgcagcgaaacgttcaccagcaagcgcgcccttgagctgcaccgtaaaatgcacccgcgaacgtcgcacgtcacgaacatgatctggagctgcgaggtttgcaacaagaagtatacctcgaaagcgttctacgaggtacacatgaacaagcacgccgggctgcgaccgtacaagtgtgacctgtgtgcgaaagacttctcctccaagtatgcgctagcggtgcaccagaaaacgcacaacgagcgtccccgcaccttcgtgtgcaacgagtgcggcaattcgttctacagccggcacaatctggtacagcacgagcggacgcatcgggcggtgcgcgagtacgagtgtgccgtgtgccggaagaagttcttcacgcagcacaatttaaacgtgcacatggtgatacacagtgcggataaggcgttcgcttgccgggagtgtggcaaaaagtttgcgcgcaaggcggagctgctagaccacgagcgtattcacacaggtgaaaaaccgtttgcgtgcgatatgtgcgatgcaagctttgcgcaacggtcaaatcttcattcgcaccggcggatgacgcatttgaatgacaaacggtttaagtgcgatcgatgtgatgcggcctttaaacggcgccgattgctcacctaccacatcagggcgatgcacactggtgagcgaccgtacaagtgtgatctctgccacgcgaccttcgtctatccggaacactttcaaaagcataagcgaatccataccggcatcaaaccgtacgcctgcgaggtgtgccatcggacgttcaccagtcaggacaatcgcaatgcgcaccggtacgtgcacagtgacaagaaaccgttcgagtgtgtcacgtgcggtgccggttttatgcgcaaatcgcatctgtacacgcacatgcaggaggtgggccatctgagtgatacgatcgtggtgaaccagccgcgcattagcgccaaccgtacgctggagtttgagacggacacgtacgtgaccgatggtacgggtgagggcgagcagggccaggaaatggagggttcggatgaggagaacgtacagttaacgtacatttgtgacgatgataatgtggacggtgagttggaagcggaatag

SEQ ID NO: 154 - DNA, 1560 bp, Anopheles gambiae
atttgttttccaccgagtgtttggaaatgatctgcctcaacacagtatttcctgcaaaagcgttcacataattgtacatattgtacagcaaaatgcaaacctgcgtatcgtgtagagtgaaaaataatggcatgattgctatttatcagcatccaaatgggttggatgagatgtttcactcaattacagacataaaggtacaaccggaagaacatctgtgtgtgccgtgctatgatgatttgaaggtagcatatcgcttcaaacagagatgcattcagaacacggcactacggttatcgtctcgggctaaaaagacgacacatgctcctgcagaccagagcgtcattagtagttgtacggatgtttacacaacgtatgataaatctgttccggaatcaactataaatcaaaatacagaaaacaatagcagcaatggcagggcgaacacgtctaatcttacaccggaagatccttcgccgcttcccaagatagaattatgcatagaaaatgaaacgatacaacaggatgatgttgaaattagcgaagaactcattgacccgctacaagacgaggaagatcaaccgttagcaaattatataatcggggtaatagaaagctcaacttatgacaatgcaccaaaagacaatgtgggtaccgatgccgctaaagaacaaatcggcgaccaaaccataactgcagccacccaagagaggggtcaatcctcttctcttctaccgaaactgcatagcctgatgtgtgagtactgtttcaaagagtttaccctgctgacagacaagatcgaacataccgagtcacacaaatcggaagcgaaaccattcaaatgtgtgcaggaaggttgcgggaaatcatttaaagaccgcgtaggtttgcgatcgcacgtgcgcatccattccgccgtaaggcggttcgggtgtcggtactgcccgaggcgattccacacgctgggcaatcagatggcgcacgagcgaacacacagcggggagaagccatttatctgtccaaagtgtggcaaaggcttcgcggaggtaggcaatctcaagaatcacattcgcttccacactggcgaacggccgtacgcttgcaatctgtgcgacaaatcgtacagaacgtactactctcgcacgattcatatgcgctcccacaccaacgaacgaccgtatctgtgcggtgactgcgggaaagggttctattcgagcggaaagctgaccatccaccgccggacgcacactggcgaacggccctacgaatgtacgagctgtacggcaaggttttccgcaacgtcctcgcttaggcgacacatggttaaaaaacactagaataagtggacatatatttaactgtgtagggtagtttgccaattgttgcacacttaagggaacagccaacgtatttcataagtttgagagggatacaaccacaatattcatgttatgtgtgtctagtttacatcattattgtttaaaaaacagcatacatatatttttctattattcaggaggaacaagtttgccgtatcgcttaaaagtatgaatgtatgtt

SEQ ID NO: 155 - DNA, 600 bp, Aedes aegypti
atggtgagctaggctatctgtatgcaaaggattgccagtacaagttagatatcatctggtcatatttcacggccaaccggtgtcccacgctggccggcaagccaaaggtatttttcattcaagcctgccagggcgatcagctggacgcaggcgtcaccttggcagaacgcaccgaaacggacagtgccggctcgatgagctacaaaatcccagctcatgctgatttcctgattgcctattcgaccattccgggattctactcatggcgcaatacccagaagggttcctggttcatgcagtccctctgccaggagctgacccaacatggcaagaagtacgatctactgaccctgctgactttcgttgctcaacgtgtggcgtatgacttcgagtccaacactccggatattcctatgatgcaccagcagaagcaaattccctgtgtgaccaccatgctgacgaggctgttgcgttttaccgagaagtaaccaagtgacggggagcgttcttcaaatctactttgagcatgacaccaccctagccaccttaaattacttcttcacctgagctgcacatgggaaggaatggctgcaccggtag

SEQ ID NO: 156 - DNA, 491 bp, Aedes aegypti
gttccgtcggagtcgttggacgttggagacgacgacaacaacctcagtggagacgaagatgaatcggtgctggaagtggactcgccggtcaattccccggccggtcgaaatcgatccccgtctccctcactcgatatgccagtttcagctgaactggatgacgacgactatcccgatgagcatgaagacgaaaatgatgaagatgaaacgatcagcgttgcaggtcatgaacctgatccaacaccagtagtgcagtgccatcatgagaggcccatggggtcccgaagtccatatacaatgcgtccccaatacgattatggaagcaggtcgtcaacttcctcccaatcatcccaacactctcaatcaatccagagtcccaatggtgaagatctgacaactagtagtggcccaggaccagttccacagcaacatccacatgacatgttcatcccgatgcttcacgtccgcagagacctccatcacaaagttgg

SEQ ID NO: 157 - DNA, 700 bp, Aedes aegypti
ctaccggatatcaagcgggagatatcgaaggtcgaattcaacgcggcacagatttcgtccgagcagggattgctccgggaggaaggacacaacgtggccaagagtatccaggcgatggccgtcagtgtgagcacgctgcaggaggagcgagaaaatgttcgcaaattggaagagcagctccaggtgatgaagagtgatttggataagattaagtcggcagcgatgttgcacaaggagatggctcacaaccggctggaaaagctggagtccgaatcacgaaccgaacgcaacgtgtcatcgaaactgactgaactgcagcgtacctcccggctggtgcaacagatggaaaccgttgaaaacgagtacgaaaccatcatcaacaagctgccccgtgactgcactcagatccagcagatgaaatcccagggggagacgggtcagggtggcgagggaaatctttatctgattgccccgaccggtcagcatcacccactgatgacacagtgcttcaacgagtggaccacgattcaacgccgccaggatggttccgttgacttcaatcggtcttgggaggattatgcaaacggttttggtagccccgctggggagttctggatcggtaatcaagcgctgcaccatcttaccaacgacaactgctcgatgctacggatagtgatgcaagatatctacgataatacct

SEQ ID NO: 158 - DNA, 600 bp, Aedes aegypti
catgacgcagagatgtaaagaaaaactgaatatcctggccgtatcggtgatgaatcaatggcctggacttcggttaatggttactgaaggctgggatgaggaccatatgcatgcacgcgaatcgctacactacgagggtcgagcggtggacattatgacatcggacaaggatcgatccaagatcggaatgttggcgagattggccgtcgaggctgggttcgattgggtttactacgaaagccgcagccacatacactgttctgttaagtcagattcatctcaatcgaaccatgcaagcggatgcttcacaggcgacagcacagtgcagacatcaaccggtgaaacgcggaagctcagtgaactgcaaatcggcgagcaagtacttagcgtggacagctcaggcaacacggtgtacagtgaagtgatcatgttcatggatcgcgatacccaccaaagtcgagaatttgtccatattgaagccgacggtggtgctcatctgacagttactccagcccacctggttatggtgtggcagaaaaatgaaggcaaatctctctatttgtttgccgatcgtatacaggaaggtgactacattttagt

SEQ ID NO: 159 - DNA, 520 bp, Aedes aegypti
gtacagtttgatactgatggcgacgatcgtgagtcatgtgtgcccgcgccaggatcattactacagctatcaggaaccgtatgacgatgatctatcgctgtggatcaatgaacagcaagtgaagatattcagtggggtaccgacgaagatctacgcaatcgataatgggcgtgtttcgctgcatcttcgggatccgaatttcagtcactatctgccgatcataccgtccgaggtgagctgcgtgaacttcacctggaaatccggatcgaagaagtatcactacaacttcgatcgcctagtgtccgaggatgaacaaatactgaaacctcctacgatatcgatcaaaactagcggtcgtgttccaaagaatgcaaaggagttcagtgtgacactgccgtgctctggtaatgtgtcaggcattgcggtgttcagcattggactcctaatacaaagtcgcaagggcaaacctgtgcccggcacgccactccgaataaaactccgtaaggaatgtgcacataga

SEQ ID NO: 160 - DNA, 600 bp, Aedes aegypti
acttatggatccgcggtacagccatttgaggattccagcatcttcaagccgaatcctttacgacgttccgtgcaaggtatgtcgcgatcacagctccggaaagcattacggaatatacgcatgtgatggatgtgctggcttcttcaagcgatcgattcgccgtagtcgacagtacgtatgcaagtcgaagtcagaaacgccatgcatggtcgacaaaactcatcggaatcaatgtcgagcgtgtcgtttgaagaaatgtttcgaagttggcatgaacaaggatgcagttcaacacgagagaggacctcgaagctccacattacgtaaacagatggccctattcattgctaaggatacacctctgcgtcatgaactgatgatcccaccaccaattccaatgggtcaaccaacgatgggcctcgacttgagcatgcagaggaacgctttcctgagtccacaatccatggtccatccaacactgttcccagctatgcaatcgccccatcctttgattgctgccgacgccattcgggaatcagctgctcaactcctgttcatgaacgtcaacttccttaaaaacttggtacccttcacgaaact

SEQ ID NO: 161 - DNA, 567 bp, Aedes aegypti
cattcttccgacgttgtctgagcctctcagaaaacccaatcgctcgacgcgccaacataactccattcgcctcccgaccagacccaacacgctgcttcaaacgtccggaaccaccgggaatcagccccattcaaagcaagcgccacaaaaccgaagttcttaccccagtcagctcgttgcgcaccgtagaaccctctccacgtgacagcccctccctcttgaccgtaccgtcgaagcgaccgatcctgcaaaagtccatctccatgaacgatgcccacatcatgagtgccctctcgcggtcctccacggagccagacctcatcggagacttcagcaagtcgtacgtgctgcccctgatcgagggccgccaccgggacctgaaatccatcacgccgaccatcatggccgaactgctgcgcggtaccttcgaccatcagattgcctcgttcaagatcatcgactgccggtacccgtacgaattcgagggcggccacatccgaggcgccaagaacctctacacccaggagcaaatcctggaagaactgatcaaaagcaagactgaaccgc

SEQ ID NO: 162 - DNA, 666 bp, Aedes aegypti
aacctcagcacaaagccagaggatctttcgatgaaaaagaaaaaggctcgttccgagtctccagtgcctgttgtgatcaaagctgaagacactttgccaacaccgccaccgtcatcctctcccgatccaactgaaatcaaatcaccgatttcagttccaactccgatctacggatcacacccatcaatctactacccaccctcaagatctccatcctcgcctgctgaaccgctacacaacttctacaaatccgcacccaatgtgtatcctggatatcctcatttcccatacccaatgccatatccttcggatctgtacaacttggcgtatcatcatcacatctcgccaccacgatccgagccactgtctccttatggacaacgtgaaagttcggtttcgccaccacatccatctctgtacacccgccaggaatcgatctcaccgcctacgatgaacaacaatatcatcaagtcggaatccttcgctcggcaacaccgctacatgccctacagtctcagccatcatcatcagctcatgatgcctgtagaacatcccacgctatcgccaacctccagtcacacctcgttcaattcgtacctttcgtcgaaccgatcgctttcaccggcccgatcgagtccttcgactgtttccgaagagaacaacaac

SEQ ID NO: 163 - DNA, 670 bp, Aedes aegypti
caccgaactgatgacaacaacatccacggtgctgcagcagaaaagtatcatcaagaccggcccggtcaaaacctccaacgcggccagcttagagaaatacctcaacctcctacagcaacagcaagcaacctccataactccagctactacgctgaagaaggtcgaacgaaagactgcgcgaatagcaccaacagtgtcgcttacccgcaaagttagtcactcacctcagggaggtctcggagttggacaacccaaaaagccggtcacaattgcacctcgaacttccgatcccaagttgagcatcaactacaaccaacagatggttgccacgaccgccacctccgctatttcaaccggcaatcaactcatcaaacagcaggatcaacagttggttaagtcacctcaatcaaccgtcttgctcaccaccatacgaattccccaacaacagcagcagcatcaacagtccactcaaacgcaacaacaaaccagtcaaaatcagtcacagccacagcagaatcaaacacaggctcaacttcaagcacaacaacagttcaaacaggttgttcaacagcaactccaactgagtagtcctccccggacgccaaccaagctaggctcggctgtgttccagtttcatccgcaaacgaccaccgtcatgccaaatctggta

SEQ ID NO: 164 - DNA, 336 bp, Aedes aegypti
tcccagcattcgagctaactggttcaaggcaaatgaattctgcaattcattgaaaatgcgcctggtggccatccgatcgcaggaggacaacgatgccgtcgcacgatacgtccgaacaacctccaagtttaccgataactgcagcttctggattggggcgtccgatctagcggacgagggaaccttcgtatgggtggccaccggtgaggaagttacctatacgaactggcgcgaaaatgagcccaacaacgagggaggcaatgaggattgcattcagttggcttacattccggcgttgaattaccactggagctggaatgataacacctgcgcagg

SEQ ID NO: 165 - RNA, 9 nt, Artificial sequence
  oligonucleotide sequences that can be used to form the SiRNA loop
uucaagaga

SEQ ID NO: 166 - RNA, 9 nt, Artificial sequence
  oligonucleotide sequences that can be used to form the SiRNA loop
uuuguguag

SEQ ID NO: 167 - DNA, 10862 bp, Yellow fever virus
agtaaatcctgtgtgctaattgaggtgcattggtctgcaaatcgagttgctaggcaataaacacatttggattaattttaatcgttcgttgagcgattagcagagaactgaccagaacatgtctggtcgtaaagctcagggaaaaaccctgggcgtcaatatggtacgacgaggagttcgctccttgtcaaacaaaataaaacaaaaaacaaaacaaattggaaacagacctggaccttcaagaggtgttcaaggatttatctttttctttttgttcaacattttgactggaaaaaagatcacagcccacctaaagaggttgtggaaaatgctggacccaagacaaggcttggctgttctaaggaaagtcaagagagtggtggccagtttgatgagaggattgtcctcaaggaaacgccgttcccatgatgttctgactgtgcaattcctaattttgggaatgctgttgatgacgggtggagtgaccttggtgcggaaaaacagatggttgctcctaaatgtgacatctgaggacctcgggaaaacattctctgtgggcacaggcaactgcacaacaaacattttggaagccaagtactggtgcccagactcaatggaatacaactgtcccaatctcagtccaagagaggagccagatgacattgattgctggtgctatggggtggaaaacgttagagtcgcatatggtaagtgtgactcagcaggcaggtctaggaggtcaagaagggccattgacttgcctacgcatgaaaaccatggtttgaagacccggcaagaaaaatggatgactggaagaatgggtgaaaggcaactccaaaagattgagagatggttcgtgaggaaccccttttttgcagtgacggctctgaccattgcctaccttgtgggaagcaacatgacgcaacgagtcgtgattgccctactggtcttggctgttggtccggcctactcagctcactgcattggaattactgacagggatttcattgagggggtgcatggaggaacttgggtttcagctaccctggagcaagacaagtgtgtcactgttatggcccctgacaagccttcattggacatctcactagagacagtagccattgatagacctgctgaggtgaggaaagtgtgttacaatgcagttctcactcatgtgaagattaatgacaagtgccccagcactggagaggcccacctagctgaagagaacgaaggggacaatgcgtgcaagcgcacttattctgatagaggctggggcaatggctgtggcctatttgggaaagggagcattgtggcatgcgccaaattcacttgtgccaaatccatgagtttgtttgaggttgatcagaccaaaattcagtatgtcatcagagcacaattgcatgtaggggccaagcaggaaaattggaataccgacattaagactctcaagtttgatgccctgtcaggctcccaggaagtcgagttcattgggtatggaaaagctacactggaatgccaggtgcaaactgcggtggactttggtaacagttacatcgctgagatggaaacagagagctggatagtggacagacagtgggcccaggacttgaccctgccatggcagagtggaagtggcggggtgtggagagagatgcatcatcttgtcgaatttgaacctccgcatgccgccactatcagagtactggccctgggaaaccaggaaggctccttgaaaacagctcttactggcgcaatgagggttacaaaggacacaaatgacaacaacctttacaaactacatggtggacatgtttcttgcagagtgaaattgtcagctttgacactcaaggggacatcctacaaaatatgcactgacaaaatgttttttgtcaagaacccaactgacactggccatggcactgttgtgatgcaggtgaaagtgtcaaaaggagccccctgcaggattccagtgatagtagctgatgatcttacagcggcaatcaataaaggcattttggttacagttaaccccatcgcctcaaccaatgatgatgaagtgctgattgaggtgaacccaccttttggagacagctacattatcgttgggagaggagattcacgtctcacttaccagtggcacaaagagggaagctcaataggaaagttgttcactcagaccatgaaaggcgtggaacgcctggccgtcatgggagacaccgcctgggatttcagctccgctggagggttcttcacttcggttgggaaaggaattcatacggtgtttggctctgcctttcaggggctatttggcggcttgaactggataacaaaggtcatcatgggggcggtacttatatgggttggcatcaacacaagaaacatgacaatgtccatgagcatgatcttggtaggagtgatcatgatgtttttgtctctaggagttggggcggatcaaggatgcgccatcaactttggcaagagagagctcaagtgcggagatggtatcttcatatttagagactctgatgactggctgaacaagtactcatactatccagaagatcctgtgaagcttgcatcaatagtgaaagcctcttttgaagaagggaagtgtggcctaaattcagttgactcccttgagcatgagatgtggagaagcagggcagatgagatcaatgccatttttgaggaaaacgaggtggacatttctgttgtcgtgcaggatccaaagaatgtttaccagagaggaactcatccattttccagaattcgggatggtctgcagtatggttggaagacttggggtaagaaccttgtgttctccccagggaggaagaatggaagcttcatcatagatggaaagtccaggaaagaatgcccgttttcaaaccgggtctggaattctttccagatagaggagtttgggacgggagtgttcaccacacgcgtgtacatggacgcagtctttgaatacaccatagactgcgatggatctatcttgggtgcagcggtgaacggaaaaaagagtgcccatggctctccaacattttggatgggaagtcatgaagtaaatgggacatggatgatccacaccttggaggcattagattacaaggagtgtgagtggccactgacacatacgattggaacatcagttgaagagagtgaaatgttcatgccgagatcaatcggaggcccagttagctctcacaatcatatccctggatacaaggttcagacgaacggaccttggatgcaggtaccactagaagtgaagagagaagcttgcccagggactagcgtgatcattgatggcaactgtgatggacggggaaaatcaaccagatccaccacggatagcgggaaagttattcctgaatggtgttgccgctcctgcacaatgccgcctgtgagcttccatggtagtgatgggtgttggtatcccatggaaattaggccaaggaaaacgcatgaaagccatctggtgcgctcctgggttacagctggagaaatacatgctgtcccttttggtttggtgagcatgatgatagcaatggaagtggtcctaaggaaaagacagggaccaaagcaaatgttggttggaggagtagtgctcttgggagcaatgctggtcgggcaagtaactctccttgatttgctgaaactcacagtggctgtgggattgcatttccatgagatgaacaatggaggagacgccatgtatatggcgttgattgctgccttttcaatcagaccagggctgctcatcggctttgggctcaggaccctatggagccctcgggaacgccttgtgctgaccctaggagcagccatggtggagattgccttgggtggcgtgatgggcggcctgtggaagtatctaaatgcagtttctctctgcatcctgacaataaatgctgttgcttctaggaaagcatcaaataccatcttgcccctcatggctctgttgacacctgtcactatggctgaggtgagacttgccgcaatgttcttttgtgccgtggttatcataggggtccttcaccagaatttcaaggacacctccatgcagaagactatacctctggtggccctcacactcacatcttacctgggcttgacacaaccttttttgggcctgtgtgcatttctggcaacccgcatatttgggcgaaggagtatcccagtgaatgaggcactcgcagcagctggtctagtgggagtgctggcaggactggcttttcaggagatggagaacttccttggtccgattgcagttggaggactcctgatgatgctggttagcgtggctgggagggtggatgggctagagctcaagaagcttggtgaagtttcatgggaagaggaggcggagatcagcgggagttccgcccgctatgatgtggcactcagtgaacaaggggagttcaagctgctttctgaagagaaagtgccatgggaccaggttgtgatgacctcgctggccttggttggggctgccctccatccatttgctcttctgctggtccttgctgggtggctgtttcatgtcaggggagctaggagaagtggggatgtcttgtgggatattcccactcctaagatcatcgaggaatgtgaacatctggaggatgggatttatggcatattccagtcaaccttcttgggggcctcccagcgaggagtgggagtggcacagggaggggtgttccacacaatgtggcatgtcacaagaggagctttccttgtcaggaatggcaagaagttgattccatcttgggcttcagtaaaggaagaccttgtcgcctatggtggctcatggaagttggaaggcagatgggatggagaggaagaggtccagttgatcgcggctgttccaggaaagaacgtggtcaacgtccagacaaaaccgagcttgttcaaagtgaggaatgggggagaaatcggggctgtcgctcttgactatccgagtggcacttcaggatctcctattgttaacaggaacggagaggtgattgggctgtacggcaatggcatccttgtcggtgacaactccttcgtgtccgccatatcccagactgaggtgaaggaagaaggaaaggaggagctccaagagatcccgacaatgctaaagaaaggaatgacaactgtccttgattttcatcctggagctgggaagacaagacgtttcctcccacagatcttggccgagtgcgcacggagacgcttgcgcactcttgtgttggcccccaccagggttgttctttctgaaatgaaggaggcttttcacggcctggacgtgaaattccacacacaggctttttccgctcacggcagcgggagagaagtcattgatgccatgtgccatgccaccctaacttacaggatgttggaaccaactagggttgttaactgggaagtgatcattatggatgaagcccattttttggatccagctagcatagccgctagaggttgggcagcgcacagagctagggcaaatgaaagtgcaacaatcttgatgacagccacaccgcctgggactagtgatgaatttccacattcaaatggtgaaatagaagatgttcaaacggacatacccagtgagccctggaacacagggcatgactggatcctagctgacaaaaggcccacggcatggttccttccatccatcagagctgcaaatgtcatggctgcctctttgcgtaaggctggaaagagtgtggtggtcctgaacaggaaaacctttgagagagaataccccacgataaagcagaagaaacctgactttatattggccactgacatagctgaaatgggagccaacctttgcgtggagcgagtgctggattgcaggacggcttttaagcctgtgcttgtggatgaagggaggaaggtggcaataaaagggccacttcgtatctccgcatcctctgctgctcaaaggagggggcgcattgggagaaatcccaacagagatggagactcatactactattctgagcctacaagtgaaaataatgcccaccacgtctgctggttggaggcctcaatgctcttggacaacatggaggtgaggggtggaatggtcgccccactctatggcgttgaaggaactaaaacaccagtttcccctggtgaaatgagactgagggatgaccagaggaaagtcttcagagaactagtgaggaattgtgacctgcccgtttggctttcgtggcaagtggccaaggctggtttgaagacgaatgatcgtaagtggtgttttgaaggccctgaggaacatgagatcttgaatgacagcggtgaaacagtgaagtgcagggctcctggaggagcaaagaagcctctgcgcccaaggtggtgtgatgaaagggtgtcatctgaccagagtgcgctgtctgaatttattaagtttgctgaaggtaggaggggagctgctgaagtgctagttgtgctgagtgaactccctgatttcctggctaaaaaaggtggagaggcaatggataccatcagtgtgttcctccactctgaggaaggctctagggcttaccgcaatgcactatcaatgatgcctgaggcaatgacaatagtcatgctgtttatactggctggactactgacatcgggaatggtcatctttttcatgtctcccaaaggcatcagtagaatgtctatggcgatgggcacaatggccggctgtggatatctcatgttccttggaggcgtcaaacccactcacatctcctatgtcatgctcatattctttgtcctgatggtggttgtgatccccgagccagggcaacaaaggtccatccaagacaaccaagtggcatacctcattattggcatcctgacgctggtttcagcggtggcagccaacgagctaggcatgctggagaaaaccaaagaggacctctttgggaagaagaacttaattccatctagtgcttcaccctggagttggccggatcttgacctgaagccaggagctgcctggacagtgtacgttggcattgttacaatgctctctccaatgttgcaccactggatcaaagtcgaatatggcaacctgtctctgtctggaatagcccagtcagcctcagtcctttctttcatggacaaggggataccattcatgaagatgaatatctcggtcataatgctgctggtcagtggctggaattcaataacagtgatgcctctgctctgtggcatagggtgcgccatgctccactggtctctcattttacctggaatcaaagcgcagcagtcaaagcttgcacagagaagggtgttccatggcgttgccgagaaccctgtggttgatgggaatccaacagttgacattgaggaagctcctgaaatgcctgccctttatgagaagaaactggctctatatctccttcttgctctcagcctagcttctgttgccatgtgcagaacgcccttttcattggctgaaggcattgtcctagcatcagctgccttagggccgctcatagagggaaacaccagccttctttggaatggacccatggctgtctccatgacaggagtcatgagggggaatcactatgcttttgtgggagtcatgtacaatctatggaagatgaaaactggacgccgggggagcgcgaatggaaaaactttgggtgaagtctggaagagggaactgaatctgttggacaagcgacagtttgagttgtataaaaggaccgacattgtggaggtggatcgtgatacggcacgcaggcatttggccgaagggaaggtggacaccggggtggcggtctccagggggaccgcaaagttaaggtggttccatgagcgtggctatgtcaagctggaaggtagggtgattgacctggggtgtggccgcggaggctggtgttactacgctgctgcgcaaaaggaagtgagtggggtcaaaggatttactcttggaagagacggccatgagaaacccatgaatgtgcaaagtctgggatggaacatcatcaccttcaaggacaaaactgatatccaccgcctagaaccagtgaaatgtgacacccttttgtgtgacattggagagtcatcatcgtcatcggtcacagagggggaaaggaccgtgagagttcttgatactgtagaaaaatggctggcttgtggggttgacaacttctgtgtgaaggtgttagctccatacatgccagatgttctcgagaaactggaattgctccaaaggaggtttggcggaacagtgatcaggaaccctctctccaggaattccactcatgaaatgtactacgtgtctggagcccgcagcaatgtcacatttactgtgaaccaaacatcccgcctcctgatgaggagaatgaggcgtccaactggaaaagtgaccctggaggctgacgtcatcctcccaattgggacacgcagtgttgagacagacaagggacccctggacaaagaggccatagaagaaagggttgagaggataaaatctgagtacatgacctcttggttttatgacaatgacaacccctacaggacctggcactactgtggctcctatgtcacaaaaacctcaggaagtgcggcgagcatggtaaatggtgttattaaaattctgacatatccatgggacaggatagaggaggtcacaagaatggcaatgactgacacaaccccttttggacagcaaagagtgtttaaagaaaaagttgacaccagagcaaaggatccaccagcgggaactaggaagatcatgaaagttgtcaacaggtggctgttccgccacctggccagagaaaagaaccccagactgtgcacaaaggaagaatttattgcaaaagtccgaagtcatgcagccattggagcttacctggaagaacaagaacagtggaagactgccaatgaggctgtccaagacccaaagttctgggaactggtggatgaagaaaggaagctgcaccaacaaggcaggtgtcggacttgtgtgtacaacatgatggggaaaagagagaagaagctgtcagagtttgggaaagcaaagggaagccgtgccatatggtatatgtggctgggagcgcggtatcttgagtttgaggccctgggattcctgaatgaggaccattgggcttccagggaaaactcaggaggaggagtggaaggcattggcttacaatacctaggatatgtgatcagagacctggctgcaatggatggtggtggattctacgcggatgacaccgctggatgggacacgcgcatcacagaggcagaccttgatgatgaacaggagatcttgaactacatgagcccacatcacaaaaaactggcacaagcagtgatggaaatgacatacaagaacaaagtggtgaaagtgttgagaccagccccaggagggaaagcctacatggatgtcataagtcgacgagaccagagaggatccgggcaggtagtgacttatgctctgaacaccatcaccaacttgaaagtccaattgatcagaatggcagaagcagagatggtgatacatcaccaacatgttcaagattgtgatgaatcagttctgaccaggctggaggcatggctcactgagcacggatgtgacagactgaagaggatggcggtgagtggagacgactgtgtggtccggcccatcgatgacaggttcggcctggccctgtcccatctcaacgccatgtccaaggttagaaaggacatatctgaatggcagccatcaaaagggtggaatgattgggagaatgtgcccttctgttcccaccacttccatgaactacagctgaaggatggcaggaggattgtggtgccttgccgagaacaggacgagctcattgggagaggaagggtgtctccaggaaacggctggatgatcaaggaaacagcttgcctcagcaaagcctatgccaacatgtggtcactgatgtattttcacaaaagggacatgaggctactgtcattggctgtttcctcagctgttcccacctcatgggttccacaaggacgcacaacatggtcgattcatgggaaaggggagtggatgaccacggaagacatgcttgaggtgtggaacagagtatggataaccaacaacccacacatgcaggacaagacaatggtgaaaaaatggagagatgtcccttatctaaccaagagacaagacaagctgtgcggatcactgattggaatgaccaatagggccacctgggcctcccacatccatttagtcatccatcgtatccgaacgctgattggacaggagaaatacactgactacctaacagtcatggacaggtattctgtggatgctgacctgcaactgggtgagcttatctgaaacaccatctaacaggaataaccgggatacaaaccacgggtggagaaccggactccccacaacctgaaaccgggatataaaccacggctggagaaccgggctccgcacttaaaatgaaacagaaaccgggataaaaactacggatggagaaccggactccacacattgagacagaagaagttgtcagcccagaaccccacacgagttttgccactgctaagctgtgaggcagtgcaggctgggacagccgacctccaggttgcgaaaaacctggtttctgggacctcccaccccagagtaaaaagaacggagcctccgctaccaccctcccacgtggtggtagaaagacggggtctagaggttagaggagaccctccagggaacaaatagtgggaccatattgacgccagggaaagaccggagtggttctctgcttttcctccagaggtctgtgagcacagtttgctcaagaataagcagacctttggatgacaaacacaaaaccact

SEQ ID NO: 168 - DNA, 10940 bp, St. Louis encephalitis virus
agatgttcgcgtcggtgagcggagaggaaacagatttcctttttggaggataataacttaacttgactgcgaacagttttttagcagggaattacccaatgtctaaaaaaccaggaaaacccggtagaaaccgggttgtcaatatgctaaaacgcggcgtatcccgcgtgaaccccttgacggggttgaagaggatacttggaagtctgctggatggccgtggacccgtgcggttcatactagccatcctgacattcttccgatttacagctctacagccaactgaggcgctgaagcgcagatggagggctgtggacaaaagaacggcattgaaacacctgaacggatttaaacgtgacctcggatccatgctagacaccatcaaccggcggccaagcaagaagagaggagggaccagatcgttgctcggattggctgcgctaattggactggcgagttcattgcagttatcaacctatcaggggaaagtgttaatgtcaatcaacaagactgacgctcaaagcgccataaacattcctagtgccaacggagcaaacacttgcattgtgagggctctagatgtgggggtcatgtgcaaagatgacatcacatacctgtgcccagtgctttcagcgggaaatgatcccgaggacattgactgttggtgtgacgtcgaagaggtgtgggtgcactacggcagatgtacgcgcatgggacattcgaggcgtagccgacggtcaatttctgtgcagcaccatggagattccacactggcaacaaagaacacgccatggttggacaccgtgaaaaccaccaaatacttgacaaaagtcgaaaactgggttttgcgcaatcctggatatgccctagttgcgctggcgattggatggatgctaggtagcaacaacacacagagagtggtttttgtgatcatgctgatgctgattgctccggcatacagcttcaactgtctgggaacatcaaacagggactttgtcgagggagccagtggggcaacatggattgacttggtacttgaagggggaagctgtgttacagtgatggcaccagagaaaccaacactggacttcaaggtgatgaagatggaggctaccgagttagccactgtgcgtgagtattgttacgaagcaaccttggacacgctgtcaacagtggcaaggtgccctacaacaggagaggctcacaacaccaaaaggagtgacccaacatttgtctgcaaaagagatgttgtggaccgcggatggggtaacggatgtggcctgtttggaaaagggagcattgacacatgcgctaagttcacatgcaaaaacaaggcaacagggaagacgatcttgagagaaaacatcaagtatgaggttgcaatttttgtgcatggttcaacggactctacgtcacatggcaattactctgagcagattgggaaaaaccaagcggctagattcaccataagcccgcaagcaccgtcctttacggccaacatgggcgagtatggaacagttaccattgattgtgaagcaagatcaggaatcaacacggaggattattatgtcttcactgtcaaggagaagtcatggctagtgaacagggactggtttcacgacttgaaccttccatggacgagccctgccacaactgattggcgcaacagagaaacactggtggaatttgaggaaccgcatgccaccaagcaaactgtagtagccctaggatcgcaagaaggtgccctgcacacagcattggctggagctattccagccactgttagcagctcaaccctaaccttgcaatcagggcatctgaaatgcagagctaagcttgacaaggtcaaaatcaagggaacgacatatggcatgtgtgattctgccttcaccttcagcaagaacccaactgacacagggcacgggacagtgattgtggaactgcagtatactggaagcaacggaccctgccgagttcccatctccgtgactgcaaacctcatggatttgacaccggttggaagactggtcacggtcaatccttttataagcacagggggagcgaacaacaaggtcatgatcgaagttgaaccaccctttggcgattcttacatcgtcgtcggaagaggcaccacccagattaactaccactggcacaaagaaggaagcagcattggtaaggctttggcgaccacatggaaaggagcccaacggctagccgtcttaggggacacagcgtgggactttggatctattggaggagttttcaattcaattggcaaagctgtccaccaagttttcggaggagcgttcaggaccctgttcgggggaatgtcctggatcacacagggactacttggagctcttctcctgtggatggggttgcaggcccgcgacaggagcatctcgctgactctactggctgttggagggattcttatctttctggcaaccagcgtgcaagccgattcgggatgtgcaattgacctacaacgacgtgaattgaaatgtggaggaggcatcttcgtgtacaacgacgttgagaagtggaagagcgactacaagtatttccctctgactccaactggactcgcgcgtgtgattcaagaggcgcatgccaatggcatctgtggcatccgatcaacgtcacggttggagcacttgatgtgggagaacatacagagagagctaaacgcaatctttgaagacaatgagattgacttgtcagttgtagtgcaagaagatcccaaatactacaaaagggctccccgacgcctgaagaagctggaggatgaattggactacggatggaagaaatggggaaaaaccctgtttgtggaacccagacttggaaacaacacatttgttgttgatggacccgagaccaaggagtgtccaacagcaaacagagcatggaacagtttcaaagtggaagactttggatttggcatggtgttcactcgattgtggctcacaatccgggaggaaaacacaacggaatgcgattcggcaatcatcggcacagctataaaaggagacagagctgttcacagtgacctatcgtattggattgagagcaaaaagaatgagacatggcaactggaacgagccgtcatgggagaagtgaaatcttgtacctggccagaaacgcacaccctgtggggtgatggtgttgttgaaagcgaaatgatcatcccggtgacattaggaggtccaaaaagccatcacaacaagagaaacggatactatacacagacaaaaggaccctggagtgaaggagaaataatcctggactttgactactgtccaggaacaacagtcaccgttactgaacattgtggaaacaggggagcgtcgctgcgcacaaccacagcgagtggcaagctggtcactgattggtgttgcaggagctgttccttgccaccactgcgatacaccacaaaagatggatgctggtatggaatggaaatccggccggtgaaggaggaggaagcaaagcttgtgaaatctcgagtgacagctggagttgcaggagggatggaaccattccaacttggtctcctggtagcattcatagccacacaagaagtgctgaaacgcagatggactgggaagctgaccctgacctcactagcagtatgtttggcactgttgatttttggaaacctaacatacatggacctggtgcgatacctggtccttgttggaactgcttttgcggaaatgaacactggaggcgatgtgatccacctagcacttgttgctgtcttcaaagtgcagccagcatttttggcgggtctgtttttaagaatgcagtggagcaaccaggaaaacatcttgatggttattggagcagcttttctccaaatggcggccaatgacttgaagcttgaggtccttccgatactcaacgccatgtccattgcgtggatgctgataagggcaatgaaagaaggtaaagtggcgatgtacgctcttcccatcttgtgtgctttgactccaggaatgaggatggctgggcttgatgtcatcagatgtttgttgttgataattgggattgtaacacttctgaatgaaagaagagaaagtgtggccaagaaaaaaggcggctacttgctcgcagcggccctctgccaagctggagtgtgcagtcccttgattatgatgggaggcttaatcctggctcaccccaacgggaaaaggagttggccggcgagtgaggtcttaactggagttggactgatgtgcgctttggcaggaggtcttctcgagtttgaggaaacctcaatggtggtcccttttgcaatagccggactgatgtatatcacatacaccgtctcaggaaaagccgcagaaatgtggattgaaaaagcagcagacatcacatgggaacagaatgccgagatcaccggaaccagccccaggcttgatgttgaccttgactcacatggcaacttcaagctcctgaacgaccctggagctccagtgcacttgtttgcgctgagattcatactcctgggcttgagtgcacgattccattggttcattccattcggagtactggggttttggctacttggcaaacactcgaagcgaggaggagcattgtgggacgtgccgtcaccaaaagtgtatccaaagtgtgagacaaaaccaggaatctatcgaatcatgactagaggaattttgggcactttccaagccggagtcggtgtgatgcacgaaggagtttttcacacaatgtggcacgcaactgaaggagcagtcctacgaaatggagaaggaagactagatccgtatgcaggagatgtccggaatgatctgatctcgtatggaggtccctggaagctgagtgccacttgggatggaactgaggaggtccaaatgattgcagtagctccggggaaaccagccattaatgtccagacaacaccaggagtgtttaagaccccgctcgggaccattggagccgtgacgcttgatttcccaaaaggaacatcaggttctccaattatcaacaagaaaggggaaatcattgggctctatggaaatggggtattgattggacagggcgaatatgttagtggcatcatccaaggggaaaggacagaagaaccaattccagatgcatacaatgaggaaatgctccggaagagaaaactaacagtactggaattgcatccgggagctggaaagaccagaaaggtgttgccccaaatcatcaaagattgcatccaaaaacgcttgcgaacggccgtgctagctcccactcgggtagtggcttgtgagatcgctgaagcgttaaaaggactgccaatccgttacctaacaccagccgtgaggaatgaacatcagggcaatgagatagttgacgtgatgtgccatgccacgctcacacagaaactgctgacaccgacccgggttcccaactaccaagtgtacatcatggatgaggcccacttcattgatccagcaagcattgctgctcgtgggtatatctcaacaaaagtggaattgggggaagcagctgccatctttatgacggcaactccaccaggaacaaatgacccttttccagattcaaattctcccatactggatgttgaggcccaggttccggataaggcgtggagcaccgggtatgagtggatcaccaacttcacagggaggactgtgtggtttgttcccagtgtgaaaagtgggaacgaaattgccatctgcctacaaaaagcaggaaagcgagtgattcaactaaacaggaaaagctttgacacagaataccctaagacaaagaacaacgaatgggattttgttgtgactactgatatatcagagatgggggctaactttggagcgcacagagtcatcgacagccgcaagtgtgtgaaaccagtcatcttggaagatgatgatcgagtcatcctcaatggacccatggcaatcacatcagcgagcgcagcacagcgcagaggccgcattggaagaaatccttcgcagattggagatgagtaccattatgggggtgcaaccaatgaggacgaccatgatctggccaactggactgaagcaaagattctccttgacaacatatacctcccaaacggactggtggcacaaatgtaccagcccgagcgagataaggttttcaccatggatggggagtttcgattgcgtggagaagaaaggaagaactttgttgagctgatgcgcaacggtgacctcccagtgtggttagcttacaaagtagcctctaatggacacagttaccaagaccgctcatggtgttttacaggacaaaccaacaacacaatcctggaagacaacaacgaagttgaagttttcaccaaaactggagacaggaaaattctcaggccaaagtggatggatgcgcgggtctgctgcgactaccaagcgctcaagtcatttaaagagtttgcagcagggaagagatcagcgctgggcatgatggaggtcatgggtagaatgccaaatcacttctgggaaaagacagttgccgctgcagacacactgtatctcctaggaaccagtgaggcaaacagtagggcacacaaagaggcactggcagaactgccagattccctggaaacgcttctcctgattggaatgctatgcgtcatgtcaatgggtacgttcatttttctcatgaacaggaaaggagttggtaaaatgggactgggagcatttgtgatgactcttgcaacggcattgctttgggcagcagaagttcccggaacgcagatagctggagttttgttgatagtgtttctattgatgattgtgttgattccagaacctgagaagcaacggtcccagactgacaatcaactggctgtcttcttgatatgcatcatgaccctcatgggtgtggtggcggcgaatgaaatgggccttttggaaaaaaccaagtctgacattgccaagttgtttggcagccaacctggatcggtgggatttgcaacaagaacaacaccttgggatatcagccttgacatcaaaccagccaccgcatgggcactgtatgcagcagcaacaatggtcatgacacccttgataaagcatctcatcacgacacagtacgtgaatttttcactaacagccattgcatcccaagctggtgtactattaggtttgaccaatggaatgccattcactgctatggatctatcggtgccattattggtgctagggtgttggaatcagatgaccctgccaagtttggccgttgcagtgatgcttttggctatccactatgcattcatgatcccaggctggcaggctgaagcaatgagagcagcccagcggagaacagcggctggcattatgaaaaacgctgtggtcgacgggattgtagcaaccgacataccagacctgtcaccggcgaccccaatgacagagaagaaaatgggtcaaatcctgctcatcgctgcagcagtgttagctgtgctcgtccggcctgggatctgttcgatcaaagaatttggggtcttagggtcagcagcccttgtgacgctaatcgaaggaacggccggagttgtctggaattgcacaacagcggttggcctctgtaacctcatgaggggagggtggttagctggaatgtctatcacgtggacagtctacaagaacgtggacaagcccaagggaaagcgtggaggaggaaaaggagccactcttggagagatctggaagtcaagactgaatcagttgacacgagccgaattcatggcatacaggaaagatggaatcgtggaagtagacagagcccccgccaggaaagccaggagagaagggcgtctcacaggtggccacccagtgtccagagggtcagcaaaattaagatggataacagaaagaggattcgtcaaacccatgggaaaggttgttgacttaggctgtggacgaggagggtggagctactactgcgcaaccctgaagcatgttcaagaagtgaaaggattcacaaagggcggaccaggccatgaagaaccgcagctcatgcaaagctatggatggaatctggtccacatgaaaagtggagtggacgtgttccataagccagctgagccagctgacactgtgctctgtgacattggagagtcaaacccaagctgtgaggtggaggaagcccgaacagcaagagtgttggacatggttgaggaatggttgaagaaaggagccactgagttctgcataaaagtcctgtgtccatacacgcccaaaatcattgagaagttggaaaaactgcaacggaagtatggaggaggcctggtcagagtccccttgtctagaaactcgacacatgagatgtactgggttagtggggcggctggaaacatcatacacgccgtcagcatgactagccaggtactcatggggaggatggacaaacagaacagaagtgggcctcgctacgaggaagatgtgaatttgggaagcggaacgcgctctgttggaaagctcacagagaagccagacccccggaaagttggggaaaggatacggagattgagggaagaataccaacaaacgtggacgtatgaccacaacaacccatatagaacgtggaactatcatggaagttatgaagtgaaaccaacyggatcagctagctcgatggtgaacggagtcgtgaggctcctttcaaaaccatgggatatgatcacaaacgtgaccactatggccatgactgacaccacgccctttggtcaacaaagggtgttcaaagaaaaggttgacacaaaggctcccgaaccaccactaggagtcgcccaaatcatggatgtgacaacagactggctgtgggacttcgttgcccgggaaaagaaaccaagagtttgtaccccagaagaattcaaagcaaaggtgaacagccatgcagctctgggagccatgtttgaagagcaaaatcagtggagtagcgcccgtgaagctgtggaagatccaaagttctgggaaatggttgatgaagaaagagaagctcatcttaaaggagagtgtcacacatgcatctacaacatgatggggaagcgtgagaaaaagactggagagtttgggaaggctaaaggaagcagagccatttggtacatgtggttgggagctcggttcttggagtttgaagcccttgggttcctaaatgaagaccactggatgagccgcgagaactcctatggaggagttgaggggaaaggactccagaaacttggatacatcctgcaagaaatctcccaaattccaggaggaaagatgtacgcagatgacacagccggctgggacacccggatcacaaaagaagacttgaaaaatgaagcaaaaataacaaagagaatggaagaaaggcatagaaagcttgcggaggcgatcattgatctaacctaccgccataaggtggtgaaagtcatgagaccagggcctgatggtaaaacctacatggatgtcatctccagagaagaccaaaggggcagtggacaggtggtcacatatgccctgaacaccttcaccaacctggccgttcaactgataagatgcatggaggctgaaggggtggtagatgaggatgacattacgagagtgagacttggacggttggccaaagcggtcgagtggctgaggaagaatggacctgaacgattgagcagaatggcagtgagtggggacgactgtgttgtgaaaccaattgatgacagatttgccactgcactccactttctcaacaacatgtcaaagatcagaaaggacattcaggagtggaaaccttcaacaggctggcacaactggcaagaggtgcccttctgctcacaccacttcaatgaactaatgctgaaggatgggcggaccatcgtggtgccatgtaggagccaggatgagctgattggcagagccagaatctcaccaggagcaggatggaatgtgaaagagacagcctgcttgagcaaatcctatgctcagatgtggttgcttatgtacttccacaggcgggacctcagaatgatggcaaatgccatttgttcagctgtcccagtcaactgggtcccaactggacgtaccacatggtcaattcatgggaagggcgaatggatgacaacagaagacatgttgagtgtctggaaccgtgtgtggattgaagagaatgaatacatgaaagacaaaacaccattggcggcttggaacgacattccatacctaggaaagagagaggacatctggtgtggaagccttatcggaacaaggaccagagccacctgggctgagaacatctacgctccaatcatgcagatccgcaacctcatcggggaagaggagtacagagactacatggttgcccaaaacagatttggtagggaagaaactcatgtggtaggaggagtgctgtagattgaaatgtaaatagtgtaaataaataaaaacaggtaagtcaggccaatcagttttgccaccggatgtcaggtaaacggtgctgtctgtaacctggccccaggcgactgggttatcaaagccaacccggctgggtgcaaagcccctcattccgactcgggagggtccctggcacgtaggctggagaggacgcacaagtcagaccagaaatgccacctgaaagcatgctaaaggtgctgtctgtacatgccccaggaggactgggttaacaaagcttaacagccccagcggcccaaaccatggagtgcgtgaccatggcgtaaggactagaggttagaggagaccccgctgtaacttggcaaggcccaaacccgctcaaagctgtagagacgggggaaggactagaggttagaggagaccccttgccgttaacgcaaacaacagcatattgacacctggaaagacaggagatcccctgctttttcaacaccagccacaaggcacagagcgccgtaaagtgtggctggtggtgaaaaaatcacaggatct

SEQ ID NO: 169 - DNA, 11029 bp, West Nile virus
agtagttcgcctgtgtgagctgacaaacttagtagtgtttgtgaggattaacaacaattaacacagtgcgagctgtttcttagcacgaagatctcgatgtctaagaaaccaggagggcccggcaagagccgggctgtcaatatgctaaaacgcggaatgccccgcgtgttgtccttgattggactgaagagggctatgttgagcctgatcgacggcaaggggccaatacgatttgtgttggctctcttggcgttcttcaggttcacagcaattgctccgacccgagcagtgctggatcgatggagaggtgtgaacaaacaaacagcgatgaaacaccttctgagttttaagaaggaactagggaccttgaccagtgctatcaatcggcggagctcaaaacaaaagaaaagaggaggaaagaccggaattgcagtcatgattggcctgatcgccagcgtaggagcagttaccctctctaacttccaagggaaggtgatgatgacggtaaatgctactgacgtcacagatgtcatcacgattccaacagctgctggaaagaacctatgcattgtcagagcaatggatgtgggatacatgtgcgatgatactatcacttatgaatgcccagtactgtcggctggtaatgatccagaagacatcgactgttggtgcacaaagtcagcagtctacgtcaggtatggaagatgcaccaagacacgccactcaagacgcagtcggaggtcactgacagtgcagacacacggagaaagcactctagcgaacaagaagggggcttggatggacagcaccaaggccacaaggtatttggtaaaaacagaatcatggatcttgaggaaccctggatatgccctggtggcagccgtcattggttggatgcttgggagcaacaccatgcagagagttgtgtttgtcgtgctattgcttttggtggccccagcttacagcttcaactgccttggaatgagcaacagagacttcttggaaggagtgtctggagcaacatgggtggatttggttctcgaaggcgacagctgcgtgactatcatgtctaaggacaagcctaccatcgatgtgaagatgatgaatatggaggcggccaacctggcagaggtccgcagttattgctatttggctaccgtcagcgatctctccaccaaagctgcgtgcccgaccatgggagaagctcacaatgacaaacgtgctgacccagcttttgtgtgcagacaaggagtggtggacaggggctggggcaacggctgcggactatttggcaaaggaagcattgacacatgcgccaaatttgcctgctctaccaaggcaataggaagaaccatcttgaaagagaatatcaagtacgaagtggccatttttgtccatggaccaactactgtggagtcgcacggaaactactccacacaggttggagccactcaggcagggagactcagcatcactcctgcggcgccttcatacacactaaagcttggagaatatggagaggtgacagtggactgtgaaccacggtcagggattgacaccaatgcatactacgtgatgactgttggaacaaagacgttcttggtccatcgtgagtggttcatggacctcaacctcccttggagcagtgctggaagtactgtgtggaggaacagagagacgttaatggagtttgaggaaccacacgccacgaagcagtctgtgatagcattgggctcacaagagggagctctgcatcaagctttggctggagccattcctgtggaattttcaagcaacactgtcaagttgacgtcgggtcatttgaagtgtagagtgaagatggaaaaattgcagttgaagggaacaacctatggcgtctgttcaaaggctttcaagtttcttgggactcccgcagacacaggtcacggcactgtggtgttggaattgcagtacactggcacggatggaccttgcaaagttcctatctcgtcagtggcttcattgaacgacctaacgccagtgggcagattggtcactgtcaacccttttgtttcagtggccacggccaacgctaaggtcctgattgaattggaaccaccctttggagactcatacatagtggtgggcagaggagaacaacagatcaatcaccattggcacaagtctggaagcagcattggcaaagcctttacaaccaccctcaaaggagcgcagagactagccgctctaggagacacagcttgggactttggatcagttggaggggtgttcacctcagttgggaaggctgtccatcaagtgttcggaggagcattccgctcactgttcggaggcatgtcctggataacgcaaggattgctgggggctctcctgttgtggatgggcatcaatgctcgtgataggtccatagctctcacgtttctcgcagttggaggagttctgctcttcctctccgtgaacgtgcacgctgacactgggtgtgccatagacatcagccggcaagagctgagatgtggaagtggagtgttcatacacaatgatgtggaggcttggatggaccggtacaagtattaccctgaaacgccacaaggcctagccaagatcattcagaaagctcataaggaaggagtgtgcggtctacgatcagtttccagactggagcatcaaatgtgggaagcagtgaaggacgagctgaacactcttttgaaggagaatggtgtggaccttagtgtcgtggttgagaaacaggagggaatgtacaagtcagcacctaaacgcctcaccgccaccacggaaaaattggaaattggctggaaggcctggggaaagagtattttatttgcaccagaactcgccaacaacacctttgtggttgatggtccggagaccaaggaatgtccgactcagaatcgcgcttggaatagcttagaagtggaggattttggatttggtctcaccagcactcggatgttcctgaaggtcagagagagcaacacaactgaatgtgactcgaagatcattggaacggctgtcaagaacaacttggcgatccacagtgacctgtcctattggattgaaagcaggctcaatgatacgtggaagcttgaaagggcagttctgggtgaagtcaaatcatgtacgtggcctgagacgcataccttgtggggcgatggaatccttgagagtgacttgataataccagtcacactggcgggaccacgaagcaatcacaatcggagacctgggtacaagacacaaaaccagggcccatgggacgaaggccgggtagagattgacttcgattactgcccaggaactacggtcaccctgagtgagagctgcggacaccgtggacctgccactcgcaccaccacagagagcggaaagttgataacagattggtgctgcaggagctgcaccttaccaccactgcgctaccaaactgacagcggctgttggtatggtatggagatcagaccacagagacatgatgaaaagaccctcgtgcagtcacaagtgaatgcttataatgctgatatgattgacccttttcagttgggccttctggtcgtgttcttggccacccaggaggtccttcgcaagaggtggacagccaagatcagcatgccagctatactgattgctctgctagtcctggtgtttgggggcattacttacactgatgtgttacgctatgtcatcttggtgggggcagctttcgcagaatctaattcgggaggagacgtggtacacttggcgctcatggcgaccttcaagatacaaccagtgtttatggtggcatcgtttctcaaagcgagatggaccaaccaggagaacattttgttgatgttggcggctgttttctttcaaatggcttatcacgatgcccgccaaattctgctctgggagatccctgatgtgttgaattcactggcggtagcttggatgatactgagagccataacattcacaacgacatcaaacgtggttgttccgctgctagccctgctaacacccgggctgagatgcttgaatctggatgtgtacaggatactgctgttgatggtcggaataggcagcttgatcagggagaagaggagtgcagccgcaaaaaagaaaggagcaagtctgctatgcttggctctagcctcaacaggacttttcaaccccatgatccttgctgctggactgattgcatgtgatcccaaccgtaaacgcggatggcccgcaactgaagtgatgacagctgtcggcctaatgtttgccatcgtcggagggctggcagagcttgacattgactccatggccattccaatgactatcgcggggctcatgtttgctgctttcgtgatttctgggaaatcaacagatatgtggattgagagaacggcggacatttcctgggaaagtgatgcagaaattacaggctcgagcgaaagagttgatgtgcggcttgatgatgatggaaacttccagctcatgaatgatccaggagcaccttggaagatatggatgctcagaatggtctgtctcgcgattagtgcgtacaccccctgggcaatcttgccctcagtagttggattttggataactctccaatacacaaagagaggaggcgtgttgtgggacactccctcaccaaaggagtacaaaaagggggacacgaccaccggcgtctacaggatcatgactcgtgggctgctcggcagttatcaagcaggagcgggcgtgatggttgaaggtgttttccacaccctttggcatacaacaaaaggagccgctttgatgagcggagagggccgcctggacccatactggggcagtgtcaaggaggatcgactttgttacggaggaccctggaaattgcagcacaagtggaacgggcaggatgaggtgcagatgattgtggtggaacctggcaagaacgttaagaacgtccagacgaaaccaggggtgttcaaaacacctgaaggagaaatcggggccgtgactttggacttccccactggaacatcaggctcaccaatagtggacaaaaacggtgatgtgattgggctttatggcaatggagtcataatgcccaacggctcatacataagcgcgatagtgcagggtgaaaggatggatgagccaatcccagccggattcgaacctgagatgctgaggaaaaaacagatcactgtactggatctccatcccggcgccggtaaaacaaggaggattctgccacagatcatcaaagaggccataaacagaagactgagaacagccgtgctagcgccaaccagggttgtggctgctgagatggctgaagcactgagaggactgcccatccggtaccagacatccgcagtgcccagagaacataatggaaatgagattgttgatgtcatgtgtcatgctaccctcacccacaggctgatgtctcctcacagggtgccgaactacaacctgttcgtgatggatgaggctcatttcaccgacccagctagcattgcagcaagaggttacatttccacaaaggtcgagctaggggaggcggcggcaatattcatgacagccaccccaccaggcacttcagatccattcccagagtccaattcaccaatttccgacttacagactgagatcccggatcgagcttggaactctggatacgaatggatcacagaatacaccgggaagacggtttggtttgtgcctagtgtcaagatggggaatgagattgccctttgcctacaacgtgctggaaagaaagtagtccaattgaacagaaagtcgtacgagacggagtacccaaaatgtaagaacgatgattgggactttgttatcacaacagacatatctgaaatgggggctaacttcaaggcgagcagggtgattgacagccggaagagtgtgaaaccaaccatcataacagaaggagaagggagagtgatcctgggagaaccatctgcagtgacagcagctagtgccgcccagagacgtggacgtatcggtagaaatccgtcgcaagttggtgatgagtactgttatggggggcacacgaatgaagacgactcgaacttcgcccattggactgaggcacgaatcatgctggacaacatcaacatgccaaacggactgatcgctcaattctaccaaccagagcgtgagaaggtatataccatggatggggaataccggctcagaggagaagagagaaaaaactttctggaactgttgaggactgcagatctgccagtttggctggcttacaaggttgcagcggctggagtgtcataccacgaccggaggtggtgctttgatggtcctaggacaaacacaattttagaagacaacaacgaagtggaagtcatcacgaagcttggtgaaaggaagattctgaggccgcgctggattgatgccagggtgtactcggatcaccaggcactaaaggcgttcaaggacttcgcctcgggaaaacgttctcagatagggctcattgaggttctgggaaagatgcctgagcacttcatggggaagacatgggaagcacttgacaccatgtacgttgtggccactgcagagaaaggaggaagagctcacagaatggccctggaggaactgccagatgctcttcagacaattgccttgattgccttattgagtgtgatgaccatgggagtattcttcctcctcatgcagcggaagggcattggaaagataggtttgggaggcgctgtcttgggagtcgcgacctttttctgttggatggctgaagttccaggaacgaagatcgccggaatgttgctgctctcccttctcttgatgattgtgctaattcctgagccagagaagcaacgttcgcagacagacaaccagctagccgtgttcctgatttgtgtcatgacccttgtgagcgcagtggcagccaacgagatgggttggctagataagaccaagagtgacataagcagtttgtttgggcaaagaattgaggtcaaggagaatttcagcatgggagagtttcttctggacttgaggccggcaacagcctggtcactgtacgctgtgacaacagcggtcctcactccactgctaaagcatttgatcacgtcagattacatcaacacctcattgacctcaataaacgttcaggcaagtgcactattcacactcgcgcgaggcttccccttcgtcgatgttggagtgtcggctctcctgctagcagccggatgctggggacaagtcaccctcaccgttacggtaacagcggcaacactccttttttgccactatgcctacatggttcccggttggcaagctgaggcaatgcgctcagcccagcggcggacagcggccggaatcatgaagaacgctgtagtggatggcatcgtggccacggacgtcccagaattagagcgcaccacacccatcatgcagaagaaagttggacagatcatgctgatcttggtgtctctagctgcagtagtagtgaacccgtctgtgaagacagtacgagaagccggaattttgatcacggccgcagcggtgacgctttgggagaatggagcaagctctgtttggaacgcaacaactgccatcggactctgccacatcatgcgtgggggttggttgtcatgtctatccataacatggacactcataaagaacatggaaaaaccaggactaaaaagaggtggggcaaaaggacgcaccttgggagaggtttggaaagaaagactcaaccagatgacaaaagaagagttcactaggtaccgcaaagaggccatcatcgaagtcgatcgctcagcggcaaaacacgccaggaaagaaggcaatgtcactggagggcatccagtctctaggggcacagcaaaactgagatggctggtcgaacggaggtttctcgaaccggtcggaaaagtgattgaccttggatgtggaagaggcggttggtgttactatatggcaacccaaaaaagagtccaagaagtcagagggtacacaaagggcggtcccggacatgaagagccccaactagtgcaaagttatggatggaacattgtcaccatgaagagtggagtggatgtgttctacagaccttctgagtgttgtgacaccctcctttgtgacatcggagagtcctcgtcaagtgctgaggttgaagagcataggacgattcgggtccttgaaatggttgaggactggctgcaccgagggccaagggaattttgcgtgaaggtgctctgtccctacatgccgaaagtcatagagaagatggagctgctccaacgccggtatggggggggactggtcagaaacccactctcacggaattccacgcacgagatgtattgggtgagtcgagcttcaggcaatgtggtacattcagtgaatatgaccagccaggtgctcctaggaagaatggaaaaaaggacctggaagggaccccaatacgaggaagatgtaaacttgggaagtggaaccagggcggtgggaaaacccctgctcaactcagacaccagtaaaatcaagaacaggattgaacgactcaggcgtgagtacagttcgacgtggcaccacgatgagaaccacccatatagaacctggaactatcacggcagttatgatgtgaagcccacaggctccgccagttcgctggtcaatggagtggtcaggctcctctcaaaaccatgggacaccatcacgaatgttaccaccatggccatgactgacactactcccttcgggcagcagcgagtgttcaaagagaaggtggacacgaaagctcctgaaccgccagaaggagtgaagtacgtgctcaacgagaccaccaactggttgtgggcgtttttggccagagaaaaacgtcccagaatgtgctctcgagaggaattcataagaaaggtcaacagcaatgcagctttgggtgccatgtttgaagagcagaatcaatggaggagcgccagagaagcagttgaagatccaaaattttgggagatggtggatgaggagcgcgaggcacatctgcggggggaatgtcacacttgcatttacaacatgatgggaaagagagagaaaaaacccggagagttcggaaaggccaagggaagcagagccatttggttcatgtggctcggagctcgctttctggagttcgaggctctgggttttctcaatgaagaccactggcttggaagaaagaactcaggaggaggtgtcgagggcttgggcctccaaaaactgggttacatcctgcgtgaagttggcacccggcctgggggcaagatctatgctgatgacacagctggctgggacacccgcatcacgagagctgacttggaaaatgaagctaaggtgcttgagctgcttgatggggaacatcggcgtcttgccagggccatcattgagctcacctatcgtcacaaagttgtgaaagtgatgcgcccggctgctgatggaagaaccgtcatggatgttatctccagagaagatcagagggggagtggacaagttgtcacctacgccctaaacactttcaccaacctggccgtccagctggtgaggatgatggaaggggaaggagtgattggcccagatgatgtggagaaactcacaaaagggaaaggacccaaagtcaggacctggctgtttgagaatggggaagaaagactcagccgcatggctgtcagtggagatgactgtgtggtaaagcccctggacgatcgctttgccacctcgctccacttcctcaatgctatgtcaaaggttcgcaaagacatccaagagtggaaaccgtcaactggatggtatgattggcagcaggttccattttgctcaaaccatttcactgaattgatcatgaaagatggaagaacactggtggttccatgccgaggacaggatgaattggtaggcagagctcgcatatctccaggggccggatggaacgtccgcgacactgcttgtctggctaagtcttatgcccagatgtggctgcttctgtacttccacagaagagacctgcggctcatggccaacgccatttgctccgctgtccctgtgaattgggtccctaccggaagaaccacgtggtccatccatgcaggaggagagtggatgacaacagaggacatgttggaggtctggaaccgtgtttggatagaggagaatgaatggatggaagacaaaaccccagtggagaaatggagtgacgtcccatattcaggaaaacgagaggacatctggtgtggcagcctgattggcacaagagcccgagccacgtgggcagaaaacatccaggtggctatcaaccaagtcagagcaatcatcggagatgagaagtatgtggactacatgagttcactaaagagatatgaagacacaactttggttgaggacacagtactgtagatatttaatcaattgtaaatagacaatataagtatgcataaaagtgtagttttatagtagtatttagtggtgttagtgtaaatagttaagaaaattttgaggagaaagtcaggccgggaagttcccgccaccggaagttgagtagacggtgctgcctgcgactcaaccccaggaggactgggtgaacaaagccgcgaagtgatccatgtaagccctcagaaccgtctcggaaggaggaccccacatgttgtaacttcaaagcccaatgtcagaccacgctacggcgtgctactctgcggagagtgcagtctgcgatagtgccccaggaggactgggttaacaaaggcaaaccaacgccccacgcggccctagccccggtaatggtgttaaccagggcgaaaggactagaggttagaggagaccccgcggtttaaagtgcacggcccagcctggctgaagctgtaggtcaggggaaggactagaggttagtggagaccccgtgccacaaaacaccacaacaaaacagcatattgacacctgggatagactaggagatcttctgctctgcacaaccagccacacggcacagtgcgccgacaatggtggctggtggtgcgagaacacaggatct

SEQ ID NO: 170 - DNA, 10962 bp, West Nile virus
agtagttcgcctgtgtgagctgacaaacttagtagtgtttgtgaggattaacaacaattaacacagtgcgagctgtttcttggcacgaagatctcgatgtctaagaaaccaggagggcccggtaaaaaccgggctgtcaatatgctaaaacgcggtatgccccgcggattgtccttgataggactaaagagggctatgctgagtctgattgacgggaagggcccaatacgtttcgtgttggctcttttggcgtttttcagattcactgcaatcgctccgactcgtgcggtgctggacagatggagaggcgtcaacaaacaaacagcaatgaagcatctcttgagtttcaagaaagaactaggaactctgaccagtgccatcaaccgccggagcacaaaacaaaagaaaagaggaggcacagcgggctttactatcttgcttgggctgatcgcctgtgctggagctgtgaccctctcgaacttccagggcaaagtgatgatgacagtcaatgcaaccgatgtcactgacgtgattaccattccaacagctgctgggaaaaacctgtgcatcgtaagggctatggacgtaggatacctttgtgaggatactatcacttatgaatgtccggtcctagctgctggaaatgaccctgaagacattgactgctggtgcacgaaatcatctgtttacgtgcgctatggaagatgcacaaaaactcggcattcccgtcgaagcagaaggtctctgacagtccagacacatggagaaagtacactggccaacaagaaaggagcttggttggacagcacaaaagccacgagatatctggtgaagacagaatcatggatactgagaaacccgggctacgccctcgttgcagctgtcattggatggatgctaggaagcaacacaatgcaacgcgtcgtgtttgccattctattgctcctggtggcaccagcatacagcttcaactgtttaggaatgagtaacagagacttcctggagggagtgtctggagctacatgggttgatctggtactggaaggcgatagttgtgtgaccataatgtcaaaagacaagccaaccattgatgtcaaaatgatgaacatggaagcagccaacctcgcagatgtgcgcagttactgttacctagcttcggtcagtgacttgtcaacaagagctgcgtgtccaaccatgggtgaagcccacaacgagaaaagagctgaccccgccttcgtttgcaagcaaggcgttgtggacagaggatggggaaatggctgcggactgtttggaaaggggagcattgacacatgtgcgaagtttgcctgtacaaccaaagcaactggatggatcatccagaaggaaaacatcaagtatgaggttgccatatttgtgcatggcccgacgaccgttgaatctcatggcaagataggggccacccaggctggaagattcagtataactccatcggcgccatcttacacgctaaagttgggtgagtatggtgaggttacggttgattgtgagccacggtcaggaatagacaccagcgcctattacgttatgtcagttggtgagaagtccttcctggttcaccgagaatggtttatggatctgaacctgccatggagcagtgctggaagcaccacgtggaggaaccgggaaacactgatggagtttgaagaacctcatgccaccaaacaatctgttgtggctctagggtcgcaggaaggtgcgttgcaccaagctctggccggagcgattcctgttgagttctcaagcaacactgtgaagttgacatcaggacatctgaagtgtcgggtgaagatggagaagttgcagctgaagggaacaacatatggagtatgttcaaaagcgttcaaattcgctaggactcccgctgacactggccacggaacggtggtgttggaactgcaatataccggaacagacggtccctgcaaagtgcccatttcttccgtagcttccctgaatgacctcacacctgttggaagactggtgaccgtgaatccatttgtgtctgtggccacagccaactcgaaggttttgattgaactcgaacccccgtttggtgactcttacatcgtggtgggaagaggagaacagcagataaaccatcactggcacaaatctgggagcagcattggaaaggcctttaccaccacactcagaggagctcaacgactcgcagctcttggagatactgcttgggattttggatcagttggaggggttttcacctcagtggggaaagccatacaccaagtctttggaggagcttttagatcactctttggagggatgtcctggatcacacagggacttctgggagctcttctgttgtggatgggaatcaatgcccgtgacaggtcaattgctatgacgtttcttgcggttggaggagttttgctcttcctttcggtcaacgtccatgctgacacaggctgtgccattgatattggcaggcaagagctccggtgcggaagtggagtgtttatccacaacgatgtggaagcctggatggatcgttacaagttctacccggagacgccacagggcctagcaaaaattatccagaaagcacatgcagaaggagtctgcggcttgcgttccgtttccagactcgagcaccaaatgtgggaagccattaaggatgagctgaacaccctgttgaaagagaatggagtcgacttgagtgtcgtggtggaaaaacagaatgggatgtacaaagcagcaccaaaacgtttggctgccaccaccgaaaaactggagatgggttggaaggcttggggcaagagtatcatctttgcgccagaactagctaacaacacctttgtcatcgacggtcctgagactgaggaatgcccaacggccaaccgagcatggaacagtatggaggtagaggactttggatttggactgacaagcactcgcatgttcctgaggattcgggaaacgaacacaacggaatgcgactcgaagatcataggaaccgccgtcaagaacaacatggctgtgcatagtgatctatcatactggatagagagcggactcaacgacacctggaagcttgagagggcggttctaggagaagtcaaatcatgcacctggccagaaacccacactctgtggggtgatggagttctggaaagtgatctcatcatacccatcaccttggcaggacccagaagcaaccacaacaggagaccagggtacaaaactcagaaccaaggcccatgggatgaggggcgcgtcgagattgactttgactattgcccaggaacaacagtaactataagtgacagttgcgaacaccgtggacctgcggcacgcacaaccactgagagtgggaagctcatcacagactggtgctgcagaagttgcaccctccctccactgcgcttccagactgagaatggctgttggtatggaatggaaattcgacctacgcggcacgacgaaaagaccctcgtgcaatcgagagtgaatgcatacaacgccgacatgattgatccttttcagttgggccttatggtcgtgttcttggccacccaggaggtccttcgcaagaggtggacggccaagatcagcattccagctatcatgcttgcactcctagtcctagtgtttgggggtattacgtacactgatgtcctgcgatatgtcattctcgtcggcgccgcgtttgctgaagcaaactcaggaggagacgtcgtgcacttggcacttatggctacattcaagattcaaccagtctttctggtggcttcctttttgaaggcaaggtggaccaaccaagagagtattttgctcatgcttgcagctgctttcttccaaatggcttactatgacgccaagaatgttctgtcatgggaagtgcctgacgttttgaactctctctccgttgcgtggatgattctcagagctataagcttcaccaacacttcaaatgtggtggtgccgctgctggcccttttgacacctggattgaaatgcttaaaccttgatgtgtacagaattttgctactcatggttggagttggaagcctcatcaaagaaaaaaggagctctgcagcaaaaaagaaaggagcttgcctcatctgcctagcgctggcgtctacaggagtgttcaatccaatgatacttgcagctgggctaatggcttgcgaccccaaccgcaagcggggctggcctgctacagaagtgatgactgcagttggactcatgtttgccatcgttgggggtctggcagaacttgacatagattctatggctatccccatgaccatcgccggacttatgttcgcggcatttgtcatctctggaaagtcaacagacatgtggattgagaggacggctgacattacttgggagagtgatgctgaaatcacaggctctagcgaaagagtagatgtgaggctggatgatgatggaaattttcaactgatgaatgaccccggggcaccatggaaaatttggatgcttaggatggcctgcctggcgataagtgcctacacaccttgggcaattctcccctcggtcatcggattctggataacccttcagtacacaaagagaggaggtgttctttgggacacaccatcacccaaggagtacaagaagggtgataccaccactggcgtttacagaatcatgactcgaggtctgcttggcagttaccaagctggagccggagtgatggtagagggggtgttccacacactatggcacaccactaagggagctgctctcatgagtggtgagggacgtctggatccctactgggggagcgtgaaagaggaccgactttgctatggggggccatggaaactccaacataaatggaatggacatgatgaggtccaaatgattgtcgtggagccagggaaaaatgtgaaaaacgtccagaccaagcccggagtgtttaagacaccagaaggagaaattggggcagttacgctagactatcctaccggaacgtcaggttcccccattgtagacaaaaatggagatgtgattggattgtatgggaacggcgtcatcatgcctaatggttcatacataagcgccattgtgcaaggagagagaatggaagaaccggcaccagctggcttcgaacctgaaatgttgaggaagaaacagatcactgtccttgatctgcaccccggagcaggaaagacacgcaagatacttccccaaatcatcaaggaggccatcaacaaaagattgaggacggctgtgctggcacccaccagggtcgttgctgctgagatgtctgaggccctgagaggacttcccattcggtaccaaacctcagcagtgcacagagagcacagtggaaatgagatcgttgatgtcatgtgccatgccaccctcacacacaggctgatgtctccacacagagtccccaactacaacctgttcataatggatgaagcccatttcacggatccagcgagcatcgcagccagaggatacatagcaaccaaggttgaattgggcgaagccgccgcgattttcatgacggcaacgccacccgggacttctgacccctttccagagtctaatgctcctatctcggacatgcaaacagagatcccagacagagcctggaacactggatatgaatggataactgagtatgttggaaagaccgtttggtttgttccaagtgtgaaaatgggaaatgagattgccctctgtctgcaacgggcggggaagaaggttatccagctgaacagaaagtcctatgagacagagtaccccaagtgtaagaacgatgattgggattttgtcatcaccacagacatatcagaaatgggagccaacttcaaggcgagcagagtgatcgacagccgcaaaagcgtgaaacccaccatcattgaggaaggtgatggaagagtcatcctgggggaaccctcagccatcacggctgccagcgctgctcagcggagaggacgcataggaagaaacccatcacaagttggtgatgagtattgctatggagggcacacaaatgaggatgattccaactttgctcactggacagaggctcgcatcatgctagacaacatcaacatgccgaatggtctggtggctcaactatatcagcctgagcgcgagaaggtgtacaccatggacggggaatacaggctcagaggggaagaacggaagaacttccttgaattcctgagaacagctgatttaccagtctggctcgcttacaaagtggcagcagcaggaatatcataccatgaccggaaatggtgctttgatggacctcgaaccaacacgattcttgaagacaacaatgaagttgaagtcatcacgaagttgggtgagagaaagatcctaagacccaggtgggcagatgctagagtgtactcagaccatcaagctctaaagtccttcaaagattttgcatcggggaaacgatcacaaatcgggctcgttgaggtgctcgggagaatgcctgaacacttcatggtgaaaacttgggaggcattggacacgatgtatgtggtggcgaccgctgaaaaaggaggccgagctcacaggatggctcttgaggagctaccggacgcccttcagacaatagttttgattgcactattgagtgtgatgtccttaggtgtgttttttctactcatgcaaaggaagggcattggtaagattggcttgggaggagtaatcttaggagctgccacattcttctgctggatggctgaagtcccaggaacgaaaatagcaggcatgctcctgctttccctgctgctcatgattgttttgattccggagccggaaaagcagcgctcacagactgataaccagctcgccgtgttcttgatctgtgtgctcacactggtcggcgccgtggctgccaatgaaatgggctggctggacaagaccaagaatgacattggcagcctgttggggcacaggccagaagctagagagacgaccctgggagttgagagcttcttacttgatctgcggccggccacggcatggtcgctctatgccgtaacgacagccgttctcacccctttgctgaagcatctaatcacgtcagactacatcaacacttcgttgacctcaataaacgtccaagccagcgcgttgttcactttggccagaggcttcccttttgtggacgttggtgtgtcagctctcttgctggcggtcgggtgctggggtcaggtgactctgactgtgactgtgactgcagctgctctgctcttttgccactatgcttacatggtgccaggctggcaagcggaagccatgcgatctgcccagcggcggacagctgctggcatcatgaaaaatgtagtggtggatgggatcgtggccactgatgtacctgaacttgaacgaacaactccagtcatgcagaaaaaagttggacagatcatattgatcttggtatcaatggccgcggtggtcgtcaatccatcagtgagaaccgtcagagaggccggaattctgactacagcagcagcagtcaccctatgggagaatggtgctagttcagtgtggaatgcaacgacagctattggcctttgtcacatcatgcgaggaggatggctctcgtgtctctccatcatgtggactctcatcaaaaacatggagaaaccaggcctcaagaggggtggagccaaaggacgcacgctaggggaagtttggaaggagagactcaaccacatgacgaaggaagaatttaccagatacagaaaagaagccatcactgaagttgaccgctccgcagcaaaacatgctaggagagagggaaacatcactggaggccacccagtctcacggggaaccgcgaaattacggtggttagtggaaaggcgtttcctcgagccagtgggaaaggttgtggatctcgggtgtggtagaggcggctggtgctattacatggctacccagaagagggtacaggaagtgaaagggtacacgaaaggaggacctggccatgaagaaccacaactggtgcagagctatggttggaatattgttaccatgaagagtggagtcgacgtcttctacagaccatcagaagcgagcgacacactgctctgtgacattggagagtcatcgtcaagtgccgaggtagaagaacaccgcaccgtccgtgtcctggagatggtggaagattggttgcacagaggaccgaaggaattctgcatcaaagtgctatgcccttacatgcccaaagtgattgagaagatggaaacactccaaaggcgatatggaggtggccttataagaaaccccctttcacgcaactctacccatgagatgtactgggtgagccacgcttcaggcaatatcgtccactccgtcaacatgacaagccaggtgcttctggggaggatggaaaagaaaacatggaagggaccccagtttgaggaagatgtcaacttgggaagtggaacgcgggcagtagggaagcctctcctcaattctgatactagcaagatcaagaaccgaattgagaggctgaagaaagaatacagctccacatggcaccaggatgcgaaccacccctacaggacctggaactaccacggaagctatgaagtgaaaccaaccggctcagccagctcccttgtgaatggggtagtcagattactctcaaaaccatgggacactatcaccaatgtgaccacgatggccatgacagacaccactcctttcggtcaacaacgagtgttcaaggaaaaggtggacacaaaggctccagagcctccagaaggagtcaaatacgtcctcaatgagaccacgaactggctgtgggcttttttagcccgcgataagaaacccaggatgtgttcccgggaggaatttattggaaaagtcaacagtaatgccgccctaggagcgatgtttgaagaacagaaccaatggaagaacgcccgggaagctgtagaggatccaaagttttgggagatggtggatgaggagcgtgaagcgcatctccgtggagaatgcaacacctgcatctacaacatgatgggaaagagagagaagaagcctggagagttcggcaaagctaaaggcagcagagccatctggttcatgtggctgggggcccgcttcctggagtttgaagctctcggattcctcaatgaagaccactggctgggtaggaagaactcaggaggaggagttgaaggcttaggactgcagaagctcgggtacatcttgaaggaagttggaacaaagcctggaggaaaggtttacgctgatgataccgcaggctgggacacacgcatcaccaaagctgacctcgagaatgaagcgaaggttcttgaactgctggatggagaacatcgacgtttagcgcggtccatcatcgagctcacataccgacacaaagtcgtgaaagtgatgaggccagcggccgacgggaaaactgtgatggacgtcatctctagagaggatcagagaggaagcggtcaggtagtgacttacgccctgaacaccttcaccaatctagcagttcagctggtcagaatgatggagggggagggggtcattggacccgatgatgttgaaaaactgggaaaaggaaaaggccctaaggtcagaacctggctgtttgagaatggcgaggagcgtctcagtcgcatggccgtcagcggtgatgactgcgtggtgaaacctttggacgaccgcttcgccacatcactacacttcctaaatgctatgtcaaaggtccgcaaagacatccaggaatggaaaccctcgacggggtggtatgactggcagcaggttccattctgttcaaaccatttcacggaactgatcatgaaggacggcaggacgctggtggtcccgtgtcgtggacaagacgagttgattggacgtgccaggatctctccaggggctggatggaatgtgcgcgacaccgcctgcctggcgaagtcatacgcgcagatgtggctgctgctttatttccaccgtagagacctgagattgatggccaatgccatctgttccgctgtgcctgccaactgggttcccacagggcgtaccacttggtcgatccacgcaaaaggagaatggatgacgacggaagacatgctcgcagtctggaacagagtgtggattgaggagaatgagtggatggaagacaaaacaccagttgagaggtggagtgatgttccatactctggaaagagagaggacatttggtgtggcagtttgatcggcacacgaacccgcgccacttgggctgaaaatatccatgtggcaatcaatcaggtccgttcagtgattggagaagagaagtatgtggattacatgagctccttgaggaggtatgaagacaccattgtagtggaggacactgttttgtaaaagatagtattatagttagtttagtgtaaataggatttattgagaatggaagtcaggccagattaatgctgccaccggaagttgagtagacggtgctgcctgcggctcaaccccaggaggactgggtgaccaaagctgcgaggtgatccacgtaagccctcagaaccgtctcggaaggaggaccccacgtgctttagcctcaaagcccagtgtcagaccacactttaatgtgccactctgcggagagtgcagtctgcgatagtgccccaggtggactgggttaacaaaggcaaaacatcgccccacgcggccataaccctggctatggtgttaaccagggagaagggactagaggttagaggagaccccgcgtaaaaaagtgcacggcccaacttggctgaagctgtaagccaagggaaggactagaggttagaggagaccccgtgccaaaaacaccaaaagaaacagcatattgacacctgggatagactaggggatcttctgctctgcacaaccagccacacggcacagtgcgccgacataggtggctggtggtgctagaacacaggatct

SEQ ID NO: 171 - DNA, 10649 bp, Dengue virus type 4
agttgttagtctgtgtggaccgacaaggacagttccaaatcggaagcttgcttaacacagttctaacagtttgtttgaatagagagcagatctctggaaaaatgaaccaacgaaaaaaggtggttagaccacctttcaatatgctgaaacgcgagagaaaccgcgtatcaacccctcaagggttggtgaagagattctcaaccggacttttttctgggaaaggacccttacggatggtgctagcattcatcacgtttttgcgagtcctttccatcccaccaacagcagggattctgaagagatggggacagttgaagaaaaataaggccatcaagatactgattggattcaggaaggagataggccgcatgctgaacatcttgaacgggagaaaaaggtcaacgataacattgctgtgcttgattcccaccgtaatggcgttttccctcagcacaagagatggcgaacccctcatgatagtggcaaaacatgaaagggggagacctctcttgtttaagacaacagaggggatcaacaaatgcactctcattgccatggacttgggtgaaatgtgtgaggacactgtcacgtataaatgccccctactggtcaataccgaacctgaagacattgattgctggtgcaacctcacgtctacctgggtcatgtatgggacatgcacccagagcggagaacggagacgagagaagcgctcagtagctttaacaccacattcaggaatgggattggaaacaagagctgagacatggatgtcatcggaaggggcttggaagcatgctcagagagtagagagctggatactcagaaacccaggattcgcgctcttggcaggatttatggcttatatgattgggcaaacaggaatccagcgaactgtcttctttgtcctaatgatgctggtcgccccatcctacggaatgcgatgcgtaggagtaggaaacagagactttgtggaaggagtctcaggtggagcatgggtcgacctggtgctagaacatggaggatgcgtcacaaccatggcccagggaaaaccaaccttggattttgaactgactaagacaacagccaaggaagtggctctgttaagaacctattgcattgaagcctcaatatcaaacataactacggcaacaagatgtccaacgcaaggagagccttatctgaaagaggaacaggaccaacagtacatttgccggagagatgtggtagacagagggtggggcaatggctgtggcttgtttggaaaaggaggagttgtgacatgtgcgaagttttcatgttcggggaagataacaggcaatttggtccaaattgagaaccttgaatacacagtggttgtaacagtccacaatggagacacccatgcagtaggaaatgacacatccaatcatggagttacagccatgataactcccaggtcaccatcggtggaagtcaaattgccggactatggagaactaacactcgattgtgaacccaggtctggaattgactttaatgagatgattctgatgaaaatgaaaaagaaaacatggctcgtgcataagcaatggtttttggatctgcctcttccatggacagcaggagcagacacatcagaggttcactggaattacaaagagagaatggtgacatttaaggttcctcatgccaagagacaggatgtgacagtgctgggatctcaggaaggagccatgcattctgccctcgctggagccacagaagtggactccggtgatggaaatcacatgtttgcaggacatcttaagtgcaaagtccgtatggagaaattgagaatcaagggaatgtcatacacgatgtgttcaggaaagttttcaattgacaaagagatggcagaaacacagcatgggacaacagtggtgaaagtcaagtatgaaggtgctggagctccgtgtaaagtccccatagagataagagatgtaaacaaggaaaaagtggttgggcgtatcatctcatccacccctttggctgagaataccaacagtgtaaccaacatagaattagaacccccctttggggacagctacatagtgataggtgttggaaacagcgcattaacactccattggttcaggaaagggagttccattggcaagatgtttgagtccacatacagaggtgcaaaacgaatggccattctaggtgaaacagcttgggattttggttccgttggtggactgttcacatcattgggaaaggctgtgcaccaggtttttggaagtgtgtatacaaccatgtttggaggagtctcatggatgattagaatcctaattgggttcttagtgttgtggattggcacgaactcgaggaacacttcaatggctatgacgtgcatagctgttggaggaatcactctgtttctgggcttcacagttcaagcagacatgggttgtgtggcgtcatggagtgggaaagaattgaagtgtggaagcggaatttttgtggttgacaacgtgcacacttggacagaacagtacaaatttcaaccagagtccccagcgagactagcgtctgcaatattaaatgcccacaaagatggggtctgtggaattagatcaaccacgaggctggaaaatgtcatgtggaagcaaataaccaacgagctaaactatgttctctgggaaggaggacatgacctcactgtagtggctggggatgtgaagggggtgttgaccaaaggcaagagagcactcacacccccagtgagtgatctgaaatattcatggaagacatggggaaaagcaaaaatcttcaccccagaagcaagaaatagcacatttttaatagacggaccagacacctctgaatgccccaatgaacgaagagcatggaactctcttgaggtggaagactatggatttggcatgttcacgaccaacatatggatgaaattccgagaaggaagttcagaagtgtgtgaccacaggttaatgtcagctgcaattaaagatcagaaagctgtgcatgctgacatgggttattggatagagagctcaaaaaaccagacctggcagatagagaaagcatctcttattgaagtgaaaacatgtctgtggcccaagacccacacactgtggagcaatggagtgctggaaagccagatgctcattccaaaatcatatgcgggccctttttcacagcacaattaccgccagggctatgccacgcaaaccgtgggcccatggcacttaggcaaattagagatagactttggagaatgccccggaacaacagtcacaattcaggaggattgtgaccatagaggcccatctttgaggaccaccactgcatctggaaaactagtcacgcaatggtgctgccgctcctgcacgatgcctcccttaaggttcttgggagaagatgggtgctggtatgggatggagattaggcccttgagtgaaaaagaagagaacatggtcaaatcacaggtgacggccggacagggcacatcagaaactttttctatgggtctgttgtgcctgaccttgtttgtggaagaatgcttgaggagaagagtcactaggaaacacatgatattagttgtggtgatcactctttgtgctatcatcctgggaggcctcacatggatggacttactacgagccctcatcatgttgggggacactatgtctggtagaataggaggacagatccacctagccatcatggcagtgttcaagatgtcaccaggatacgtgctgggtgtgtttttaaggaaactcacttcaagagagacagcactaatggtaataggaatggccatgacaacggtgctttcaattccacatgaccttatggaactcattgatggaatatcactgggactaattttgctaaaaatagtaacacagtttgacaacacccaagtgggaaccttagctctttccttgactttcataagatcaacaatgccattggtcatggcttggaggaccattatggctgtgttgtttgtggtcacactcattcctttgtgcaggacaagctgtcttcaaaaacagtctcattgggtagaaataacagcactcatcctaggagcccaagctctgccagtgtacctaatgactcttatgaaaggagcctcaagaagatcttggcctcttaacgagggcataatggctgtgggtttggttagtctcttaggaagcgctcttttaaagaatgatgtccctttagctggcccaatggtggcaggaggcttacttctggcggcttacgtgatgagtggtagctcagcagatctgtcactagagaaggccgccaacgtgcagtgggatgaaatggcagacataacaggctcaagcccaatcgtagaagtgaagcaggatgaagatggctctttctccatacgggacgtcgaggaaaccaatatgataacccttttggtgaaactggcactgataacagtgtcaggtctctaccccttggcaattccagtcacaatgaccttatggtacatgtggcaagtgaaaacacaaagatcaggagccctgtgggacgtcccctcacccgctgccactaaaaaagccgcactgtctgaaggagtgtacaggatcatgcaaagagggttattcgggaaaactcaggttggagtagggatacacatggaaggtgtatttcacacaatgtggcatgtaacaagaggatcagtgatctgccacgagactgggagattggagccatcttgggctgacgtcaggaatgacatgatatcatacggtgggggatggaggcttggagacaaatgggacaaagaagaagacgttcaggtcctcgccatagaaccaggaaaaaatcctaaacatgtccaaacgaaacctggccttttcaagaccctaactggagaaattggagcagtaacattagatttcaaacccggaacgtctggttctcccatcatcaacaggaaaggaaaagtcatcggactctatggaaatggagtagttaccaaatcaggtgattacgtcagtgccataacgcaagccgaaagaattggagagccagattatgaagtggatgaggacatttttcgaaagaaaagattaactataatggacttacaccccggagctggaaagacaaaaagaattcttccatcaatagtgagagaagccttaaaaaggaggctacgaactttgattttagctcccacgagagtggtggcggccgagatggaagaggccctacgtggactgccaatccgttatcagaccccagctgtgaaatcagaacacacaggaagagagattgtagacctcatgtgtcatgcaaccttcacaacaagacttttgtcatcaaccagggttccaaattacaaccttatagtgatggatgaagcacatttcaccgatccttctagtgtcgcggctagaggatacatctcgaccagggtggaaatgggagaggcagcagccatcttcatgaccgcaacccctcccggagcgacagatccctttccccagagcaacagcccaatagaagacatcgagagggaaattccggaaaggtcatggaacacagggttcgactggataacagactaccaagggaaaactgtgtggtttgttcccagcataaaagctggaaatgacattgcaaattgtttgagaaagtcgggaaagaaagttatccagttgagtaggaaaacctttgatacagagtatccaaaaacgaaactcacggactgggactttgtggtcactacagacatatctgaaatgggggccaattttagagccgggagagtgatagaccctagaagatgcctcaagccagttatcctaccagatgggccagagagagtcattttagcaggtcctattccagtgactccagcaagcgctgctcagagaagagggcgaataggaaggaacccagcacaagaagacgaccaatacgttttctccggagacccactaaaaaatgatgaagatcatgcccactggacagaagcaaagatgctgcttgacaatatctacaccccagaagggatcattccaacattgtttggtccggaaagggaaaaaacccaagccattgatggagagtttcgcctcagaggggaacaaaggaagacttttgtggaattaatgaggagaggagaccttccggtgtggctgagctataaggtagcttctgctggcatttcttacgaagatcgggaatggtgcttcacaggggaaagaaataaccaaattttagaagaaaacatggaggttgaaatttggactagagagggagaaaagaaaaagctaaggccaagatggttagatgcacgtgtatacgctgaccccatggctttgaaggatttcaaggagtttgccagtggaaggaagagtataactctcgacatcctaacagagattgccagtttgccaacttacctttcctctagggccaagctcgcccttgataacatagtcatgctccacacaacagaaagaggagggagggcctatcaacacgccctgaacgaacttccggagtcactggaaacactcatgcttgtagctttactaggtgctatgacagcaggcatcttcctgtttttcatgcaagggaaaggaatagggaaattgtcaatgggtttgataaccattgcggtggctagtggcttgctctgggtagcagaaattcaaccccagtggatagcggcctcaatcatactagagttttttctcatggtactgttgataccggaaccagaaaaacaaaggaccccacaagacaatcaattgatctacgtcatattgaccattctcaccatcattggtctaatagcagccaacgagatggggctgattgaaaaaacaaaaacggattttgggttttaccaggtaaaaacagaaaccaccatcctcgatgtggacttgagaccagcttcagcatggacgctctatgcagtagccaccacaattctgactcccatgctgagacacaccatagaaaacacgtcggccaacctatctctagcagccattgccaaccaggcagccgtcctaatggggcttggaaaaggatggccgctccacagaatggacctcggtgtgccgctgttagcaatgggatgctattctcaagtgaacccaacaaccttgacagcatccttagtcatgcttttagtccattatgcaataataggcccaggattgcaggcaaaagccacaagagaggcccagaaaaggacagctgctgggatcatgaaaaatcccacagtggacgggataacagtaatagatctagaaccaatatcctatgacccaaaatttgaaaagcaattagggcaggtcatgctactagtcttgtgtgctggacaactactcttgatgagaacaacatgggctttctgtgaagtcttgactttggccacaggaccaatcttgaccttgtgggagggcaacccgggaaggttttggaacacgaccatagccgtatccaccgccaacattttcaggggaagttacttggcgggagctggactggctttttcactcataaagaatgcacaaacccctaggaggggaactgggaccacaggagagacactgggagagaagtggaagagacagctaaactcattagacagaaaagagtttgaagagtataaaagaagtggaatactagaagtggacaggactgaagccaagtctgccctgaaagatgggtctaaaatcaagcatgcagtatcaagagggtccagtaagatcagatggattgttgagagagggatggtaaagccaaaagggaaagttgtagatcttggctgtgggagaggaggatggtcttattacatggcgacactcaagaacgtgactgaagtgaaagggtatacaaaaggaggtccaggacatgaagaaccgattcccatggctacttatggttggaatttggtcaaactccattcaggggttgacgtgttctacaaacccacagagcaagtggacaccctgctctgtgatattggggagtcatcttctaatccaacaatagaggaaggaagaacattaagagttttgaagatggtggagccatggctctcttcaaaacctgaattctgcatcaaagtccttaacccctacatgccaacagtcatagaagagctggagaaactgcagagaaaacatggtgggaaccttgtcagatgcccgctgtccaggaactccacccatgagatgtattgggtgtcaggagcgtcgggaaacattgtgagctctgtgaacacaacatcaaagatgttgttgaacaggttcacaacaaggcataggaaacccacttatgagaaggacgtagatcttggggcaggaacgagaagtgtctccactgaaacagaaaaaccagacatgacaatcattgggagaaggcttcagcgattgcaagaagagcacaaagaaacctggcattatgatcaggaaaacccatacagaacctgggcgtatcatggaagctatgaagctccttcgacaggctctgcatcctccatggtgaacggggtggtaaaactgctaacaaaaccctgggatgtgattccaatggtgactcagttagccatgacagatacaaccccttttgggcaacaaagagtgttcaaagagaaggtggataccagaacaccacaaccaaaacccggtacacgaatggttatgaccacgacagccaattggctgtgggccctccttggaaagaagaaaaatcccagactgtgcacaagggaagagttcatctcaaaagttagatcaaacgcagccataggcgcagtctttcaggaagaacagggatggacatcagccagtgaagctgtgaatgacagccggttttgggaactggttgacaaagaaagggccctacaccaggaagggaaatgtgaatcgtgtgtctataacatgatgggaaaacgtgagaaaaagttaggagagtttggcagagccaagggaagccgagcaatctggtacatgtggctgggagcgcggtttctggaatttgaagccctgggttttttgaatgaagatcactggtttggcagagaaaattcatggagtggagtggaaggggaaggtctgcacagattgggatatatcctggaggagatagacaagaaggatggagacctaatgtatgctgatgacacagcaggctgggacacaagaatcactgaggatgaccttcaaaatgaggaactgatcacggaacagatggctccccaccacaagatcctagccaaagccattttcaaactaacctatcaaaacaaagtggtgaaagtcctcagacccacaccgcggggagcggtgatggatatcatatccaggaaagaccaaagaggtagtggacaagttggaacatatggtttgaacacattcaccaacatggaagttcaactcatccgccaaatggaagctgaaggagtcatcacacaagatgacatgcagaacccaaaagggttgaaagaaagagttgagaaatggctgaaagagtgtggtgtcgacaggttaaagaggatggcaatcagtggagacgattgcgtggtgaagcccctagatgagaggtttggcacttccctcctcttcttgaacgacatgggaaaggtgaggaaagacattccgcagtgggaaccatctaagggatggaaaaactggcaagaggttcctttttgctcccaccactttcacaagatctttatgaaggatggccgctcactagttgttccatgtagaaaccaggatgaactgatagggagagccagaatctcgcagggagctggatggagcttaagagaaacagcctgcctgggcaaagcttacgcccagatgtggtcgcttatgtacttccacagaagggatctgcgtttagcctccatggccatatgctcagcagttccaacggaatggtttccaacaagcagaacaacatggtcaatccacgctcatcaccagtggatgaccactgaagatatgctcaaagtgtggaacagagtgtggatagaagacaaccctaatatgactgacaagactccagtccattcgtgggaagatataccttacctagggaaaagagaggatttgtggtgtggatccctgattggactttcttccagagccacctgggcgaagaacattcatacggccataacccaggtcaggaacctgatcggaaaagaggaatacgtggattacatgccagtaatgaaaagatacagtgctccttcagagagtgaaggagttctgtaattaccaacaacaaacaccaaaggctattgaagtcaggccacttgtgccacggtttgagcaaaccgtgctgcctgtagctccgccaataatgggaggcgtaataatccccagggaggccatgcgccacggaagctgtacgcgtggcatattggactagcggttagaggagacccctcccatcactgataaaacgcagcaaaagggggcccgaagccaggaggaagctgtactcctggtggaaggactagaggttagaggagacccccccaacacaaaaacagcatattgacgctgggaaagaccagagatcctgctgtctctgcaacatcaatccaggcacagagcgccgcaagatggattggtgttgttgatccaacaggttct

SEQ ID NO: 172 - DNA, 10707 bp, Dengue virus type 3
agttgttagtctacgtggaccgacaagaacagtttcgactcggaagcttgcttaacgtagtgctgacagttttttattagagagcagatctctgatgaacaaccaacggaagaagacgggaaaaccgtctatcaatatgctgaaacgcgtgagaaaccgtgtgtcaactggatcacagttggcgaagagattctcaaaaggactgctgaacggccagggaccaatgaaattggttatggcgttcatagctttcctcagatttctagccattccaccaacagcaggagtcttggctagatggggaaccttcaagaagtcgggggccattaaggtcctgaaaggcttcaagaaggagatctcaaacatgctgagcataatcaaccaacggaaaaagacatcgctctgtctcatgatgatattgccagcagcacttgctttccacttgacttcacgagatggagagccgcgcatgattgtggggaagaatgaaagaggtaaatccctactttttaagacagcctctggaatcaacatgtgcacactcatagccatggatttgggagagatgtgtgatgacacggtcacttacaaatgcccccacattaccgaagtggaacctgaagacattgactgctggtgcaaccttacatcaacatgggtgacttatggaacgtgcaatcaagctggagagcatagacgcgacaagagatcagtggcgttagctccccatgtcggcatgggactggacacacgcacccaaacctggatgtcggctgaaggagcttggagacaagtcgagaaggtagagacatgggcccttaggcacccagggttcaccatactagccctatttctcgcccattacataggcacttccctgacccagaaggtggttattttcatattattaatgctggtcaccccatccatgacaatgagatgtgtgggagtaggaaacagagattttgtggaagggctatcaggagctacgtgggttgacgtggtgctcgagcacggggggtgtgtgactaccatggctaagaacaagcccacgctggatatagagcttcagaagaccgaggccacccaactggcgaccctaaggaagctatgcattgaggggaaaattaccaacataacaactgactcaagatgtcctacccaaggggaagcggttttgcctgaggagcaggaccagaactacgtgtgtaagcatacatacgtagacagaggttgggggaacggttgtggtttgtttggcaaaggaagcttggtaacatgtgcgaaatttcaatgcctggaaccaatagagggaaaagtggtgcaatatgagaacctcaaatacaccgtcatcattacagtgcacacaggagaccaacaccaggtgggaaatgaaacgcaaggagtcacggctgagataacacctcaggcatcaaccactgaagccatcttgcctgaatatggaacccttgggctagaatgctcaccacggacaggtttggatttcaatgaaatgatcttactaacaatgaagaacaaagcatggatggtacatagacaatggttctttgacctacctctaccatgggcatcaggagctacaacagaaacaccaacctggaacaggaaggagcttcttgtgacattcaaaaacgcacatgcgaaaaaacaagaagtagttgtccttggatcgcaagagggagcaatgcataccgcactgacaggagctacagaaatccaaaactcaggaggcacaagcattttcgcggggcacttaaaatgtagacttaagatggacaaattggaactcaaggggatgagctatgcaatgtgcacgaatacctttgtgttgaagaaagaagtctcagaaacgcagcacgggacaatactcattaaggttgagtacaaaggggaagatgcaccttgcaagattcccttttccacagaggatggacaagggaaagctcataatggcagactgatcacagccaaccctgtggtgactaagaaggaggagcctgtcaatattgaggctgaacctccttttggggaaagcaatatagtaattggaattggagacaacgccttgaaaatcaactggtacaagaaggggagctcgattgggaagatgttcgaggccactgaaaggggtgcaaggcgcatggccatcttgggagacacagcttgggactttggatcagtgggtggtgttctgaactcattaggcaaaatggtgcaccaaatatttggaagtgcttatacagccctgttcagtggagtctcttgggtgatgaaaattggaataggtgtcctcttgacttggatagggttgaattcaaaaaacacatccatgtcattttcatgcattgcgataggaatcattacactctatctgggagctgtggtacaagctgacatggggtgtgtcataaactggaagggcaaagaactcaaatgtggaagcggaattttcgtcaccaatgaggtccatacctggacagagcaatacaaattccaagcagactccccaaaaagattggcaacagccattgcaggcgcctgggagaatggagtgtgtggaattaggtcaacaaccagaatggagaatctcttgtggaagcaaatagccaatgaactgaactacatattatgggaaaacaatatcaaattaacggtagttgtgggcgatacacttggggtcttagagcaagggaaaagaacactaacaccacaacccatggagctaaaatactcatggaaaacgtggggaaaggcaaaaatagtgacagctgaaacacaaaattcctctttcataatagacgggccaaacacaccggagtgtccaagtgcctcaagagcatggaatgtgtgggaggtggaagattacgggttcggagtcttcacaaccaacatatggctgaaactccgagaggtctacacccaactatgtgaccataggctaatgtcggcagctgtcaaggatgagagggccgtgcatgccgacatgggctactggatagaaagccaaaagaatggaagttggaagctagaaaaagcatccctcatagaggtaaaaacctgcacatggccaaaatcacacactctctggactaatggtgtgctagagagtgacatgatcatcccaaagagtctagctggtcctatctcacaacacaactacaggcccgggtaccacacccaaacggcaggaccctggcacttaggaaaattggagctggacttcaactactgtgaaggaacaacagttgtcatcacagaaagctgtgggacaagaggcccatcattgagaacaacaacagtgtcagggaagttgatacacgaatggtgttgccgctcgtgcacacttccccccctgcgatacatgggagaagacggctgctggtatggcatggaaatcagacccatcagtgagaaagaagagaacatggtaaagtctttagtctcagcgggaagtggaaaggtggacaacttcacaatgggtgtcttgtgtttggcaatcctctttgaagaggtgttgagaggaaaatttgggaagaaacacatgattgcaggggttttctttacgtttgtgctccttctctcagggcaaataacatggagagacatggcgcacacactaataatgatcgggtccaacgcctctgacaggatgggaatgggcgtcacctacctagctctaattgcaacatttaaaatccagccattcttggctttgggatttttcctaagaaagctgacatctagagaaaatttattgttaggagttgggttggccatggcaacaacgttacaactgccagaggacattgaacaaatggcaaatggagtcgctctggggctcatggctcttaaactgataacacaatttgaaacataccaattgtggacggcattagtctccttaacgtgttcaaacacaatttttacgttgactgttgcctggagaacagccactctgattttggccggagtttcgcttttaccagtgtgccagtcttcaagcatgaggaaaacagattggctcccaatgacagtggcagctatgggagttccaccccttccactttttatttttagcttgaaagacacactcaaaaggagaagctggccactgaatgaaggggtgatggctgttgggcttgtgagcattctggccagttctctccttagaaatgatgtgcccatggctggaccattagtggccgggggcttgctgatagcgtgctacgtcataactggcacgtcagcggacctcactgtagaaaaagccccagatgtaacatgggaggaagaggctgagcagacaggagtgtcccacaacttaatgatcacagttgatgatgatggaacaatgagaataaaagatgatgagactgagaacatcctaacagtgcttttaaaaacagcattactaatagtatcaggcatttttccatactccatacccgcaacattgttggtctggcacacttggcaaaaacaaacccaaagatccggcgttttatgggacgtacccagccccccagagacacagaaagcagaactggaagaaggggtttataggatcaaacagcaaggaatttttgggaaaacccaagtaggggttggagtacagaaagaaggagtcttccacaccatgtggcacgtcacaagaggggcagtgttgacacataatgggaaaagactggaaccaaactgggctagtgtgaaaaaagatctgatttcatatggaggaggatggagactgagcgcacaatggcaaaagggggaggaggtgcaggttattgccgtagagccagggaagaacccaaagaactttcaaaccacgccaggcactttccagactactacaggggaaataggagcaattgcactggatttcaagcctggaacttcaggatctcctatcataaatagagagggaaaggtagtgggactgtatggcaatggagtggttacaaagaatggtggctatgtcagcggaatagcgcaaacaaatgcagaaccagatggaccgacaccagagttggaagaagagatgttcaaaaagcgaaacctgaccataatggatcttcatcctgggtcaggaaagacacggaaataccttccagctattgtcagagaggcaatcaagagacgtttaagaaccttaattttggcaccgacaagggtggttgcagctgagatggaagaagcattgaaagggctcccaataaggtaccaaacaacagcaacaaaatctgaacacacaggaagagagattgttgatctaatgtgccacgcaacgttcacaatgcgtttgctgtcaccagttagggttccaaattacaacttgataataatggatgaggcccatttcacagacccagccagtatagcggctagagggtacatatcaactcgtgttggaatgggagaggcagccgcaatcttcatgacagcaacaccccctggaacagctgatgcctttcctcagagcaacgctccaattcaagatgaagaaagggacataccagaacgctcatggaattcaggcaatgaatggattaccgacttcgctgggaaaacggtgtggtttgtccctagcattaaagccggaaatgacatagcaaactgcttgcgaaaaaacgggaaaaaagtcattcaacttagtaggaagacttttgacacagaatatcagaagactaaactgaatgattgggactttgtggtgacaactgacatttcagaaatgggggccaatttcaaagcagatagagtgatcgacccaagaagatgtctcaaaccagtgatcttgacagatggaccagagcgggtgatcctggccggaccaatgccagtcaccgcggcgagtgctgcgcaaaggagagggagagttggcaggaacccacaaaaagagaatgaccagtacatattcacgggccagcctctcaacaatgatgaagaccatgctcactggacagaagcaaaaatgctgctggacaacatcaacacaccagaagggattataccagctctctttgaaccagaaagggagaagtcagccgccatagacggtgagtatcgcctgaagggtgagtccaggaagactttcgtggaactcatgaggaggggtgaccttccagtttggttagcccataaagtagcatcagaaggaatcaaatacacagatagaaaatggtgctttgatgggcaacgcaataatcaaattttagaggagaacatggatgtggaaatttggacaaaggaaggagaaaagaaaaaattgagacctaggtggcttgatgcccgcacttattcagatccattggcactcaaggaattcaaggactttgcggctggcagaaagtcaatcgcccttgatcttgtgacagaaataggaagagtgccttcacatctagcccacagaacaagaaacgctctggacaatctggtgatgctgcatacgtcagaagatggcggtagggcttacaggcatgcggtggaggaactaccagaaacaatggaaacactcctactcttgggactaatgatcttgttgacaggtggagcaatgcttttcttgatatcaggtaaagggattggaaagacttcaataggactcatttgtgtaatcgcttccagcggcatgttgtggatggccgaagttccactccaatggatcgcgtcggctatagtcctggagttttttatgatggtgttgctcataccagaaccagaaaagcagagaaccccccaagacaaccaactcgcatatgtcgtgataggcatacttacattggctgcaacaatagcagccaatgaaatgggactgctggaaaccacaaagagagacttaggaatgtctaaggagccaggtgttgtttctccaaccagctatttggatgtggacttgcacccagcatcagcctggacattgtacgccgtggccactacagtaataacaccaatgttaagacataccatagagaattctacagcaaatgtgtccctggcagctatagccaaccaggcagtggtcctgatgggtttggacaaaggatggccaatatcaaaaatggacttaggcgtgccactactggcactgggttgctattcacaagtgaacccactgactctaactgcggcagtacttttgctaatcacacattatgctatcataggtccaggattgcaagcaaaagccacccgtgaagctcagaaaaggacagctgctggaataatgaagaatccaacagtggatgggataatgacaatagacctagattctgtaatatttgattcaaaatttgaaaaacaactgggacaggttatgctcctggttttgtgcgcagtccaactcttgctaatgagaacatcatgggccttgtgtgaagctttaactctagctacaggaccaataacaacactctgggaaggatcacctggtaagttctggaacaccacgatagctgtttccatggcgaacatttttagagggagctatttagcaggagctgggcttgctttttctattatgaaatcagttggaacaggaaaaagaggaacaggctcacaaggtgaaactttaggagaaaaatggaaaaagaaattaaatcaattatcccggaaagagtttgacctttacaagaaatctggaatcactgaagtggatagaacagaagccaaagaagggttgaaaagaggagagacaacacatcatgccgtgtcccgaggtagcgcaaaacttcaatggtttgtggaaagaaacatggtcgttcccgaaggaagagtcatagacttgggctgtggaagaggaggctggtcatattactgtgcaggactgaaaaaagtcacagaagtgcgaggatacacaaaaggcggtccaggacacgaagaaccagtacctatgtctacatatggatggaacatagttaagttaatgagcggaaaggatgtgttctatctcccacctgaaaagtgtgataccctgttgtgtgacattggagaatcttcaccaagcccaacagtggaagagagcagaactataagagttttgaagatggttgaaccatggctaaaaaacaaccagttttgcattaaagttttgaacccttacatgccaactgtgattgagcacctagaaagactacaaaggaaacatggaggaatgcttgtgagaaatccactttcacgaaactccacgcacgaaatgtactggatatctaatggcacaggtaacattgtctcttcagtcaacatggtgtctagattgctactgaacaggttcacgatgacacacaggagacccaccatagagaaagatgtggatttaggagcaggaactcgacatgttaatgcggaaccagaaacacccaacatggatgtcattggggaaagaataaaaaggatcaaggaggagcataattcaacatggcactatgatgacgaaaacccctacaaaacgtgggcttaccatggatcctatgaagtcaaagccacaggctcagcctcctccatgataaatggagtcgtgaaactcctcaccaaaccatgggatgtggtgcccatggtgacacagatggcaatgacagacacaactccatttggccagcagagagtctttaaagagaaagtggacaccaggacgcccaggcccatgccagggacaagaaaggctatggagatcacagcggagtggctctggagaaccctgggaaggaacaaaagacccagattatgcacaagggaagagtttacaaaaaaggtcagaactaacgcagccatgggcgccgttttcacagaggagaaccaatgggacagtgcgaaagctgctgttgaggatgaagaattttggaaacttgtggacagagaacgtgaactccacaaattgggcaaatgtggaagctgcgtttataacatgatgggcaagagagagaaaaaacttggagagtttggcaaagcaaaaggcagtagagctatatggtacatgtggttgggagccaggtaccttgagttcgaagcccttggattcttaaatgaagaccactggttctcgcgtgaaaactcttacagtggagtagaaggagaaggactgcacaagctaggctacatattaagggacatttccaagatacccggaggagccatgtatgctgatgacacagctggttgggacacaagaataacagaagatgacctgcacaatgaggaaaagatcatacagcaaatggaccctgaacacaggcagttagcgaacgctatattcaagctcacataccaaaacaaagtggtcaaagttcaacgaccgactccaacgggcacggtaatggatattatatctaggaaagaccaaaggggcagtggacaactgggaacttatggcctgaatacattcaccaacatggaagcccagttagtcagacaaatggaaggagaaggtgtgctgacaaaggcagacctcgagaaccctcatctgctagagaagaaaatcacacaatggttggaaaccaaaggagtggagaggttaaaaagaatggccattagcggggatgattgcgtggtgaaaccaatcgatgacaggttcgctaatgccctgcttgctttgaacgatatgggaaaggttcggaaagacatacctcaatggcagccatcaaagggatggcatgattggcaacaggttcctttctgctcccaccactttcatgaattgatcatgaaagatggaagaaagttggtggttccctgcagaccccaggacgaactaataggaagagcaagaatctctcaaggagcgggatggagccttagagaaactgcatgtctggggaaagcctacgcccaaatgtggagtctcatgtattttcacagaagagatctcagattagcatccaacgccatatgttcagcagtaccagtccactgggttcccacaagtagaacgacatggtctattcatgctcaccatcagtggatgactacagaagacatgcttactgtttggaacagggtgtggatagaggaaaatccatggatggaagacaaaactccagttacaacttgggaaaatgttccatatctaggaaagagagaagaccaatggtgtggatcacttattggtctcacttccagagcaacctgggcccagaacatacccacagcaattcaacaggtgagaagccttataggcaatgaagagttcctggactacatgccttcaatgaagagattcaggaaggaagaggagtcggagggagccatttggtaaacgtaggaagtggaaaagaggctaactgtcaggccaccttaagccacagtacggaagaagctgtgctgcctgtgagccccgtccaaggacgttaaaagaagaagtcaggccccaaagccacggtttgagcaaaccgtgctgcctgtagctccgtcgtggggacgtaaaacctgggaggctgcaaactgtggaagctgtacgcacggtgtagcagactagcggttagaggagacccctcccatgacacaacgcagcagcggggcccgagcactgagggaagctgtacctccttgcaaaggactagaggttagaggagaccccccgcaaataaaaacagcatattgacgctgggagagaccagagatcctgctgtctcctcagcatcattccaggcacagaacgccagaaaatggaatggtgctgttgaatcaacaggttct

SEQ ID NO: 173 - DNA, 10735 bp, Dengue virus type 1
agttgttagtctacgtggaccgacaagaacagtttcgaatcggaagcttgcttaacgtagttctaacagttttttattagagagcagatctctgatgaacaaccaacggaaaaagacgggtcgaccgtctttcaatatgctgaaacgcgcgagaaaccgcgtgtcaactgtttcacagttggcgaagagattctcaaaaggattgctttcaggccaaggacccatgaaattggtgatggcttttatagcattcctaagatttctagccatacctccaacagcaggaattttggctagatggggctcattcaagaagaatggagcgatcaaagtgttacggggtttcaagaaagaaatctcaaacatgttgaacataatgaacaggaggaaaagatctgtgaccatgctcctcatgctgctgcccacagccctggcgttccatctgaccacccgagggggagagccgcacatgatagttagcaagcaggaaagaggaaaatcacttttgtttaagacctctgcaggtgtcaacatgtgcacccttattgcaatggatttgggagagttatgtgaggacacaatgacctacaaatgcccccggatcactgagacggaaccagatgacgttgactgttggtgcaatgccacggagacatgggtgacctatggaacatgttctcaaactggtgaacaccgacgagacaaacgttccgtcgcactggcaccacacgtagggcttggtctagaaacaagaaccgaaacgtggatgtcctctgaaggcgcttggaaacaaatacaaaaagtggagacctgggctctgagacacccaggattcacggtgatagccctttttctagcacatgccataggaacatccatcacccagaaagggatcatttttattttgctgatgctggtaactccatccatggccatgcggtgcgtgggaataggcaacagagacttcgtggaaggactgtcaggagctacgtgggtggatgtggtactggagcatggaagttgcgtcactaccatggcaaaagacaaaccaacactggacattgaactcttgaagacggaggtcacaaaccctgccgtcctgcgcaaactgtgcattgaagctaaaatatcaaacaccaccaccgattcgagatgtccaacacaaggagaagccacgctggtggaagaacaggacacgaactttgtgtgtcgacgaacgttcgtggacagaggctggggcaatggttgtgggctattcggaaaaggtagcttaataacgtgtgctaagtttaagtgtgtgacaaaactggaaggaaagatagtccaatatgaaaacttaaaatattcagtgatagtcaccgtacacactggagaccagcaccaagttggaaatgagaccacagaacatggaacaactgcaaccataacacctcaagctcccacgtcggaaatacagctgacagactacggagctctaacattggattgttcacctagaacagggctagactttaatgagatggtgttgttgacaatgaaaaaaaaatcatggctcgtccacaaacaatggtttctagacttaccactgccttggacctcgggggcttcaacatcccaagagacttggaatagacaagacttgctggtcacatttaagacagctcatgcaaaaaagcaggaagtagtcgtactaggatcacaagaaggagcaatgcacactgcgttgactggagcgacagaaatccaaacgtctggaacgacaacaatttttgcaggacacctgaaatgcagattaaaaatggataaactgattttaaaagggatgtcatatgtaatgtgcacagggtcattcaagttagagaaggaagtggctgagacccagcatggaactgttctagtgcaggttaaatacgaaggaacagatgcaccatgcaagatccccttctcgtcccaagatgagaagggagtaacccagaatgggagattgataacagccaaccccatagtcactgacaaagaaaaaccagtcaacattgaagcggagccaccttttggtgagagctacattgtggtaggagcaggtgaaaaagctttgaaactaagctggttcaagaagggaagcagtatagggaaaatgtttgaagcaactgcccgtggagcacgaaggatggccatcctgggagacactgcatgggacttcggttctataggaggggtgttcacgtctgtgggaaaactgatacaccagatttttgggactgcgtatggagttttgttcagcggtgtttcttggaccatgaagataggaatagggattctgctgacatggctaggattaaactcaaggagcacgtccctttcaatgacgtgtatcgcagttggcatggtcacactgtacctaggagtcatggttcaggcggactcgggatgtgtaatcaactggaaaggcagagaactcaaatgtggaagcggcatttttgtcaccaatgaagtccacacctggacagagcaatataaattccaggccgactcccctaagagactatcagcggccattgggaaggcatgggaggagggtgtgtgtggaattcgatcagccactcgtctcgagaacatcatgtggaagcaaatatcaaatgaattaaaccacatcttacttgaaaatgacatgaaatttacagtggtcgtaggagacgttagtggaatcttggcccaaggaaagaaaatgattaggccacaacccatggaacacaaatactcgtggaaaagctggggaaaagccaaaatcataggagcagatgtacagaataccaccttcatcatcgacggcccaaacaccccagaatgccctgataaccaaagagcatggaacatttgggaagttgaagactatggatttggaattttcacgacaaacatatggttgaaattgcgtgactcctacactcaagtgtgtgaccaccggctaatgtcagctgccatcaaggatagcaaagcagtccatgctgacatggggtactggatagaaagtgaaaagaacgagacttggaagttggcaagagcctccttcatagaagttaagacatgcatctggccaaaatcccacactctatggagcaatggagtcctggaaagtgagatgataatcccaaagatatatggaggaccaatatctcagcacaactacagaccaggatatttcacacaaacagcagggccgtggcacttgggcaagttagaactagattttgatttatgtgaaggtaccactgttgttgtggatgaacattgtggaaatcgaggaccatctcttagaaccacaacagtcacaggaaagacaatccatgaatggtgctgtagatcttgcacgttaccccccctacgtttcaaaggagaagacgggtgctggtacggcatggaaatcagaccagtcaaggagaaggaagagaacctagttaagtcaatggtctctgcagggtcaggagaagtggacagtttttcactaggactgctatgcatatcaataatgatcgaagaggtaatgagatccagatggagcagaaaaatgctgatgactggaacattggctgtgttcctccttctcacaatgggacaattgacatggaatgatctgatcaggctatgtatcatggttggagccaacgcttcagacaagatggggatgggaacaacgtacctagctttgatggccactttcagaatgagaccaatgttcgcagtcgggctactgtttcgcagattaacatctagagaagttcttcttcttacagttggattgagtctggtggcatctgtagaactaccaaattccttagaggagctaggggatggacttgcaatgggcatcatgatgttgaaattactgactgattttcagtcacatcagctatgggctaccttgctgtctttaacatttgtcaaaacaactttttcattgcactatgcatggaagacaatggctatgatactgtcaattgtatctctcttccctttatgcctgtccacgacttctcaaaaaacaacatggcttccggtgttgctgggatctcttggatgcaaaccactaaccatgtttcttataacagaaaacaaaatctggggaaggaaaagctggcctctcaatgaaggaattatggctgttggaatagttagcattcttctaagttcacttctcaagaatgatgtgccactagctggcccactaatagctggaggcatgctaatagcatgttatgtcatatctggaagctcggccgatttatcactggagaaagcggctgaggtctcctgggaagaagaagcagaacactctggtgcctcacacaacatactagtggaggtccaagatgatggaaccatgaagataaaggatgaagagagagatgacacactcaccattctcctcaaagcaactctgctagcaatctcaggggtatacccaatgtcaataccggcgaccctctttgtgtggtatttttggcagaaaaagaaacagagatcaggagtgctatgggacacacccagccctccagaagtggaaagagcagtccttgatgatggcatttatagaattctccaaagaggattgttgggcaggtctcaagtaggagtaggagtttttcaagaaggcgtgttccacacaatgtggcacgtcaccaggggagctgtcctcatgtaccaagggaagagactggaaccaagttgggccagtgtcaaaaaagacttgatctcatatggaggaggttggaggtttcaaggatcctggaacgcgggagaagaagtgcaggtgattgctgttgaaccggggaagaaccccaaaaatgtacagacagcgccgggtaccttcaagacccctgaaggcgaagttggagccatagctctagactttaaacccggcacatctggatctcctatcgtgaacagagagggaaaaatagtaggtctttatggaaatggagtggtgacaacaagtggtacctacgtcagtgccatagctcaagctaaagcatcacaagaagggcctctaccagagattgaggacgaggtgtttaggaaaagaaacttaacaataatggacctacatccaggatcgggaaaaacaagaagataccttccagccatagtccgtgaggccataaaaagaaagctgcgcacgctagtcttagctcccacaagagttgtcgcttctgaaatggcagaggcgctcaagggaatgccaataaggtatcagacaacagcagtgaagagtgaacacacgggaaaggagatagttgaccttatgtgtcacgccactttcactatgcgtctcctgtctcctgtgagagttcccaattataatatgattatcatggatgaagcacattttaccgatccagccagcatagcagccagagggtatatctcaacccgagtgggtatgggtgaagcagctgcgattttcatgacagccactccccccggatcggtggaggcctttccacagagcaatgcagttatccaagatgaggaaagagacattcctgaaagatcatggaactcaggctatgactggatcactgatttcccaggtaaaacagtctggtttgttccaagcatcaaatcaggaaatgacattgccaactgtttaagaaagaatgggaaacgggtggtccaattgagcagaaaaacttttgacactgagtaccagaaaacaaaaaataacgactgggactatgttgtcacaacagacatatccgaaatgggagcaaacttccgagccgacagggtaatagacccgaggcggtgcctgaaaccggtaatactaaaagatggcccagagcgtgtcattctagccggaccgatgccagtgactgtggctagcgccgcccagaggagaggaagaattggaaggaaccaaaataaggaaggcgatcagtatatttacatgggacagcctctaaacaatgatgaggaccacgcccattggacagaagcaaaaatgctccttgacaacataaacacaccagaagggattatcccagccctctttgagccggagagagaaaagagtgcagcaatagacggggaatacagactacggggtgaagcgaggaaaacgttcgtggagctcatgagaagaggagatctacctgtctggctatcctacaaagttgcctcagaaggcttccagtactccgacagaaggtggtgctttgatggggaaaggaacaaccaggtgttggaggagaacatggacgtggagatctggacaaaagaaggagaaagaaagaaactacgaccccgctggctggatgccagaacatactctgacccactggctctgcgcgaattcaaagagttcgcagcaggaagaagaagcgtctcaggtgacctaatattagaaatagggaaacttccacaacatttaacgcaaagggcccagaacgccttggacaatctggttatgttgcacaactctgaacaaggaggaaaagcctatagacacgccatggaagaactaccagacaccatagaaacgttaatgctcctagctttgatagctgtgctgactggtggagtgacgttgttcttcctatcaggaaggggtctaggaaaaacatccattggcctactctgcgtgattgcctcaagtgcactgttatggatggccagtgtggaaccccattggatagcggcctctatcatactggagttctttctgatggtgttgcttattccagagccggacagacagcgcactccacaagacaaccagctagcatacgtggtgataggtctgttattcatgatattgacagtggcagccaatgagatgggattactggaaaccacaaagaaggacctggggattggtcatgcagctgctgaaaaccaccatcatgctgcaatgctggacgtagacctacatccagcttcagcctggactctctatgcagtggccacaacaattatcactcccatgatgagacacacaattgaaaacacaacggcaaatatttccctgacagctattgcaaaccaggcagctatattgatgggacttgacaagggatggccaatatcaaagatggacataggagttccacttctcgccttggggtgctattctcaggtgaacccgctgacgctgacagcggcggtattgatgctagtggctcattatgccataattggacccggactgcaagcaaaagctactagagaagctcaaaaaaggacagcagccggaataatgaaaaacccaactgtcgacgggatcgttgcaatagatttggaccctgtggtttacgatgcaaaatttgaaaaacagctaggccaaataatgttgttgatactttgcacatcacagatcctcctgatgcggaccacatgggccttgtgtgaatccatcacactagccactggacctctgactacgctttgggagggatctccaggaaaattctggaacaccacgatagcggtgtccatggcaaacatttttaggggaagttatctagcaggagcaggtctggccttttcattaatgaaatctctaggaggaggtaggagaggcacgggagcccaaggggaaacactgggagaaaaatggaaaagacagctaaaccaattgagcaagtcagaattcaacacttacaaaaggagtgggattatagaggtggatagatctgaagccaaagaggggttaaaaagaggagaaacgactaaacacgcagtgtcgagaggaacggccaaactgaggtggtttgtggagaggaaccttgtgaaaccagaagggaaagtcatagacctcggttgtggaagaggtggctggtcatattattgcgctgggctgaagaaagtcacagaagtgaaaggatacacgaaaggaggacctggacatgaggaaccaatcccaatggcaacctatggatggaacctagtaaagctatactccgggaaagatgtattctttacaccacctgagaaatgtgacaccctcttgtgtgatattggtgagtcctctccgaacccaactatagaagaaggaagaacgttacgtgttctaaagatggtggaaccatggctcagaggaaaccaattttgcataaaaattctaaatccctatatgccgagtgtggtagaaactttggagcaaatgcaaagaaaacatggaggaatgctagtgcgaaatccactctcaagaaactccactcatgaaatgtactgggtttcatgtggaacaggaaacattgtgtcagcagtaaacatgacatctagaatgctgctaaatcgattcacaatggctcacaggaagccaacatatgaaagagacgtggacttaggcgctggaacaagacatgtggcagtagaaccagaggtggccaacctagatatcattggccagaggatagagaatataaaaaatgaacacaaatcaacatggcattatgatgaggacaatccatacaaaacatgggcctatcatggatcatatgaggtcaagccatcaggatcagcctcatccatggtcaatggtgtggtgagactgctaaccaaaccatgggatgtcattcccatggtcacacaaatagccatgactgacaccacaccctttggacaacagagggtgtttaaagagaaagttgacacgcgtacaccaaaagcgaaacgaggcacagcacaaattatggaggtgacagccaggtggttatggggttttctctctagaaacaaaaaacccagaatctgcacaagagaggagttcacaagaaaagtcaggtcaaacgcagctattggagcagtgttcgttgatgaaaatcaatggaactcagcaaaagaggcagtggaagatgaacggttctgggaccttgtgcacagagagagggagcttcataaacaaggaaaatgtgccacgtgtgtctacaacatgatgggaaagagagagaaaaaattaggagagttcggaaaggcaaaaggaagtcgcgcaatatggtacatgtggttgggagcgcgctttttagagtttgaagcccttggtttcatgaatgaagatcactggttcagcagagagaattcactcagtggagtggaaggagaaggactccacaaacttggatacatactcagagacatatcaaagattccagggggaaatatgtatgcagatgacacagccggatgggacacaagaataacagaggatgatcttcagaatgaggccaaaatcactgacatcatggaacctgaacatgccctattggccacgtcaatctttaagctaacctaccaaaacaaggtagtaagggtgcagagaccagcgaaaaatggaaccgtgatggatgtcatatccagacgtgaccagagaggaagtggacaggttggaacctatggcttaaacaccttcaccaacatggaggcccaactaataagacaaatggagtctgagggaatcttttcacccagcgaattggaaaccccaaatctagccgaaagagtcctcgactggttgaaaaaacatggcaccgagaggctgaaaagaatggcaatcagtggagatgactgtgtggtgaaaccaatcgatgacagatttgcaacagccttaacagctttgaatgacatgggaaaggtaagaaaagacataccgcaatgggaaccttcaaaaggatggaatgattggcaacaagtgcctttctgttcacaccatttccaccagctgattatgaaggatgggagggagatagtggtgccatgccgcaaccaagatgaacttgtaggtagggccagagtatcacaaggcgccggatggagcttgagagaaactgcatgcctaggcaagtcatatgcacaaatgtggcagctgatgtacttccacaggagagacttgagattagcggctaatgctatctgttcagccgttccagttgattgggtcccaaccagccgcaccacctggtcgatccatgcccaccatcaatggatgacaacagaagacatgttgtcagtgtggaatagggtttggatagaggaaaacccatggatggaggacaagactcatgtgtccagttgggaagacgttccatacctaggaaaaagggaagatcaatggtgtggttccctaataggcttaacagcacgagccacctgggccaccaacatacaagtggccataaaccaagtgagaaggctcattgggaatgagaattatctagacttcatgacatcaatgaagagattcaaaaacgagagtgatcccgaaggggcactctggtaagccaactcattcacaaaataaaggaaaataaaaaatcaaacaaggcaagaagtcaggccggattaagccatagcacggtaagagctatgctgcctgtgagccccgtccaaggacgtaaaatgaagtcaggccgaaagccacggttcgagcaagccgtgctgcctgtagctccatcgtggggatgtaaaaacccgggaggctgcaaaccatggaagctgtacgcatggggtagcagactagtggttagaggagacccctcccaagacacaacgcagcagcggggcccaacaccaggggaagctgtaccctggtggtaaggactagaggttagaggagaccccccgcacaacaacaaacagcatattgacgctgggagagaccagagatcctgctgtctctacagcatcattccaggcacagaacgccaaaaaatggaatggtgctgttgaatcaacaggttct

SEQ ID NO: 174 - DNA, 10723 bp, Dengue virus type 2
agttgttagtctacgtggaccgacaaagacagattctttgagggagctaagctcaacgtagttctaacagttttttaattagagagcagatctctgatgaataaccaacggaaaaaggcgaaaaacacgcctttcaatatgctgaaacgcgagagaaaccgcgtgtcgactgtgcaacagctgacaaagagattctcacttggaatgctgcagggacgaggaccattaaaactgttcatggccctggtggcgttccttcgtttcctaacaatcccaccaacagcagggatattgaagagatggggaacaattaaaaaatcaaaagctattaatgttttgagagggttcaggaaagagattggaaggatgctgaacatcttgaataggagacgcagatctgcaggcatgatcattatgctgattccaacagtgatggcgttccatttaaccacacgtaacggagaaccacacatgatcgtcagcagacaagagaaagggaaaagtcttctgtttaaaacagaggatggcgtgaacatgtgtaccctcatggccatggaccttggtgaattgtgtgaagacacaatcacgtacaagtgtccccttctcaggcagaatgagccagaagacatagactgttggtgcaactctacgtccacgtgggtaacttatgggacgtgtaccaccatgggagaacatagaagagaaaaaagatcagtggcactcgttccacatgtgggaatgggactggagacacgaactgaaacatggatgtcatcagaaggggcctggaaacatgtccagagaattgaaacttggatcttgagacatccaggcttcaccatgatggcagcaatcctggcatacaccataggaacgacacatttccaaagagccctgattttcatcttactgacagctgtcactccttcaatgacaatgcgttgcataggaatgtcaaatagagactttgtggaaggggtttcaggaggaagctgggttgacatagtcttagaacatggaagctgtgtgacgacgatggcaaaaaacaaaccaacattggattttgaactgataaaaacagaagccaaacagcctgccaccctaaggaagtactgtatagaggcaaagctaaccaacacaacaacagaatctcgctgcccaacacaaggggaacccagcctaaatgaagagcaggacaaaaggttcgtctgcaaacactccatggtagacagaggatggggaaatggatgtggactatttggaaagggaggcattgtgacctgtgctatgttcagatgcaaaaagaacatggaaggaaaagttgtgcaaccagaaaacttggaatacaccattgtgataacacctcactcaggggaagagcatgcagtcggaaatgacacaggaaaacatggcaaggaaatcaaaataacaccacagagttccatcacagaagcagaattgacaggttatggcactgtcacaatggagtgctctccaagaacgggcctcgacttcaatgagatggtgttgctgcagatggaaaataaagcttggctggtgcacaggcaatggttcctagacctgccgttaccatggttgcccggagcggacacacaagggtcaaattggatacagaaagagacattggtcactttcaaaaatccccatgcgaagaaacaggatgttgttgttttaggatcccaagaaggggccatgcacacagcacttacaggggccacagaaatccaaatgtcatcaggaaacttactcttcacaggacatctcaagtgcaggctgagaatggacaagctacagctcaaaggaatgtcatactctatgtgcacaggaaagtttaaagttgtgaaggaaatagcagaaacacaacatggaacaatagttatcagagtgcaatatgaaggggacggctctccatgcaagatcccttttgagataatggatttggaaaaaagacatgtcttaggtcgcctgattacagtcaacccaattgtgacagaaaaagatagcccagtcaacatagaagcagaacctccattcggagacagctacatcatcataggagtagagccgggacaactgaagctcaactggtttaagaaaggaagttctatcggccaaatgtttgagacaacaatgaggggggcgaagagaatggccattttaggtgacacagcctgggattttggatccttgggaggagtgtttacatctataggaaaggctctccaccaagtctttggagcaatctatggagctgccttcagtggggtttcatggactatgaaaatcctcataggagtcattatcacatggataggaatgaattcacgcagcacctcactgtctgtgacactagtattggtgggaattgtgacactgtatttgggagtcatggtgcaggccgatagtggttgcgttgtgagctggaaaaacaaagaactgaaatgtggcagtgggattttcatcacagacaacgtgcacacatggacagaacaatacaagttccaaccagaatccccttcaaaactagcttcagctatccagaaagcccatgaagagggcatttgtggaatccgctcagtaacaagactggagaatctgatgtggaaacaaataacaccagaattgaatcacattctatcagaaaatgaggtgaagttaactattatgacaggagacatcaaaggaatcatgcaggcaggaaaacgatctctgcggcctcagcccactgagctgaagtattcatggaaaacatggggcaaagcaaaaatgctctctacagagtctcataaccagacctttctcattgatggccccgaaacagcagaatgccccaacacaaatagagcttggaattcgttggaagttgaagactatggctttggagtattcaccaccaatatatggctaaaattgaaagaaaaacaggatgtattctgcgactcaaaactcatgtcagcggccataaaagacaacagagccgtccatgccgatatgggttattggatagaaagtgcactcaatgacacatggaagatagagaaagcctctttcattgaagttaaaaactgccactggccaaaatcacacaccctctggagcaatggagtgctagaaagtgagatgataattccaaagaatctcgctggaccagtgtctcaacacaactatagaccaggctaccatacacaaataacaggaccatggcatctaggtaagcttgagatggactttgatttctgtgatggaacaacagtggtagtgactgaggactgcggaaatagaggaccctctttgagaacaaccactgcctctggaaaactcataacagaatggtgctgccgatcttgcacattaccaccgctaagatacagaggtgaggatgggtgctggtacgggatggaaatcagaccattgaaggagaaagaagagaatttggtcaactccttggtcacagctggacatgggcaggtcgacaacttttcactaggagtcttgggaatggcattgttcctggaggaaatgcttaggacccgagtaggaacgaaacatgcaatactactagttgcagtttcttttgtgacattgatcacagggaacatgtcctttagagacctgggaagagtgatggttatggtaggcgccactatgacggatgacataggtatgggcgtgacttatcttgccctactagcagccttcaaagtcagaccaacttttgcagctggactactcttgagaaagctgacctccaaggaattgatgatgactactataggaattgtactcctctcccagagcaccataccagagaccattcttgagttgactgatgcgttagccttaggcatgatggtcctcaaaatggtgagaaatatggaaaagtatcaattggcagtgactatcatggctatcttgtgcgtcccaaacgcagtgatattacaaaacgcatggaaagtgagttgcacaatattggcagtggtgtccgtttccccactgctcttaacatcctcacagcaaaaaacagattggataccattagcattgacgatcaaaggtctcaatccaacagctatttttctaacaaccctctcaagaaccagcaagaaaaggagctggccattaaatgaggctatcatggcagtcgggatggtgagcattttagccagttctctcctaaaaaatgatattcccatgacaggaccattagtggctggagggctcctcactgtgtgctacgtgctcactggacgatcggccgatttggaactggagagagcagccgatgtcaaatgggaagaccaggcagagatatcaggaagcagtccaatcctgtcaataacaatatcagaagatggtagcatgtcgataaaaaatgaagaggaagaacaaacactgaccatactcattagaacaggattgctggtgatctcaggactttttcctgtatcaataccaatcacggcagcagcatggtacctgtgggaagtgaagaaacaacgggccggagtattgtgggatgttccttcacccccacccatgggaaaggctgaactggaagatggagcctatagaattaagcaaaaagggattcttggatattcccagatcggagccggagtttacaaagaaggaacattccatacaatgtggcatgtcacacgtggcgctgttctaatgcataaaggaaagaggattgaaccatcatgggcggacgtcaagaaagacctaatatcatatggaggaggctggaagttagaaggagaatggaaggaaggagaagaagtccaggtattggcactggagcctggaaaaaatccaagagccgtccaaacgaaacctggtcttttcaaaaccaacgccggaacaataggtgctgtatctctggacttttctcctggaacgtcaggatctccaattatcgacaaaaaaggaaaagttgtgggtctttatggtaatggtgttgttacaaggagtggagcatatgtgagtgctatagcccagactgaaaaaagcattgaagacaacccagagatcgaagatgacattttccgaaagagaagactgaccatcatggacctccacccaggagcgggaaagacgaagagataccttccggccatagtcagagaagctataaaacggggtttgagaacattaatcttggcccccactagagttgtggcagctgaaatggaggaagcccttagaggacttccaataagataccagaccccagccatcagagctgagcacaccgggcgggagattgtggacctaatgtgtcatgccacatttaccatgaggctgctatcaccagttagagtgccaaactacaacctgattatcatggacgaagcccatttcacagacccagcaagtatagcagctagaggatacatctcaactcgagtggagatgggtgaggcagctgggatttttatgacagccactcccccgggaagcagagacccatttcctcagagcaatgcaccaatcatagatgaagaaagagaaatccctgaacgttcgtggaattccggacatgaatgggtcacggattttaaagggaagactgtttggttcgttccaagtataaaagcaggaaatgatatagcagcttgcctgaggaaaaatggaaagaaagtgatacaactcagtaggaagacctttgattctgagtatgtcaagactagaaccaatgattgggacttcgtggttacaactgacatttcagaaatgggtgccaatttcaaggctgagagggttatagaccccagacgctgcatgaaaccagtcatactaacagatggtgaagagcgggtgattctggcaggacctatgccagtgacccactctagtgcagcacaaagaagagggagaataggaagaaatccaaaaaatgagaatgaccagtacatatacatgggggaacctctggaaaatgatgaagactgtgcacactggaaagaagctaaaatgctcctagataacatcaacacgccagaaggaatcattcctagcatgttcgaaccagagcgtgaaaaggtggatgccattgatggcgaataccgcttgagaggagaagcaaggaaaacctttgtagacttaatgagaagaggagacctaccagtctggttggcctacagagtggcagctgaaggcatcaactacgcagacagaaggtggtgttttgatggagtcaagaacaaccaaatcctagaagaaaacgtggaagttgaaatctggacaaaagaaggggaaaggaagaaattgaaacccagatggttggatgctaggatctattctgacccactggcgctaaaagaatttaaggaatttgcagccggaagaaagtctctgaccctgaacctaatcacagaaatgggtaggctcccaaccttcatgactcagaaggcaagagacgcactggacaacttagcagtgctgcacacggctgaggcaggtggaagggcgtacaaccatgctctcagtgaactgccggagaccctggagacattgcttttactgacacttctggctacagtcacgggagggatctttttattcttgatgagcggaaggggcatagggaagatgaccctgggaatgtgctgcataatcacggctagcatcctcctatggtacgcacaaatacagccacactggatagcagcttcaataatactggagttttttctcatagttttgcttattccagaacctgaaaaacagagaacaccccaagacaaccaactgacctacgttgtcatagccatcctcacagtggtggccgcaaccatggcaaacgagatgggtttcctagaaaaaacgaagaaagatctcggattgggaagcattgcaacccagcaacccgagagcaacatcctggacatagatctacgtcctgcatcagcatggacgctgtatgccgtggccacaacatttgttacaccaatgttgagacatagcattgaaaattcctcagtgaatgtgtccctaacagctatagccaaccaagccacagtgttaatgggtctcgggaaaggatggccattgtcaaagatggacatcggagttccccttctcgccattggatgctactcacaagtcaaccccataactctcacagcagctcttttcttattggtagcacattatgccatcatagggccaggactccaagcaaaagcaaccagagaagctcagaaaagagcagcggcgggcatcatgaaaaacccaactgtcgatggaataacagtgattgacctagatccaataccttatgatccaaagtttgaaaagcagttgggacaagtaatgctcctagtcctctgcgtgactcaagtattgatgatgaggactacatgggctctgtgtgaggctttaaccttagctaccgggcccatctccacattgtgggaaggaaatccagggaggttttggaacactaccattgcggtgtcaatggctaacatttttagagggagttacttggccggagctggacttctcttttctattatgaagaacacaaccaacacaagaaggggaactggcaacataggagagacgcttggagagaaatggaaaagccgattgaacgcattgggaaaaagtgaattccagatctacaagaaaagtggaatccaggaagtggatagaaccttagcaaaagaaggcattaaaagaggagaaacggaccatcacgctgtgtcgcgaggctcagcaaaactgagatggttcgttgagagaaacatggtcacaccagaagggaaagtagtggacctcggttgtggcagaggaggctggtcatactattgtggaggactaaagaatgtaagagaagtcaaaggcctaacaaaaggaggaccaggacacgaagaacccatccccatgtcaacatatgggtggaatctagtgcgtcttcaaagtggagttgacgttttcttcatcccgccagaaaagtgtgacacattattgtgtgacataggggagtcatcaccaaatcccacagtggaagcaggacgaacactcagagtccttaacttagtagaaaattggttgaacaacaacactcaattttgcataaaggttctcaacccatatatgccctcagtcatagaaaaaatggaagcactacaaaggaaatatggaggagccttagtgaggaatccactctcacgaaactccacacatgagatgtactgggtatccaatgcttccgggaacatagtgtcatcagtgaacatgatttcaaggatgttgatcaacagatttacaatgagatacaagaaagccacttacgagccggatgttgacctcggaagcggaacccgtaacatcgggattgaaagtgagataccaaacctagatataattgggaaaagaatagaaaaaataaagcaagagcatgaaacatcatggcactatgaccaagaccacccatacaaaacgtgggcataccatggtagctatgaaacaaaacagactggatcagcatcatccatggtcaacggagtggtcaggctgctgacaaaaccttgggacgtcgtccccatggtgacacagatggcaatgacagacacgactccatttggacaacagcgcgtttttaaagagaaagtggacacgagaacccaagaaccgaaagaaggcacgaagaaactaatgaaaataacagcagagtggctttggaaagaattagggaagaaaaagacacccaggatgtgcaccagagaagaattcacaagaaaggtgagaagcaatgcagccttgggggccatattcactgatgagaacaagtggaagtcggcacgtgaggctgttgaagatagtaggttttgggagctggttgacaaggaaaggaatctccatcttgaaggaaagtgtgaaacatgtgtgtacaacatgatgggaaaaagagagaagaagctaggggaattcggcaaggcaaaaggcagcagagccatatggtacatgtggcttggagcacgcttcttagagtttgaagccctaggattcttaaatgaagatcactggttctccagagagaactccctgagtggagtggaaggagaagggctgcacaagctaggttacattctaagagacgtgagcaagaaagagggaggagcaatgtatgccgatgacaccgcaggatgggatacaagaatcacactagaagacctaaaaaatgaagaaatggtaacaaaccacatggaaggagaacacaagaaactagccgaggccattttcaaactaacgtaccaaaacaaggtggtgcgtgtgcaaagaccaacaccaagaggcacagtaatggacatcatatcgagaagagaccaaagaggtagtggacaagttggcacctatggactcaatactttcaccaatatggaagcccaactaatcagacagatggagggagaaggagtctttaaaagcattcagcacctaacaatcacagaagaaatcgctgtgcaaaactggttagcaagagtggggcgcgaaaggttatcaagaatggccatcagtggagatgattgtgttgtgaaacctttagatgacaggttcgcaagcgctttaacagctctaaatgacatgggaaagattaggaaagacatacaacaatgggaaccttcaagaggatggaatgattggacacaagtgcccttctgttcacaccatttccatgagttaatcatgaaagacggtcgcgtactcgttgttccatgtagaaaccaagatgaactgattggcagagcccgaatctcccaaggagcagggtggtctttgcgggagacggcctgtttggggaagtcttacgcccaaatgtggagcttgatgtacttccacagacgcgacctcaggctggcggcaaatgctatttgctcggcagtaccatcacattgggttccaacaagtcgaacaacctggtccatacatgctaaacatgaatggatgacaacggaagacatgctgacagtctggaacagggtgtggattcaagaaaacccatggatggaagacaaaactccagtggaatcatgggaggaaatcccatacttggggaaaagagaagaccaatggtgcggctcattgattgggttaacaagcagggccacctgggcaaagaacatccaagcagcaataaatcaagttagatcccttataggcaatgaagaatacacagattacatgccatccatgaaaagattcagaagagaagaggaagaagcaggagttctgtggtagaaagcaaaactaacatgaaacaaggctagaagtcaggtcggattaagccatagtacggaaaaaactatgctacctgtgagccccgtccaaggacgttaaaagaagtcaggccatcataaatgccatagcttgagtaaactatgcagcctgtagctccacctgagaaggtgtaaaaaatccgggaggccacaaaccatggaagctgtacgcatggcgtagtggactagcggttagaggagacccctcccttacaaatcgcagcaacaatgggggcccaaggcgagatgaagctgtagtctcgctggaaggactagaggttagaggagacccccccgaaacaaaaaacagcatattgacgctgggaaagaccagagatcctgctgtctcctcagcatcattccaggcacagaacgccagaaaatggaatggtgctgttgaatcaacaggttct

SEQ ID NO: 175 - DNA, 11680 bp, Eastern equine encephalomyelitis virus
atagggtacggtgtagaggcaaccaccctatttccacctatccaaaatggagaaagttcatgttgacttagacgcagacagcccattcgtcaagtcactgcaaagatgctttccacattttgagatagaagcaacgcaggtcactgacaatgaccatgctaatgctagggcgttttcgcacctagctactaagctcattgagggagaagtggatacagaccaggtgatcctggatattgggagcgcgcctgtaaggcacacgcattccaaacataagtaccactgtgtttgcccaatgaagagcgcagaagaccctgacagactctaccgctacgcagacaagcttggaaaaagtgatgtcactgacaaatgtattgcctctaaggccgcggacctgctaacagtaatgtcgacgcctgacgctgagacaccctcgttatgcatgcacgctgactcaacttgcaggtaccacggctccgtggccgtatatcaggatgtatatgcagtgcatgcaccgacttccatttactaccaggcgctgaaaggtgtacgaactatctattggatcgggttcgatactacaccgttcatgtataagaacatggcaggcgcctaccctacatacaacacaaattgggccgatgagagtgtgttggaagccagaaatatagggctgggtagttcagacttgcacgaaaagagtttcggaaaagtatccattatgaggaagaagaaattacaacccactaataaagtaatattttctgtggggtcaactatttatactgaagagagaatactgttacgcagctggcatctacctaatgtctttcatctaaaaggtaaaactagctttacaggcagatgtaacaccatcgtcagctgcgaaggttacgttgtcaagaagattacgctcagtcctgggatttacgggaaagtggataatcttgcttcgaccatgcaccgagagggattcttaagttgcaaggttacagacacgttaagaggggagagggtctctttccccgtgtgtacgtacgtgccagcgacactgtgcgaccagatgaccgggatactggcgactgacgtcagtgtcgatgacgcccagaagctgctagttgggctcaaccagcgaattgtcgtcaatggcagaacacaacgtaacacaaataccatgcagaattacctattaccagtggtagcccaggcgttctcacggtgggcgcgggaacaccgcgcagacctggaggacgaaaaagggctaggggtacgggaacgttccctagtcatgggctgctgctgggctttcaaaactcacaagatcacatccatttacaagagacctgggactcaaactatcaagaaggtgcccgccgtatttaattcctttgtcatcccacaaccaaccagctatgggcttgatataggattgcgtcgccgaattaagatgctattcgacgcaaagaaggcacccgctccaattattactgaggccgacgttgcacaccttaaaggcctgcaggatgaagctgaagccgtggctgaggctgaagccgtacgtgcagcactacctccacttctgccggaggtcgataaggagaccgtagaggctgacatcgacctgatcatgcaggaggcaggagcaggcagcgtggagacacctagacgacacatcaaggtcacgacgtatccaggggaagaaatgatcggctcgtacgcagtgctttcaccacaagcggtccttaatagcgagaagctagcttgtattcacccgttagctgagcaagtgctcgtgatgactcacaaagggcgcgcaggacgatacaaggtagagccataccacggtagagttatcgtccccagtggtacagctataccaatccccgatttccaggctctgagtgaaagtgcaaccatagtatttaacgaacgggagttcgttaaccgttacttacaccacattgccgctaacggaggggcattgaatacagatgaagagtactacaaggttgtgaaaagcactgagacagactctgagtacgtatttgacatcgacgcaaagaagtgcgtgaagaaaggggatgccggaccaatgtgcctggtcggcgaattagtagacccgccattccacgaatttgcgtacgagagcttaaaaacacgtcctgctgcaccacacaaagtgcctaccatcggagtctatggagtcccaggttctggaaagtctggtataatccaaagcgctgttaccaagcgtgatctggtggtcagtgcaaagaaagaaaattgcatggaaatcatcaaagacgtcaaacgcatgcgcggcatggacattgccgcccgcacagtggattcagtgctgctaaatggggtaaaacactccgtcgacacactgtacatagacgaggcattcgcttgccatgcagggactctgctagcacttatcgccatcgtcaagccaaagaaagttgtattgtgtggagatccgaaacaatgcggcttctttaacatgatgtgtctaaaagtgcattttaaccacgagatatgcacagaagtgtatcacaagagtatttctcggcgatgcactaagacagtgacatccattgtttccaccctgttctatgataaacggatgagaactgtcaacccatgcaatgataagatcataatagataccaccagtactaccaaacctttaaaggatgacataatattaacctgctttagagggtgggttaagcaactgcagattgattacaagaaccacgagatcatgaccgcagcggcctcacaggggcttaccagaaaaggggtatacgcagtgcgctacaaggtcaatgagaacccgctatacgcacagacatctgagcatgtgaatgtattacttacacgcacagaaaaacgtatagtatggaagactttggccggtgacccttggatcaagacgttgacagcatcgtacccgggtaatttcaccgccacattggaagaatggcaagctgagcatgacgctatcatggcgaaaatacttgagacaccagctagcagtgacgttttccaaaataaagtgaacgtctgctgggccaaagcgctagaacctgtgttggccaccgccaatattacgctgacccgctcgcagtgggagactattccagcgttcaaggatgacaaagcgtattcgcctgagatggccttaaactttttctgcaccagattctttggcgtcgacatcgacagcgggttgttctccgcgccaactgttccgctgacttacaccaatgaacactgggataatagcccaggtccaaacatgtatgggttgtgcatgcgcactgctaaagaacttgcacgtcggtatccttgtattctgaaagccgtggatacaggtagagtggctgacgttcgcacagacactatcaaagactataacccgctaataaatgtggtacccctgaatagaagactcccacactcattggttgtcacacacagatacactgggaacggtgattactcccagctagtgaccaagatgacaggaaaaaccgtactagtagtgggtacacctacgaacataccaggaaagagagtcgagacattaggcccaagcccacaatgtacatataaagcggaactggacctgggcattcctgccgctttaggcaaatatgacatcatttttattaacgtgaggactccctaccgacaccaccattaccaacagtgcgaggaccatgcgatccaccacagcatgcttactagaaaagcagtggaccatttgaacaaaggcggtacgtgcatcgcattgggctatgggactgcggacagagccaccgagaacattatctctgcagtcgcccgctcattcaggttctcacgtgtgtgccagccgaagtgtgcctgggaaaacactgaggtcgcgttcgtgtttttcggcaaggacaacggcaaccatctccaagatcaagataggttgagtgttgtgttaaacaacatataccaagggtcaactcaacatgaagctggcagagcacctgcgtatagagtggtgcgtggcgacataacaaagagcaatgatgaggttattgttaacgcggcgaacaacaaagggcaacccggtggcggtgtgtgtggcgccctttacaggaagtggcctggagcttttgataagcagccggtagcaactggtaaagcgcaccttgtcaagcattctccgaacgtcatccatgccgttggccctaatttttctcggctatcagaaaacgaaggagaccagaaattgtctgaagtgtacatggacattgccagaattatcaataacgagaggtttactaaagtctccattccgttgttatctaccggcatttacgcaggtggtaaggacagggttatgcaatcgctgaaccatttatttacagccatggatactaccgacgcagacatcactatttactgtctagataagcaatgggagtcaagaataaaggaagctatcactcggaaggaaagcgttgaagagcttactgaggatgacagaccagttgacattgaactggtacgggtgcacccgttgagcagcttggcaggtagacctggttattcaaccaccgagggcaaggtgtattcgtacctagaggggactaggtttcatcaaactgccaaagacatagctgaaatttacgctatgtggcctaacaagcaagaagcaaacgagcagatttgcttatacgtgttgggagagagtatgaacagcatccgctctaagtgtcctgttgaagagtcggaagcctcttccccccctcacaccatcccgtgtctgtgcaactatgcaatgactgcagagcgagtttacagattacgtatggcaaagaatgaacaattcgcagtttgttcgtcctttcagttaccgaaatacaggattacaggggttcagaaaattcaatgcagtaaacctgtgatattctccggcactgtacccccggccatacatccaagaaaattcgcatctgtgacagtggaagacactccggtggtccaacctgaaagattggtgcctaggcgacctgcaccacctgtgcccgtacctgcaagaatccccagccctccatgtacatcgaccaacggatcgacgaccagtatacaatcactgggggaggatcaaagcgcatctgcttctagcggagctgaaatctctgtagaccaggtttcgctatggagcatacccagcgctactgggttcgatgtgcgtacctcctcatcgttgagtctagagcagcctacctttccgacaatggttgtcgaagctgagattcacgccagtcaaggatcactgtggagtatacccagtatcaccggatctgaaacccgtgttccgtcacctccaagtcaggatagtagaccttccaccccatctgcaagtgcttcacacacgtccgtggacttaatcacgtttgacagcgttgcagagattttggaggatttcagtcgttcgccgtttcaatttttgtctgaaatcaaacctattccagcacctcgtacccgagttaataacatgagccgcagcgcagacacgatcaaaccaattccaaagccgcgtaaatgccaggtgaagtacacgcagccacctggcgtcgccagggccatatcggcagcggaatttgacgagtttgtgcggaggcactcgaattgacggtacgaagcgggcgcgtacattttctcatccgagacgggacaagggcacctgcaacaaaaatctacgcggcaatgcaaactccagtatccaatcctggagcgttccgtccatgagaaattttacgccccgcgcctcgatctcgagcgtgagaagctgttgcagaagaaactacaattgtgtgcttctgaaggtaatcggagcaggtatcagtctcgtaaagtagagaacatgaaggcaatcaccgttgagcgtctactgcaggggataggctcatatctctctgcagaaccgcaaccagttgaatgctacaaagttacctatcctgctcctatgtattcaagtactgcaagcaacagcttttcatcagcagaagtggccgtcaaagtttgcaacctagtactgcaagagaattttcccactgtagccagctataacataacggatgagtatgatgcctatcttgacatggtggacggagcatcctgctgtttagatactgccaccttttgcccagctaaattaaggagctttccaaagaagcacagttatttgcggcctgagatacgatcagcagtgccatcaccgattcaaaacacgctccagaatgtactagcagcagccacgaaaaggaattgcaatgttactcaaatgagggaacttccagtgttggattcagctgccttcaacgtagagtgtttcaaaaagtacgcctgtaacgatgagtactgggacttctacaagacaaacccgataagactcaccgcagaaaatgttactcagtatgttactaagttaaagggacccaaagcagctgccctttttgcgaaaacgcataacttacagccattgcatgagataccaatggatagattcgtgatggaccttaaacgggatgtcaaggtcacacccgggacaaaacatactgaagaaagaccaaaagttcaggtgatacaggcagctgatccacttgcaaccgcctacctatgtggtatacatcgagagcttgtgcgcaggttgaacgcagtgctgctaccgaatatccacactttgtttgacatgtctgcagaagattttgatgctatcattgcagaacactttcaattcggcgacgcggtgctagagacagacatagcttcttttgataaaagcgaggacgatgctatcgccatgtccgctctaatgattcttgaagacctaggagttgatcaggcactgttaaacctaattgaagcagcctttgggaacataacatctgtgcacttaccaacaggcacccgatttaagttcggggcaatgatgaaatccgggatgtttttgacactctttatcaatactgttgtcaatatcatgatcgctagccgcgtgctccgcgagcggttgaccacttccccctgcgcagcatttatcggcgacgacaacatcgtgaaaggggttacatctgacgcactgatggcagagcggtgcgccacgtggttgaacatggaagtgaagatcatcgatgcagtagtcggagtaaaggcaccgtacttttgcggagggttcatcgtagtcgatcagattacaggaactgcgtgcagagtcgccgaccccctgaagagactgtttaagctaggtaagccgcttccactggacgatgaccaagacgtcgacaggcgcagagctctgcatgatgaagcggcacgttggaacagaattggcatcactgaagagctggtgaaagcagttgaatcacgctacgaggtgaactacgtgtcactaatcatcacagcgttgaccacattagcatcttcagttagcaactttaaacacataagaggtcaccccataaccctctacggctgacctaaataggttgtgcattagtacctaacctatttatattatattgctatctaaatatcagagatgttcccataccctacacttaactacccgcctatggcgccgatcaacccgatggcttaccgggatcctaatccgcctaggcgcaggtggcggccctttaggccaccacttgcagctcaaattgaggacctgagacgttccattgctagcctgactttgaaacaacgagcacctaatcctccagcaggaccgcccgccaaacgcaagaagcctgcgcccaagcctaagcctgcgcaggcgaaaaagaaacgaccaccaccacctgccaagaaacaaaaacgtaaacctaaaccaggcaaacgacagcgaatgtgtatgaagctagagtcagataaaacgtttccgatcatgttgaacggacaggtgaatggttacgcgtgcgtcgtgggtggacgagtgtttaaaccgctgcacgtagaaggcagaatagacaatgagcaactggccgccatcaagctgaagaaggccagcatatatgaccttgagtacggtgatgtgccacaatgcatgaaatcagataccctccagtacaccagtgacaagcctcctggcttttataactggcatcatggagctgtacagtatgagaacaataggttcaccgtaccacgaggggtcggtggaaagggtgacagcgggagacctattcttgacaacaaaggtagagtcgtcgcaattgtcctgggtggagtcaacgaaggatccaggacggctctatcagtggtgacatggaaccaaaaaggggttacagtcaaagatacaccagaggggtcagagccatggtcgcttgccactgtcatgtgcgtcctggccaatatcacgtttccatgtgatcaaccaccctgcatgccatgctgttatgaaaagaatccacacgaaacactcaccatgttggaacagaattacgacagccgagcctatgatcagctgctcgatgccgctgtgaaatgtaatgctaggagaaccaggagagatttggacactcatttcacccagtataagctggcacgcccgtatattgctgattgccctaactgtgggcatagtcggtgcgacagccctatagctatagaagaagtcagaggggatgcgcatgcaggagtcatccgcatccagacatcagctatgttcggtctgaagacggatggagtcgatttggcctacatgagtttcatgaacggcaaaacgcagaaatcaataaagatcgacaacctgcatgtgcgcacctcagccccttgttccctcgtgtcgcaccacggctattacatcctggctcaatgcccaccaggagacacggttacagttgggtttcacgacgggcctaaccgccatacgtgcacagttgcccataaggtagaattcaggccagtgggtagagagaaataccgtcacccaccagaacatggagttgaattaccatgcaaccgttacactcacaagcgtgcagaccaaggacactacgttgagatgcatcaacccgggctagttgccgaccactctctccttagcatccacagtgccaaggtgaaaattacggtaccgagcggcgcccaggtgaaatactactgcaagtgcccagatgtacgaaagggaattaccagcagcgaccatacaaccacctgcacggatgtcaaacaatgcagggcttacctgattgacaacaaaaaatgggtgtacaactctggaagactgcctcgaggagagggcgacacttttaaaggaaaacttcatgtgccctttgtgcctgttaaggccaagtgcatcgccacgctggcaccagagcctctagttgagcacaaacaccgcaccctgattttacacctgcacccggaccatccgaccttgctgacgaccaggtcacttggaagtgatgcaaatccaactcgacaatggattgagcgaccaacaactgtcaatttcacagtcaccggagaagggttggagtatacctggggaaaccatccaccaaaaagagtatgggctcaagagtcaggagaagggaatccacacggatggccgcacgaagtggtagtctattactacaacagatacccattaaccacaattatcgggttatgcacctgtgtggctatcatcatggtctcttgtgtcacatccgtgtggctcctttgcagaactcgcaatctttgcataaccccgtataaactagccccgaacgctcaagtcccaatactcctggcgttactttgctgcattaagccgacgagggcagatgacaccttgcaagtgctgaattacctgtggaacaacaatcaaaactttttctggatgcagacgcttatcccacttgcagcgcttatcgtatgcatgcgcatgctgcgctgcttattttgctgtgggccggcttttttacttgtctgcggcgccttgggcgccgcagcgtacgaacacacagcagtgatgccgaacaaggtggggatcccgtataaagctttagtcgaacgcccaggttacgcacccgttcacctacagatacagctggttaataccaggataattccatcaactaacctggagtacatcacctgcaagtataagacaaaagtgccttctccagtagtgaaatgctgcggtgccactcaatgtacctccaaaccccatcctgactatcagtgtcaggtgttttcaggtgtttacccattcatgtggggaggagcctactgcttctgcgacactgaaaacacccagatgagcgaggcgtatgtagagcgctcggaagagtgctctattgaccacgcaaaagcttataaagtacacacaggcactgttcaggcaatggtaaacataacttatgggagcgtcagctggagatctgcagatgtttacgtcaatggtgaaactcccgcgaaaataggagatgccaaactcatcataggtccactgtcatcagcgtggtccccattcgataacaaggtggtggtttatgggcatgaagtgtataattacgactttcctgagtacggcaccggcaaagcaggctcttttggagacctgcaatcacgcacatcaaccagcaacgatctgtacgcaaacaccaacttgaagctacaacgaccccaggctggtatcgtgcacacacctttcacccaggtgccctctggcttcgaacgatggaaaaaggacaaaggggcaccgttgaacgacgtagccccgtttggctgttcgattgccctggagccgctccgtgcagaaaattgtgcagtgggaagcatccctatatctatagatatacccgatgcggctttcaccagaatatctgaaacaccgacagtctcagacctggaatgcaaaattacggagtgtacttatgccttcgatttcggtggtatagccaccgttgcctacaaatccagtaaagcaggaaactgtccaattcattctccatcaggtgttgcagttattaaagagaatgacgtcacgcttgctgagagcggatcatttacattccacttctccactgcaaacatccatcctgcttttaagctgcaggtctgcactagtgcagttacctgcaaaggagattgtaagccaccgaaagaccacatcgtcgattatccagcacaacatactgaatcctttacgtcggcgatatccgccaccgcgtggtcgtggataaaagtgctggtaggaggaacatcagcatttatcgttctggggcttattgctacagcagtggttgccctagttctgttcttccatagacattaacatcttgtcaaccacataacactacaggcagtgtataaggctgtcttactaaacactaaattcaccctagttcgatgtacttccgagctatggtgacggtggtgcataacgccgccgatgcagtgcataaggctgctatattaccacattataacactaagggcagtgcataatgctgctcctaagtaattttatacacactttataatcaggcataattgccgcatatacaattacactacaggtaatataccgcctcttataaacactacaggcagcgcataatgctgtctttcatatcaatttacaaaatcatattaattttcttttatgtttttattttgtttttaatatttc

SEQ ID NO: 176 - DNA, 11484 bp, Eastern equine encephalomyelitis virus
accctacaaactaatcgatccaatatggaaagaattcacgttgacttagatgctgacagcccgtatgtcaagtcgttacagcggacgtttccacaatttgagatcgaagcaaggcaggtcactgacaatgaccatgccaatgccagagcgttttcgcatgtggcaacaaagctcattgagagcgaagtcgaccgggaccaagttatcttggacattggaagtgcgcccgtcagacatgcacattccaatcaccgctatcattgtatctgccctatgataagcgctgaagacccggacagactacaacggtatgcagaaagacttaagaaaagtgacattaccgacaagaacatagcctctaaggcggcagacctgctggaagtcatgtcaacaccagacgcagagactccatctctgtgtatgcacacagacgccacgtgtaggtactttggaagtgtagcagtataccaagatgtgtacgcagtccatgcaccgacatcaatctaccaccaggcgcttaaaggagttaggacaatttactggataggctttgacacgaccccttttatgtacaaaaacatggcaggttcctaccctacttacaacacgaactgggctgacgagagagtattggaagcacgtaacattggcctcggtaactcagatcttcaggagagcaggcttggaaaactctcaatccttaggaagaagaggctccaacctactaataagatcatattctcggttggttcaacaatctacacagaagatagatcactgttacgtagctggcatcttccaaacgtgttccacttgaaaggaaagtctaacttcacaggtagatgtgggaccattgtcagctgtgaagggtacgtcatcaaaaagataacgatcagcccaggactatacggtaaagttgagaacttggcgtccacaatgcatcgcgagggtttcttgagttgcaaagtcacagatacgctgcgcggcgagagggtttcttttgctgtgtgtacgtatgtaccagccacactttgcgatcagatgacagggattctggcaactgacgttagtgtggatgacgcacaaaaactattggttgggctcaaccaaaggattgtcgtcaatggtaggacgcaaagaaatactaacacaatgcagaactatctattaccagtggtcgcccaggcgttttccaggtgggcgcgtgaacatcgtgccgacttggacgacgagaaagaactaggggtgcgggagcgcactcttactatgggctgctgctgggctttcaagacccagaaaatcacatccatctacaagaagcctggtacgcaaacaattaagaaagtacctgccgtctttgactcatttgtgattccacgccttaccagccacgggctcgatatgggcttccgccgtaggctcaagctgctgcttgaaccaactgtcaaacccgcaccggctattacaatggccgatgtggagcatctgcgtggcttacagcaagaagctgaagaagtggctgcagcggaagagatcagagaagccctgccacccttgctccctgaaatagaaaaagagaccgtagaggcagaagtagacctcattatgcaagaggcaggagcaggtagcgtggagacaccacgaggacacatcagggtgacaagttacccaggcgaagagaagattgggtcttacgctatactttcaccccaggcggtattgaatagtgaaaaactggcgtgtatccacccattggcggaacaagtactggtaatgactcacaaaggtagggcagggagatacaaagtcgagccataccacggtaaggtcattgtaccagaagggacggcggtccctgttcaagacttccaggcattgagtgagagcgctacgatcgttttcaacgagagggagttcgtaaacagatacctgcaccacatcgcaatcaacggaggagcgctaaacactgacgaagagtactataagactgtaaagactcaggacacagactcagaatacgtcttcgatattgacgcacgaaagtgtgttaagcgagaagacgcaggtcccttgtgcctaaccggtgatctggtagatccaccatttcacgagtttgcgtacgagagtctcaagacacgaccagcagcacctcacaaagtcccaaccatcggagtctatggagtgccaggttcaggtaaatctggaatcatcaaaagcgctgtgactaagaaagatctggttgtgagtgcgaagaaggaaaactgcgcagaaatcatcagggatgtaaggaggatgagacgtatggatgttgctgctaggactgtcgattcagtgcttctaaatggggttaagcaccccgttaacactctgtacattgatgaggcatttgcctgccatgcagggacgctgctggcactgattgccatcgtcaaacctaagaaagtggtattgtgcggggacccaaaacaatgcggcttctttaacatgatgtgcctgaaagtacattttaaccatgacatatgcactgaagtgtaccataaaagcatctctaggaggtgcacacagactgtaaccgccatcgtctccacgctcttctacgacaagcgaatgaagacggttaacccatgtgctgataaaatcatcatagataccacagggaccacaaagccgcacaaagatgatctgattctaacctgtttcagaggatgggtgaaacagctacagattgactacaaaaatcacgaaatcatgactgcggctgcatcgcaaggacttacgcggaaaggcgtttatgctgtcaggtacaaagtcaacgagaatccactctactcgcagacttctgagcacgtgaacgtgttacttacacgcacagaaaaacgcattgtctggaagacgctagctggtgatccctggataaagacacttacagctaaatatcccggggatttcacggcttcattggacgactggcagcgcgaacacgacgccattatggcacgcgttcttgataagccgcagacagctgatgtgttccagaataaggtgaacgtctgctgggcgaaggctttagagccagtcttggccacggccaacattgtgctgacgagacagcagtgggagacgttgcacccattcaagcatgacagagcgtactcacctgaaatggcactgaacttcttttgcaccaggttctttggagtagacctggacagtgggttattttccgctcctaccgtcgcacttacttacagggatcagcactgggataactcgccagggaagaacatgtatgggcttaatagagaggtagcaaaggagttgtcacggcgatatccgtgcatcacaaaagcggttgacacaggcagggtagctgatataaggaataataccatcaaggactactctccaacaattaatgtggttccattaaatcgccggttgccccactcgttgatcgttgaccacaaaggacagggtacaactgatcacagcggattcctatctaagatgaagggcaaatctgtgttggtgatcggcgatcctatcagcattccagggaagaaagtagagtccatgggtccattgcccactaataccatcaggtgtgatctcgatttgggaatacctagccatgtcggtaaatatgacattatctttgtcaatgttaggaccccgtacaggaaccatcactaccaacagtgcgaggatcacgctatccaccacagcatgctaacgtgtaaggctgtccaccacctgaacactggcggaacatgtgtggctatagggtatgggcttgctgatcgcgcaaccgagaatatcatcactgcggtggcacgctcatttaggtttacccgtgtctgtcagcctaagaacactgccgaaaatactgaggttctcttcgtgttcttcggcaaggacaacggcaaccacacacatgaccaggacagactcggtgtagtgcttgacaacatctatcaagggtcaaccaggtacgaggcagggagagctccagcgtacagagtgatcagaggtgacattagcaagagcgctgaccaagctatcgttaatgctgctaatagcaaaggtcaaccaggttccggagtgtgcggtgcactgtaccgaaaatggccggctgcttttgatagacagccaatagctgtcgggacggctagacttgtgaagcacgaaccgctcatcatacatgctgtaggacccaatttttctaagatgccggaaccggagggcgaccttaagctcgcagctgcctacatgagcatagcgtccatcgtcaacgctgagcggattacaaaaatatcagtaccgctactgtcaaccggcatctattctggtggcaaagatcgagtgatgcaatcattgcatcacctgttcactgctttcgacactacggatgccgatgtcaccatatattgcttggataaacaatgggagaccaggataatcgaggccattcaccgcaaagaaagcgtcgaaattctggatgatgacaagccagtagacattgacttggtcagggtccacccaaacagctctttggcaggcagaccaggttactccgtcaatgagggcaagttgtattcatacctggaaggtacacgattccatcagaccgccaaggacattgccgaaatccatgcaatgtggcccaacaaatctgaggctaatgagcagatttgcttgtacatcctgggggagagtatgtccagcatccgctccaaatgcccagtagaggagtcagaggcgtctgctccacctcacacacttccatgcctgtgtaattacgctatgacggctgagcgcgtatacaggttgcgctctgcgaagaaagaacagttcgccgtatgctcatcattcctgttgccgaagtacaggatcacaggcgtgcagaagctacagtgcagcaaaccagtcctgttttcaggcgtcgtaccaccggctgtacaccccaggaagtacgcggaaataattctagaaacgccaccaccgccagcaacgacaaccgtaatatgtgaaccaactgtgccagaacgtatacccagtccggtgatttctagagcaccaagtgcggaatcactgctatcgcttggcggcgtctcgttctctagctctgccacacgctcgtcaaccgcctggagcgactatgacaggcggtttgtggttacagctgatgtgcatcaagcgaacacgtctacgtggagcatccctagtgctcctggcttggacgtccagctgccttctgacgtcactgattcccactggagtattccaagtgcatcaggctttgaagtgagaacaccatctgtacaggacctaactgcggagtgtgcgaagcctcgtggactggccgaaataatgcaagacttcaatactgctcctttccagtttctttcggactacagaccagtaccggcaccacggagacgccccatcccatcacctagatcgacggcttccgcacctccagttccaaagccacgcaggactaagtaccaacaaccaccaggagtcgctagagcgatctcagaagcggagttggacgagtacatccgtcaacactccaactgacggtatgaagcgggagcgtatattttctcatcggaaacaggccaaggtcaccttcaacagaaatcagtacgtcaatgtaaactacaagaacctatattggatcgggccgtccatgagaagtattacgccccgcgcctcgatctcgaaagagagaaaatgttacagaagaaactgcaattatgcgcctctgaaggaaatagaagcaggtatcaatcacgaaaagtagaaaatatgaaagcaattacagcggagcgactcatttctggattgggcacatatctatcatcagaagtgaatcctgtcgagtgttacagagtcaattatcctgtaccaatctactcgtcaacggtaattaacaggtttacatctgcagaggtcgcggttaaaacgtgcaacttagttatccaagagaattaccctacagtagccagttattgtataacagatgaatacgatgcgtatcttgacatggtggacggcgcatcgtgctgtctagatacagccactttttgtccggctaaactgagaagctacccaaagaagcatagctatttgcagccagagataagatcagccgtcccatcgcctatacagaatacattacaaaatgtattggctgcagctactaaaaggaattgcaacgttacccaaatgcgagaattacctgtcttagattcggcggcatttaatgttgattgtttcaagaaatacgcatgcaatgatgagtactgggatacctttcgcgataaccctattcggctaactacagagaacgttacgcaatatgtgacaaagctgaaagggccgaaagcagcagcattgtttgcgaatactcataatctaaaaccgttgcaggagataccaatggatcaattcgtcatggatctaaagagagatgtcaaagttactcccggcacgaaacatacagaggagcggcctaaggtgcaggttattcaggctgcagatccccttgctaccgcttacctttgcgggatccatcgggaattagtccgtagactgaatgcggtgcttctgccaaatatccatactctcttcgacatgtcagcggaagattttgatgcgattattgctgaacatttccaccacggcgacccagtattggaaacggacatcgcgtcgtttgataaaagcgaagacgacgctatcgccatttcggcgttgatgatccttgaggacttaggtgtcgaccaaccgctcttagatttgatagaggcggcgttcggcaatatcacatctgtgcacctacctacaggaacgaggtttaaatttggtgccatgatgaaatccggtatgttcttaacgctgtttgtcaacacactagtcaatatcatgattgctagcagagtactacgtgaacggttaaccacgtcagcgtgcgcggcctctatcggcgacgataacatagtgcatggtgtcgtctccgacaccttgatggcggagagatgcgccacttggctgaacatggaagtaaaaattattgatgcagttattggtatcaaagcaccctacttctgtgggggatttatcctggtggaccagataacaggcacagcctgcagagtcgcagaccctctaaaaaggctttttaagcttggaaaaccattgccagtcgatgatacccaagactgcgaccgccgccgggcactgcatgatgaagcaatgcgatggaacagaattggaattacggacgagttagtgaaggccgtagaatccagatacgagatcatactggcaggcctgatcatcacgtctctgtccacgttagccgaaagcgttaagaacttcaagagcataagagggagcccaatcaccctctacggctgacctaaataggtgacgtagtagacacgcacctacccaccggcagaatgtttccataccctcagctgaactttccaccagtttaccctacaaatccgatggcttaccgagatccaaaccctcctaggcgccgctggaggccgtttcggcccccgctggctgctcaaatcgaagatcttaggaggtcgatagtcaacttgactttcaaacaacgatcacctaatccgccgccaggtccaccgccaaagaagaagaagagtgctcctaagccaaaacctactcagcctaaaaagaagaagcagcaagccaagaggacgaaacgcaagcctaaaccagggaaacgacaacgtatgtgtatgaagttggagtcggacaagacatttccgatcatgctgaacggccaagtgaatggatatgcctgcgttgtcggaggaaggctgatgaaaccactccacgttgaaggaaaaattgataatgagcaattagcggccgtgaaattgaagaaggctagcatgtacgacttggagtacggcgacgttccccagaacatgaaatcagacacgctgcagtacaccagcgacaaaccaccgggcttctacaactggcaccacggcgcagtccagtatgagaatgggagatttaccgtaccgagaggagtgggcgggaaaggcgacagcggaagaccgatcctggacaacagaggcagagttgtggctattgttctaggaggtgcaaatgagggcacgcgtacggcgctttcagtggtcacttggaaccagaaaggggtgaccattagggatacccccgaaggttctgaaccgtggtcactagttacagcgctatgcgtgctttcgaatgtcacgttcccatgcgacaaaccacccgtgtgctattcactgacgccagaacgaacactcgacgtgctcgaagagaacgtcgacaatccaaattacgacacgctgctggagaacgtcttgaaatgtccatcacgccggcccaaacgaagcattaccgatgacttcacactgaccagtccctacctggggttctgcccgtattgcagacactcaacgccgtgtttcagcccaataaaaattgagaacgtgtgggacgaatctgatgatggatcgattagaatccaggtctcggcacaattcggctacaatcaggcaggcactgcggatgtcaccaaattccgttacatgtctttcgaccacgaccatgacatcaaggaagacagtatggagaaaatagctatcagcacatctggaccctgccgtcgtcttggccacaaagggtacttcctgttagctcaatgtcctccaggtgacagtgtaaccgtcagtatcacgagcggagcatctgagaattcatgcaccgtggagaaaaagatcaggaggaagtttgtcggtagagaggagtacttgttcccacccgtccatggaaagctggtaaagtgccacgtttacgatcacttgaaggagacgtctgccgggtacataaccatgcacaggccaggcccacacgcgtataagtcctatctggaggaagcgtcaggcgaagtgtacattaaaccaccttctggcaagaacgtcacctacgaatgtaagtgtggcgactacagcacaggtatcgtgagcacgcgaacgaagatgaacggctgcactaaagcaaaacagtgcattgcctacaagagcgaccaaacgaaatgggtcttcaactcgccggatcttattaggcacacagaccactcagtgcaaggtaaattgcacattccattccgcttgacaccgacagtctgcccggttccgttagctcacacgcctacagtcacgaagtggttcaaaggcatcaccctccacctgactgcaatgcgaccaacattgctgacaacgagaaaattggggctgcgagcagacgcaacagcagaatggattacagggtctacatccaggaatttttctgtggggcgagaagggctggagtacgtatggggtaaccatgaaccagtcagagtctgggcccaggagtcggcaccaggcgacccacatggatggccgcatgagatcatcatccactattatcatcggcatccagtctacactgtcattgtgctgtgtggtgtcgctcttgctatcctggtaggcactgcatcatcagcagcttgcatcgccaaagcaagaagagactgcctgacgccatacgcgcttgcaccgaacgcaacggtacccacagcattagcggttttgtgctgcattcggccaaccaacgctgaaacatttggagaaactttgaaccatctgtggtttaacaaccaaccgtttctctgggcacagttgtgcattcctctggcagcgcttgttattctgttccgctgcttttcatgctgcatgccttttttattggttgcaggcgtctgcctggggaaggtagacgccttcgaacatgcgaccactgtgccaaatgttccggggatcccgtataaggcgttggtcgaacgcgcaggttacgcgccacttaacctggagatcacggtcgtctcatcggaattaacaccttcaactaacaaggagtacgtgacctgcaaattccacacagtcattccttcaccacaagttaaatgctgcgggtccctcgagtgcaaggcatcctcaaaggcggattacacatgccgcgtttttggcggtgtgtaccctttcatgtggggaggcgcacaatgcttctgtgacagtgagaacacacaactgagtgaggcgtacgtcgagttcgctccagactgcactatagatcacgcagtcgcactaaaagttcacacagctgctctgaaagtcggcctgcgtatagtatacggcaacaccaccgcgcacctggatacgtttgtcaatggcgtcacgccaggttcctcacgggacctgaaggtcatagcagggccgatatcagccgctttttcaccctttgaccataaggtcgtcatcagaaaggggcttgtttacaactacgacttccctgagtatggagctatgaaaccaggagcgttcggcgatattcaagcatcctcgcttgatgctacagacatagtagcccgcactgacatacggctgctgaagccttctgtcaagaacatccacgtcccctacacccaagcagtatcagggtatgaaatgtggaagaacaactcaggacgacccctgcaagaaacagcaccatttggatgtaaaattgaagtggagcctctgcgagcgtctaactgtgcttacgggcacatccctatctcgattgacatccctgatgcagcttttgtgagatcatcagaatcaccaacaattttagaagttagctgcacagtagcagactgcatttattctgcagactttggtggttctctaacattacagtacaaagctgacagggagggacattgtccagttcactcccactccacgacagctgttttgaaggaagcgaccacacatgtgactgccgtaggcagcataacactacattttagcacatcgagcccacaagcaaattttatagtttcgctatgcggcaagaagtccacctgcaatgctgaatgtaaaccaccggccgaccacataattggagaaccacataaagtcgaccaagaattccaggcggcagtttccaaaacatcttggaactggctgcttgcactgtttgggggagcatcatccctcattgttgtaggacttatagtgttggtctgcagctctatgcttataaacacacgtagatgactgagcgcggacactgacatagcggtaaaactcgatgtacttccgaggaagcgtggtgcataatgccacgcgccgcttgacactaaaactcgatgtatttccgaggaagcacagtgcataatgctgtgcagtgtcacattaatcgtatatcacactacatattaacaacactatatcacttttatgagactcactatgggtctctaatatacactacacatattttacttaaaaacactatacacactttataaattcttttataatttttcttttgtttttattttgtttttaaaatttc

SEQ ID NO: 177 - DNA, 11447 bp, Venezuelan equine encephalitis virus
atgggcggcgcatgagagaagcccagaccaattacctacccaaaatggagaaagttcacgttgacatcgaggaagacagcccattcctcagagctttgcagcggagcttcccgcagtttgaggtagaagccaagcaggtcactgataatgaccatgctaatgccagagcgttttcgcatctggcttcaaaactgatcgaaacggaggtggacccatccgacacgatccttgacattggaagtgcgcccgcccgcagaatgtattctaagcacaagtatcattgtatctgtccgatgagatgtgcggaagatccggacagattgtataagtatgcaactaagctgaagaaaaactgtaaggaaataactgataaggaattggacaagaaaatgaaggagctcgccgccgtcatgagcgaccctgacctggaaactgagactatgtgcctccacgacgacgagtcgtgtcgctacgaagggcaagtcgctgtttaccaggatgtatacgcggttgacggaccgacaagtctctatcaccaagccaataagggagttagagtcgcctactggataggctttgacaccaccccttttatgtttaagaacttggctggagcatatccatcatactctaccaactgggccgacgaaaccgtgttaacggctcgtaacataggcctatgcagctctgacgttatggagcggtcacgtagagggatgtccattcttagaaagaagtatttgaaaccatccaacaatgttctattctctgttggctcgaccatctaccacgagaagagggacttactgaggagctggcacctgccgtctgtatttcacttacgtggcaagcaaaattacacatgtcggtgtgagactatagttagttgcgacgggtacgtcgttaaaagaatagctatcagtccaggcctgtatgggaagccttcaggctatgctgctacgatgcaccgcgagggattcttgtgctgcaaagtgacagacacattgaacggggagagggtctcttttcccgtgtgcacgtatgtgccagctacattgtgtgaccaaatgactggcatactggcaacagatgtcagtgcggacgacgcgcaaaaactgctggttgggctcaaccagcgtatagtcgtcaacggtcgcacccagagaaacaccaataccatgaaaaattaccttttgcccgtagtggcccaggcatttgctaggtgggcaaaggaatataaggaagatcaagaagatgaaaggccactaggactacgagatagacagttagtcatggggtgttgttgggcttttagaaggcacaagataacatctatttataagcgcccggatacccaaaccatcatcaaagtgaacagcgatttccactcattcgtgctgcccaggataggcagtaacacattggagatcgggctgagaacaagaatcaggaaaatgttagaggagcacaaggagccgtcacctctcattaccgccgaggacgtacaagaagctaagtgcgcagccgatgaggctaaggaggtgcgtgaagccgaggagttgcgcgcagctctaccacctttggcagctgatgttgaggagcccactctggaagccgatgtcgacttgatgttacaagaggctggggccggctcagtggagacacctcgtggcttgataaaggttaccagctacgctggcgaggacaagatcggctcttacgctgtgctttctccgcaggctgtactcaagagtgaaaaattatcttgcatccaccctctcgctgaacaagtcatagtgataacacactctggccgaaaagggcgttatgccgtggaaccataccatggtaaagtagtggtgccagagggacatgcaatacccgtccaggactttcaagctctgagtgaaagtgccaccattgtgtacaacgaacgtgagttcgtaaacaggtacctgcaccatattgccacacatggaggagcgctgaacactgatgaagaatattacaaaactgtcaagcccagcgagcacgacggcgaatacctgtacgacatcgacaggaaacagtgcgtcaagaaagaactagtcactgggctagggctcacaggcgagctggtggatcctcccttccatgaattcgcctacgagagtctgagaacacgaccagccgctccttaccaagtaccaaccataggggtgtatggcgtgccaggatcaggcaagtctggcatcattaaaagcgcagtcaccaaaaaagatctagtggtgagcgccaagaaagaaaactgtgcagaaattataagggacgtcaagaaaatgaaagggctggacgtcaatgccagaactgtggactcagtgctcttgaatggatgcaaacaccccgtagagaccctgtatattgacgaagcttttgcttgtcatgcaggtactctcagagcgctcatagccattataagacctaaaaaggcagtgctctgcggggatcccaaacagtgcggtttttttaacatgatgtgcctgaaagtgcattttaaccacgagatttgcacacaagtcttccacaaaagcatctctcgccgttgcactaaatctgtgacttcggtcgtctcaaccttgttttacgacaaaaaaatgagaacgacgaatccgaaagagactaagattgtgattgacactaccggcagtaccaaacctaagcaggacgatctcattctcacttgtttcagagggtgggtgaagcagttgcaaatagattacaaaggcaacgaaataatgacggcagctgcctctcaagggctgacccgtaaaggtgtgtatgccgttcggtacaaggtgaatgaaaatcctctgtacgcacccacctcagaacatgtgaacgtcctactgacccgcacggaggaccgcatcgtgtggaaaacactagccggcgacccatggataaaaacactgactgccaagtaccctgggaatttcactgccacgatagaggagtggcaagcagagcatgatgccatcatgaggcacatcttggagagaccggaccctaccgacgtcttccagaataaggcaaacgtgtgttgggccaaggctttagtgccggtgctgaagaccgctggcatagacatgaccactgaacaatggaacactgtggattattttgaaacggacaaagctcactcagcagagatagtattgaaccaactatgcgtgaggttctttggactcgatctggactccggtctattttctgcacccactgttccgttatccattaggaataatcactgggataactccccgtcgcctaacatgtacgggctgaataaagaagtggtccgtcagctctctcgcaggtacccacaactgcctcgggcagttgccactggaagagtctatgacatgaacactggtacactgcgcaattatgatccgcgcataaacctagtacctgtaaacagaagactgcctcatgctttagtcctccaccataatgaacacccacagagtgacttttcttcattcgtcagcaaattgaagggcagaactgtcctggtggtcggggaaaagttgtccgtcccaggcaaaatggttgactggttgtcagaccggcctgaggctaccttcagagctcggctggatttaggcatcccaggtgatgtgcccaaatatgacataatatttgttaatgtgaggaccccatataaataccatcactatcagcagtgtgaagaccatgccattaagcttagcatgttgaccaagaaagcttgtctgcatctgaatcccggcggaacctgtgtcagcataggttatggttacgctgacagggccagcgaaagcatcattggtgctatagcgcggcagttcaagttttcccgggtatgcaaaccgaaatcctcacttgaagagacggaagttctgtttgtattcattgggtacgatcgcaaggcccgtacgcacaatccttacaagctttcatcaaccttgaccaacatttatacaggttccagactccacgaagccggatgtgcaccctcatatcatgtggtgcgaggggatattgccacggccaccgaaggagtgattataaatgctgctaacagcaaaggacaacctggcggaggggtgtgcggagcgctgtataagaaattcccggaaagcttcgatttacagccgatcgaagtaggaaaagcgcgactggtcaaaggtgcagctaaacatatcattcatgccgtaggaccaaacttcaacaaagtttcggaggttgaaggtgacaaacagttggcagaggcttatgagtccatcgctaagattgtcaacgataacaattacaagtcagtagcgattccactgttgtccaccggcatcttttccgggaacaaagatcgactaacccaatcattgaaccatttgctgacagctttagacaccactgatgcagatgtagccatatactgcagggacaagaaatgggaaatgactctcaaggaagcagtggctaggagagaagcagtggaggagatatgcatatccgacgactcttcagtgacagaacctgatgcagagctggtgagggtgcatccgaagagttctttggctggaaggaagggctacagcacaagcgatggcaaaactttctcatatttggaagggaccaagtttcaccaggcggccaaggatatagcagaaattaatgccatgtggcccgttgcaacggaggccaatgagcaggtatgcatgtatatcctcggagaaagcatgagcagtattaggtcgaaatgccccgtcgaagagtcggaagcctccacaccacctagcacgctgccttgcttgtgcatccatgccatgactccagaaagagtacagcgcctaaaagcctcacgtccagaacaaattactgtgtgctcatcctttccattgccgaagtatagaatcactggtgtgcagaagatccaatgctcccagcctatattgttctcaccgaaagtgcctgcgtatattcatccaaggaagtatctcgtggaaacaccaccggtagacgagactccggagccatcggcagagaaccaatccacagaggggacacctgaacaaccaccacttataaccgaggatgagaccaggactagaacgcctgagccgatcatcatcgaagaggaagaagaggatagcataagtttgctgtcagatggcccgacccaccaggtgctgcaagtcgaggcagacattcacgggccgccctctgtatctagctcatcctggtccattcctcatgcatccgactttgatgtggacagtttatccatacttgacaccctggagggagctagcgtgaccagcggggcaacgtcagccgagactaactcttacttcgcaaagagtatggagtttctggcgcgaccggtgcctgcgcctcgaacagtattcaggaaccctccacatcccgctccgcgcacaagaacaccgtcacttgcacccagcagggcctgctcgagaaccagcctagtttccaccccgccaggcgtgaatagggtgatcactagagaggagctcgaggcgcttaccccgtcacgcactcctagcaggtcggtctcgagaaccagcctggtctccaacccgccaggcgtaaatagggtgattacaagagaggagtttgaggcgttcgtagcacaacaacaatgacggtttgatgcgggtgcatacatcttttcctccgacaccggtcaagggcatttacaacaaaaatcagtaaggcaaacggtgctatccgaagtggtgttggagaggaccgaattggagatttcgtatgccccgcgcctcgaccaagaaaaagaagaattactacgcaagaaattacagttaaatcccacacctgctaacagaagcagataccagtccaggaaggtggagaacatgaaagccataacagctagacgtattctgcaaggcctagggcattatttgaaggcagaaggaaaagtggagtgctaccgaaccctgcatcctgttcctttgtattcatctagtgtgaaccgtgccttttcaagccccaaggtcgcagtggaagcctgtaacgccatgttgaaagagaactttccgactgtggcttcttactgtattattccagagtacgatgcctatttggacatggttgacggagcttcatgctgcttagacactgccagtttttgccctgcaaagctgcgcagctttccaaagaaacactcctatttggaacccacaatacgatcggcagtgccttcagcgatccagaacacgctccagaacgtcctggcagctgccacaaaaagaaattgcaatgtcacgcaaatgagagaattgcccgtattggattcggcggcctttaatgtggaatgcttcaagaaatatgcgtgtaataatgaatattgggaaacgtttaaagaaaaccccatcaggcttactgaagaaaacgtggtaaattacattaccaaattaaaaggaccaaaagctgctgctctttttgcgaagacacataatttgaatatgttgcaggacataccaatggacaggtttgtaatggacttaaagagagacgtgaaagtgactccaggaacaaaacatactgaagaacggcccaaggtacaggtgatccaggctgccgatccgctagcaacagcgtatctgtgcggaatccaccgagagctggttaggagattaaatgcggtcctgcttccgaacattcatacactgtttgatatgtcggctgaagactttgacgctattatagccgagcacttccagcctggggattgtgttctggaaactgacatcgcgtcgtttgataaaagtgaggacgacgccatggctctgaccgcgttaatgattctggaagacttaggtgtggacgcagagctgttgacgctgattgaggcggctttcggcgaaatttcatcaatacatttgcccactaaaactaaatttaaattcggagccatgatgaaatctggaatgttcctcacactgtttgtgaacacagtcattaacattgtaatcgcaagcagagtgttgagagaacggctaaccggatcaccatgtgcagcattcattggagatgacaatatcgtgaaaggagtcaaatcggacaaattaatggcagacaggtgcgccacctggttgaatatggaagtcaagattatagatgctgtggtgggcgagaaagcgccttatttctgtggagggtttattttgtgtgactccgtgaccggcacagcgtgccgtgtggcagaccccctaaaaaggctgtttaagcttggcaaacctctggcagcagacgatgaacatgatgatgacaggagaagggcattgcatgaagagtcaacacgctggaaccgagtgggtattctttcagagctgtgcaaggcagtagaatcaaggtatgaaaccgtaggaacttccatcatagttatggccatgactactctagctagcagtgttaaatcattcagctacctgagaggggcccctataactctctacggctaacctgaatggactacgacatagtctagtccgccaagatgttcccgttccagccaatgtatccgatgcagccaatgccctatcgcaacccgttcgcggccccgcgcaggccctggttccccagaaccgacccttttctggcgatgcaggtgcaggaattaacccgctcgatggctaacctgacgttcaagcaacgccgggacgcgccacctgaggggccatccgctaagaaaccgaagaaggaggcctcgcaaaaacagaaagggggaggccaagggaagaagaagaagaaccaagggaagaagaaggctaagacagggccgcctaatccgaaggcacagaatggaaacaagaagaagaccaacaagaaaccaggcaagagacagcgcatggtcatgaaattggaatctgacaagacgttcccaatcatgttggaagggaagataaacggctacgcttgtgtggtcggagggaagttattcaggccgatgcatgtggaaggcaagatcgacaacgacgttctggccgcgcttaagacgaagaaagcatccaaatacgatcttgagtatgcagatgtgccacagaacatgcgggccgatacattcaaatacacccatgagaaaccccaaggctattacagctggcatcatggagcagtccaatatgaaaatgggcgtttcacggtgccgaaaggagttggggccaagggagacagcggacgacccattctggataaccagggacgggtggtcgctattgtgctgggaggtgtgaatgaaggatctaggacagccctttcagtcgtcatgtggaacgagaagggagttaccgtgaagtatactccggagaactgcgagcaatggtcactagtgaccaccatgtgtctgctcgccaatgtgacgttcccatgtgctcaaccaccaatttgctacgacagaaaaccagcagagactttggccatgctcagcgttaacgttgacaacccgggctacgatgagctgctggaagcagctgttaagtgccccggaaggaaaaggagatccaccgaggagctgtttaaggagtataagctaacgcgcccttacatggccagatgcatcagatgtgcagttgggagctgccatagtccaatagcaatcgaggcagtaaagagcgacgggcacgacggttatgttagacttcagacttcctcgcagtatggcctggattcctccggcaacttaaagggcaggaccatgcggtatgacatgcacgggaccattaaagagataccactacatcaagtgtcactccatacatctcgcccgtgtcacattgtggatgggcacggttatttcctgcttgccaggtgcccggcaggggactccatcaccatggaatttaagaaagattccgtcacacactcctgctcggtgccgtatgaagtgaaatttaatcctgtaggcagagaactctatactcatcccccagaacacggagtagagcaagcgtgccaagtctacgcacatgatgcacagaacagaggagcttatgtcgagatgcacctcccgggctcagaagtggacagcagtttggtttccttgagcggcagttcagtcaccgtgacacctcctgttgggactagcgccctggtggaatgcgagtgtggcggcacaaagatctccgagaccatcaacaagacaaaacagttcagccagtgcacaaagaaggagcagtgcagagcatatcggctgcagaacgataagtgggtgtataattctgacaaactgcccaaagcagcgggagccaccttaaaaggaaaactgcatgtcccattcttgctggcagacggcaaatgcaccgtgcctctagcaccagaacctatgataacctttggtttcagatcagtgtcactgaaactgcaccctaagaatcccacatatctaaccacccgccaacttgctgatgagcctcactacacgcacgagctcatatctgaaccagctgttaggaattttaccgtcaccgaaaaagggtgggagtttgtatggggaaaccacccgccgaaaaggttttgggcacaggaaacagcacccggaaatccacatgggctaccgcacgaggtgataactcattattaccacagataccctatgtccaccatcctgggtttgtcaatttgtgccgccattgcaaccgtttccgttgcagcgtctacctggctgttttgcagatctagagttgcgtgcctaactccttaccggctaacacctaacgctaggataccattttgtctggctgtgctttgctgcgcccgcactgcccgggccgagaccacctgggagtccttggatcacctatggaacaataaccaacagatgttctggattcaattgctgatccctctggccgccttgatcgtagtgactcgcctgctcaggtgcgtgtgctgtgtcgtgccttttttagtcatggccggcgccgcaggcgccggcgcctacgagcacgcgaccacgatgccgagccaagcgggaatctcgtataacactatagtcaacagagcaggctacgcaccactccctatcagcataacaccaacaaagatcaagctgatacctacagtgaacttggagtacgtcacctgccactacaaaacaggaatggattcaccagccatcaaatgctgcggatctcaggaatgcactccaacttacaggcctgatgaacagtgcaaagtcttcacaggggtttacccgttcatgtggggtggtgcatattgcttttgcgacactgagaacacccaagtcagcaaggcctacgtaatgaaatctgacgactgccttgcggatcatgctgaagcatataaagcgcacacagcctcagtgcaggcgttcctcaacatcacagtgggagaacactctattgtgactaccgtgtatgtgaatggagaaactcctgtgaatttcaatggggtcaaattaactgcaggtccgctttccacagcttggacaccctttgatcgcaaaatcgtgcagtatgccggggagatctataattatgattttcctgagtatggggcaggacaaccaggagcatttggagatatacaatccagaacagtctcaagctcagatctgtatgccaataccaacctagtgctgcagagacccaaagcaggagcgatccacgtgccatacactcaggcaccttcgggttttgagcaatggaagaaagataaagctccatcattgaaatttaccgcccctttcggatgcgaaatatatacaaaccccattcgcgccgaaaactgtgctgtagggtcaattccattagcctttgacattcccgacgccttgttcaccagggtgtcagaaacaccgacactttcagcggccgaatgcactcttaacgagtgcgtgtattcttccgactttggtgggatcgccacggtcaagtactcggccagcaagtcaggcaagtgcgcagtccatgtgccatcagggactgctaccctaaaagaagcagcagtcgagctaaccgagcaagggtcggcgactatccatttctcgaccgcaaatatccacccggagttcaggctccaaatatgcacatcatatgttacgtgcaaaggtgattgtcaccccccgaaagaccatattgtgacacaccctcagtatcacgcccaaacatttacagccgcggtgtcaaaaaccgcgtggacgtggttaacatccctgctgggaggatcagccgtaattattataattggcttggtgctggctactattgtggccatgtacgtgctgaccaaccagaaacataattgaatacagcagcaattggcaagctgcttacatagaactcgcggcgattggcatgccgccttaaaatttttattttattttttcttttcttttccgaatcggattttgtttttaatatttc

SEQ ID NO: 178 - DNA, 11657 bp, Ross River virus
  misc_feature (1)..(2): n is a, c, g, or t
  misc_feature (539)..(540): n is a, c, g, or t
  misc_feature (790)..(790): n is a, c, g, or t
  misc_feature (807)..(807): n is a, c, g, or t
  misc_feature (2762)..(2763): n is a, c, g, or t
  misc_feature (3825)..(3827): n is a, c, g, or t
  misc_feature (7836)..(7837): n is a, c, g, or t
  misc_feature (8184)..(8185): n is a, c, g, or t
  misc_feature (8263)..(8263): n is a, c, g, or t
  misc_feature (8617)..(8618): n is a, c, g, or t
  misc_feature (8904)..(8904): n is a, c, g, or t
  misc_feature (9272)..(9272): n is a, c, g, or t
  misc_feature (9444)..(9444): n is a, c, g, or t
  misc_feature (9809)..(9811): n is a, c, g, or t
  misc_feature (9897)..(9913): n is a, c, g, or t
  misc_feature (10079)..(10081): n is a, c, g, or t
  misc_feature (10117)..(10118): n is a, c, g, or t
  misc_feature (10606)..(10606): n is a, c, g, or t
  misc_feature (10952)..(10954): n is a, c, g, or t
  misc_feature (11084)..(11088): n is a, c, g, or t
nntggcggacgtgtgacatcaccgttcgcctttcttggatcccttgttactccaccgcagtgagagataaacaacccagaatgaaggtcactgtagatgttgaggctgacagcccatttttgaaggcccttcagaaagcattcccggcttttgaggttgaatcacagcaggtcacacctaatgaccatgctaatgccagagctttttcgcatctggccacaaagttaattgaacaagaggttccagccaacatcaccatcctggacgtgggcagtgcgcccgcaaggaggttgatgtctgaccacagctaccattgcatttgtcccatgaagagtgcggaagacccagagagattagcgaactacgcccggaaactggcaaaaacagcaggggaagtgctagacaaaaatgtgtccggtaagatcacggacctgcaggacgtcatggcaacccccgatctggaatctccaacgttctgtctccacaccgatgagacgtgtcgcactagggctgaagtagctgtgtaccaggacgtgtannggcacgcaccgacctcgctttatcatcaagcgatgaaaggggtcaggacagtatactggataggattcgacaccaccccattcatgttcgaggttgttgctggcgcatacccaacgtattccacgaattgggcggacgagcaggtcctgcaggcacgtaacatcggcctatgtgcgaccagtcttagcgaaggacatcgaggaaaaatctctattatgaggaagaaacgcctaaggccgagcgacagggntatgttctcggttgggncaacgctatatatagaaagtagacgccttcttaagagttggcatcttccctccgtgttccacctgaaaggcaagaatagctttacttgcaggtgcgatacaatagtttcatgcgagggctacgttgttaaaaagatcacaatgagcccggggacgtacgggaagacggttggatacgccgttacgcaccatgcagaaggtttcctaatgtgcaaggtgacggacactgtgcgcggggagagagtatcattcccggtatgcacttatgtgcctgcaaccatttgcgatcagatgacaggaatcctggctaccgacgtcacacccgaagatgcgcagaaactactggtggggttgaaccaacgtatagttgtgaatggcagaacccaaaggaataccaacacaatgaaaaactacctattgccggtagtggcccaagctttcagcaagtgggcacgagaagcaaaagcagacatggaggatgagaaacctctgggaaccagagaaagaaccctgacgtgttgttgcctgtgggcattcaagaaccacaagacacacaccatgtacaaaaggccggatacccaaactatagtcaaggtgccatctacttttgactcgtttgtgattccaagcctgtggtcatccagcctatccataggcatacggcaaagaataaaactgctgttaggcccaaaactctcgcgagacctcccgtactctggagaccgaaacgaagcgcgagaagcagagaaggaagccgaagagaccaaggaagcagaattgacacgggaagcactgccaccattggtgggaagcaactgtgctgatgacgtcgatcaggtagatgtggaagagctgacgtaccgcgccggagcaggggtagtggagacacccaggaatgcgctcaaagtgacaccacaagagcgcgatcagctgatcggcgcgtacctgatcttgtctccgcaaacagtactgaagagtgaaaaactcacaccgatacatccactcgcggagcaagtgacaatcatgacgcactcaggaagatcaggcagatacccggttgaccgctacgacggacgtgtgttggtcccgacgggcgcagcgatccccgtcagcgaatttcaggcactcagtgagagtgctactatggtctacaacgaacgtgagttcatcaatcgcaagttgcaccatatagcactctacggccccgccctaaacactgatgaggagaactacgaaaaagtaagggcagagagagccgaagctgaatacgtgtttgacgtcgacaagaggacgtgcgtgaagagagaagatgcatcaggcctcgtactagttggcgacttaatcaacccacccttccatgagttcgcgtatgaaggactgaagatacggcccgcaacgcctttccaaaccacggtcattggcgttttcggagtacctggttccggtaagtcagccataatcaagagtgtggtgactacgagggacctggtcgccagtgggaagaaggagaactgccaggagatagttaatgatgtcaaaaagcagagaggactggatgtaacagccaggactgttgactctatcctgttgaacgggtgcagaagaggagtagagaatctatacgtggacgaagcatttgcctgtcattcaggtacactgttggcccttattgccatggtgaaaccaactggcaaggtgatcctatgcggagacccaaaacagtgtggattctttaacctgatgcaactgaaggtgaacttcaaccacgatatctgcacacaagtgctccacaaaagcatatccagaagatgcaccctcccgatcacggctatcgtctcgaccctacactatcagggtaagatgagaaccacgaacttatgtagtgcacccatccagatagacacaacaggtaccactaaaccagccaaaggagacatcgtgttaacgtgcttccgnngttgggtaaagcaactgcagatagactatcgtggacacgaagtcatgacagcagctgcatcacaaggactgactagaaaaggggtatacgccgttaggcagaaagtgaatgaaaacccactttatgccccttcatcagaacatgtcaacgtattgctgactagaactgaaaaccggctggtgtggaaaacactgtcgggagacccgtggataaaggtgttaaccaatatccccaagggcgatttcagcgctacgttggaggagtggcaagaggagcatgacaacatcatgaacgcccttcgcgagaggtcgacagcagtagacccgttccagaacaaagccaaagtctgctgggcaaagtgcctcgtgcaggtcctagaaacagctgggatacgcatgacggcggaggagtgggatacagtgttggctttccgcgaagacagggcgtactcacccgaagtggctctgaacgagatctgtaccaagtattacggcgttgacttagacagcggattgttctctgcccaatcggtctcattgtactatgaaaacaaccactgggacaatagaccgggcggccggatgtatggattcaaccgcgaagtcgcccgtaagtttgagcaacgctaccctttcctgagaggtaagatggactcggggctacaagttaatgttccagagagaaaagtacagccattcaatgcggaatgtaatatattactattaaacaggcgacttccgcacgccctcgtcaccagctaccagcagtgccggggcgagagggtagaatggcttctgaagaagcttcccggataccatttattgctggtaagcgagtacaatctggcgttgccccataaaagagtattttggattgcaccaccccatgtgtcaggtgcagatcgtatttatgatcttgacctaggattacccctgaatgcaggccgttacgacttggtatttgtgaacatacacactgagtacaggacgcaccactaccaacagtgcgtcgaccattccatgaagttacagatgttgggcggtgactccttacatctattgnnncctggcggctcactgcttatccgtgcttacgggtacgccgacagagtcagcgaaatggtggtcactgcattagctaggaagttttccgcctttagagtcctgagaccagcatgtgtaaccagtaacactgaagtctttctgttgtttaccaattttgataacggcagaagggctgtgactcttcaccaggccaatcagaggcttagctccatgtttgcatgcaacgggctacacacagccggatgcgcaccctcataccgtgtgcgcaggaccgacatttccgggcacgccgaagaggcggttgtcaatgccgccaatgcgaagggcacagtcggcgttggggtttgcagagcggtggcgagaaaatggccagactccttcaaaggcgccgcgactcctgtgggtacggccaagttggtacaggccaacggtatgaatgtcatccacgcggtaggcccgaatttctccacggtgaccgaggcagagggcgacagagagttggccgccgcataccgtgccgtggcgggtatcatcaatgctagtaacattaagagtgtagccatccctctgttgtcgactggggtgttctccggaggtaaagatagagtcatgcagtcactaaatcatctgtttaccgcaatggacaccacggacgctgacgtagtcatctattgccgcgacaaagcctgggagaagaaaatccaggaggctatcgatcgccgcaccgccgtggaattggtatctgaagacatctcacttgagtctgatttgatacgggtgcacccggatagttgcttggtaggcagaaaaggttacagcataacagatgggaagctgcattcgtacctggaaggtacccgctttcatcagactgcggtggatatggctgagatatctaccttgtggccgaaacttcaggacgcaaacgaacaaatatgcttgtatgcattgggtgagagtatggacagtatcagaacgaaatgtcctgtcgaggacgccgattcgtccacgcctccgaaaacagttccgtgtctgtgtaggtatgctatgactgctgagagagtggcgaggcttcggatgaacaacactaaggccataattgtgtgctcttcattccctttaccgaagtacagaattgaaggcgtccagaaggtcaagtgcgaccgagtgctgatttttgaccagacggtgccatctctggttagtccaaggaaatacataccagccgccgcctctatgcacgcagataccgtgagcttggattctacagtatccacaggatccgcgtggtcattcccatctgaggccacgtatgagaccatggaagtagtggcagaggtgcaccactcggaaccaccagtcccgccaccgcgcaggcgtcgtgcgcaggtgacgatgcaccaccaggagctgttggaagtttctgacatgcacaccccgattgcggcaagggtcgagatccctgtgtacgataccgctgttgtagcggagagagtggccattccttgcacgagtgagtatgcaacccccataccaacaccacgggcagtaagggtcgtacccgtgccggcaccacgcattcagcgagcgtcgacgtacagggtctctcctacacccacgcctcgcgttctgagagcctcggtatgcagtgtgaccactagcgctggggtagagttcccttgggcgcctgaagatctggaggtactcaccgagcctgtgcattgcgaaatgcgcgagccggttgagttaccgtgggagcctgaggacgttgatatccagttcggagattttgaaacacccgacaaaatccaattcggcgacattgatttcgaccaattctgactaagcagagcgggggcgtacatcttctcgtctgataccggaccggggcacttacaacagaagtcagtacggcaacacgcactaccgtgcgaaatgctatacgcccacgaggaagaacggacgtacccccccgcactggatgaggctagggagaaactgctgcaggcaaaaatgcagatggcacctacggaagcaaacaagagtaggtaccaatcaaggaaggttgaaaacatgaaggcagtgatcatagataggctgaaggatggagcaagaacctacctggcagaacagtcagagaagattccaacctatgctagtaagtacccgcggccagtttactcgccgtcggtagaggatagcttgcagagtcccgaggtcgctgtggcggcctgcaatgctttcctggaagccaattacccgacagtggctagttaccagatcacggacgagtatgatgcctacttggatatggttgatgggtcagagagttgcttagaccgggcgaccttctgcccggcaaaattacgctgctacccaaagcatcatgcttaccaccaaccgcaggttaggagtgcggtcccatcaccatttcaaaacaccctgcagaatgtgctagcagcagccacgaagagaaattgcaatgttacacagatgagagaactacctactctagactcagcagtgtttaacgtggaatgcttcaaaaaatttgcatgcaatggagaatactggcaggaattcaaagatgacccaataagaataactacagagaacataacaacttatgtcactaggcttaagggccctaaagcagcagcgctgtttgcgaagactcacaatttagtcccgctgcaagaggtgcccatggaccggtttgtggtagatatgaagagagacgtgaaagttacccctggcactaaacatactgaggaacgcccaaaggtgcaagtcatccaggccgccgaacctttagctacagcttatttatgtggcattcacagggagttagtccgccgcctgaaggccgtcctggccccgaacatacatacattgttcgatatgtcggcagaagattttgacgccatcatagccgcacatttccaaccaggtgacgcagttttggaaacggacatagcctcctttgacaagagccaagatgactctttggcgttgacggcactgatgctgttggaggacctcggggttgaccaagaactactagacctgatagaggaagcgtttggggaaattaccagcgtccacctgccaacaggtacgcggttcaagtttggcgccatgatgaagtccggaatgtttctgacactatttataaataccctgttaaacattgtcatagcatgccgtgtactgcgtgagaagctgacaaactccatctgcgccgcgttcatcggggatgacaacatagtgcacggggtaagatctgacccgttgatggctgagaggtgcgccagctgggttaatatggaggtaaagataattgacgctaccatgtgcgagaaaccaccatacttctgcggcgggtttatactgtatgacaatgtcaccggctcggcgtgccgagtggccgaccctctgaaaaggttatttaaattaggcaaacctttacccgccggagacacccaagatgaagatcgtaggcgtgcattgaaggatgagacggataggtgggcacgagtagggttgaagtctgaactggaaatagcactaagttcccggtatgaggtgaacgggaccggcaacatagtgcgagcaatggccacattggccaagagcttgaagaactttaaaaaactgcgtggacccattgtacacctctacggcggtcctaaatagatgcagagacactccttcatctacagctcacaacagtaaacatgaattacataccaacccagactttttacggacgccgttggcggcctcgcccggcgttccgtccatggcaggtgccgatgcagccgacacctactatggttacacccatgctgcaagcaccggacctacaggctcaacagatgcaacaactgatcagcgcagtctctgcactaaccaccaaacagaatgtaaaagcaccaaaagggcaacggaaacagaaacagcagaaaccaaaggaaaagaaggaaaaacagaagaaaaagccgacgcnnaagaagaagcagcagcagaaaccaaaaccacaggctaagaagaagaaaccagggagaagagaaagaatgtgcatgaagatcgagaatgactgcatattcgaggtcaaactggacggcaaggttaccggctatgcgtgcctagtcggagataaggtcatgaagccggctcacgttaaaggcacaattgataacccagaccttgcgaagttgacttacaagaaatccagtaagtatgacctcgaatgcgcccagatcccagtgcacatgaagtccgacgcctccaagtacacacatgaaaagcccgaaggtcattacaattggcaccatggagcagtgcagtacagcgnnggaaggtttaccatccccacaggcgccggcaaaccaggagatagcggtaggcctatttttgacaacaaagggcgagtngtggccatcgtgttaggcggggccaacgaaggtgcccgcactgcgctgtctgtggtgacgtggacaaaagacatggtcactcgggtaacgccagaaggaaccgaagagtggtctgccgcgctgatgatgtgtatccttgccaacacctctttcccatgctcgtcacctccctgctacccctgctgctacgaaaaacagccagaacagacactgcggatgctggaagacaacgtgaatagacctgggtactatgagttactggaagcgtccatgacatgcagaaacagatcacgccaccgccgcagtgtaatagagcacttcaatgtgtataaggctactagaccgtacttagcnnactgcgctgactgcggggacgggtacttctgctatagcccggttgctatcgagaagatccgagatgaggcgtctgatggcatgctcaagatccaagtctccgcccaaataggtctggacaaggcaggtacccacgcccacacgaagatgcgatatatggctggtcatgatgttcaggaatctaagagagattccttgagggtgtatacgtccgcagcgtgctctatacatgggacgatgggacacttcatcgtcgcacactgtccaccaggcgactacctcaaggnttcgttcgaggacgcaaattcacacgtgaaggcatgtaaggtccaatacaagcacgacccattgccggtgggtagagagaagtttgtggttagaccacactttggcgtagagctgccatgcacctcataccagctgacaacggctcccaccgacgaggagattgacatgcatacaccgccagatataccggatcgcaccctgctatcacagacggcgggcaacgtcaaaataacagcaggcggcaggactatcaggtacaattgtacctgcggccgtgacaacgtaggcactaccagtactgacaagaccatcaacacatgcaagatagaccaatgccatgctgccgttaccagccatgacaaatggnaatttacctctccatttgttcccagggctgatcagacagccaggaaaggcaaagtgcatgttccattccctttgactaacgtcacctgccgagtgccgttggcacgagcgccggatgtcacctatggtaagaaggaggtgaccctaagattacacccagatcatccgacgcncttctcctataggagtttaggagccgtaccgcacccgtacgaggaatgggttgacaagttctctgagcgcatcatcccagtgacggaagaagggattgagtaccagtggggtaacaacccgccggtccgcctgtgggcgcaactgacgactgagggtaaaccccatggctggccacatgaaatcattcagtactattatggactataccccgccgccactattgccgcagtatccggggcgagtctgatggccctcctaactctagcggccacatgctgcatgctggccaccgcgaggagaaagtgcctaacaccgtacgctttgacgccaggagcggtggtaccgttgacattggggctgcttnnntgcgcaccgagggcgaacgcagcatcatttgctgagactatggcctatctgtgggacgagaacaaaaccctcttttggatggaatnnnnnnnnnnnnnnnnngcgcttgctttgctggcatgctgtatcaaaagcctgatctgctgttgtaagccattttcttttttagtgttactgagcctgggagcctccgcaaaagcttatgagcacacagccacaattccgaacgtggtggggttcccgtataaggctcacattgaaaggaatnnnttctcgcccatgactctgcagcttgaagtggtgganncaagcttggaacccacacttaacctggagtacattacctgcgaatacaagacggtggtcccttcgccatttatcaaatgttgcggaacatcagaatgctcatctaaagagcagccagactaccaatgcaaggtgtacacgggtgtataccctttcatgtggggtggagcttactgtttctgcgactccgagaacacgcagcttagcgaggcctatgtcgacaggtcagacgtttgcaaacatgatcatgcattggcctacaaggcacacacggcctctctaaaagcaacaatcaggatcagctacggcaccatcaaccagaccaccgaggccttcgtcaatggagaacacgcggtcaacgtgggcggaagcaagttcatctttggaccgatctcaacagcttggtcaccgttcgacaataaaattgtcgtgtataaagatgatgtctacaaccaggacttcccaccctacggatcaggccagccgggnagattcggagacatccagagcaggacagtggagagcaaagacttgtatgctaatacggccctaaaactctcaagaccatcacccggggttgtgcatgtgccatacacgcagacaccatccggatttaagtattggctgaaggagaaaggatcttcattgaatacaaaggccccttttggctgcaagataaagaccaatccagtcagagctatggattgtgcagttggcagtatacctgtgtcgatggacatacctgacagtgcattcacacgagtggtagatgccccggctgtaacagacctgagctgccaggtagctgtctgtacacactcctccgatttcggannngttgccacattgtcttacaagacggacaaacccggcaagtgcgccgttcactcacattccaacgtcgcaacgttgcaagaggcgacggtggatgtcaaggaggatggcaaggtcacagtgcacttttctnnnnngtccgcctccccggcattcaaagtgtccgtctgtgacgcaaaaacaacgtgcacggcggcgtgcgagcctccgaaagaccacatcgtcccttatggggcgagccataacaaccaggtctttccggacatgtcaggaactgcgatgacgtgggtacagaggatggccagtgggttaggtgggctggccctcatcgcggtggttgtgctggtcttggtaacctgcataacaatgcgtcggtaagtttaaagggggctatattacccctgttaagtactaaccaacaagtagacaaatagacgctaaccacatatataaccagctatagcatactatattcagctaagcagttgtagtagtaaggaatgtagttcaaagggctatacaacccctgaatagtaacaaaatacaaaaatattaataaaaattttaaaaatcacaagaaattcaatcattaaattattaattgactagccgaactctaaggagatgtaggcgtccgaactctacggagatgtaggactaaattctgccgaaccccataacaccggggacgtaggcgtctaatttg

SEQ ID NO: 179 - DNA, 11703 bp, Sindbis virus
attgacggcgtagtacacactattgaatcaaacagccgaccaattgcactaccatcacaatggagaagccagtagtaaacgtagacgtagacccccagagtccgtttgtcgtgcaactgcaaaaaagcttcccgcaatttgaggtagtagcacagcaggtcactccaaatgaccatgctaatgccagagcattttcgcatctggccagtaaactaatcgagctggaggttcctaccacagcgacgatcttggacataggcagcgcaccggctcgtagaatgttttccgagcaccagtatcattgtgtctgccccatgcgtagtccagaagacccggaccgcatgatgaaatacgccagtaaactggcggaaaaagcgtgcaagattacaaacaagaacttgcatgagaagattaaggatctccggaccgtacttgatacgccggatgctgaaacaccatcgctctgctttcacaacgatgttacctgcaacatgcgtgccgaatattccgtcatgcaggacgtgtatatcaacgctcccggaactatctatcatcaggctatgaaaggcgtgcggaccctgtactggattggcttcgacaccacccagttcatgttctcggctatggcaggttcgtaccctgcgtacaacaccaactgggccgacgagaaagtccttgaagcgcgtaacatcggactttgcagcacaaagctgagtgaaggtaggacaggaaaattgtcgataatgaggaagaaggagttgaagcccgggtcgcgggtttatttctccgtaggatcgacactttatccagaacacagagccagcttgcagagctggcatcttccatcggtgttccacttgaatggaaagcagtcgtacacttgccgctgtgatacagtggtgagttgcgaaggctacgtagtgaagaaaatcaccatcagtcccgggatcacgggagaaaccgtgggatacgcggttacacacaatagcgagggcttcttgctatgcaaagttactgacacagtaaaaggagaacgggtatcgttccctgtgtgcacgtacatcccggccaccatatgcgatcagatgactggtataatggccacggatatatcacctgacgatgcacaaaaacttctggttgggctcaaccagcgaattgtcattaacggtaggactaacaggaacaccaacaccatgcaaaattaccttctgccgatcatagcacaagggttcagcaaatgggctaaggagcgcaaggatgatcttgataacgagaaaatgctgggtactagagaacgcaagcttacgtatggctgcttgtgggcgtttcgcactaagaaagtacattcgttttatcgcccacctggaacgcagacctgcgtaaaagtcccagcctcttttagcgcttttcccatgtcgtccgtatggacgacctctttgcccatgtcgctgaggcagaaattgaaactggcattgcaaccaaagaaggaggaaaaactgctgcaggtctcggaggaattagtcatggaggccaaggctgcttttgaggatgctcaggaggaagccagagcggagaagctccgagaagcacttccaccattagtggcagacaaaggcatcgaggcagccgcagaagttgtctgcgaagtggaggggctccaggcggacatcggagcagcattagttgaaaccccgcgcggtcacgtaaggataatacctcaagcaaatgaccgtatgatcggacagtatatcgttgtctcgccaaactctgtgctgaagaatgccaaactcgcaccagcgcacccgctagcagatcaggttaagatcataacacactccggaagatcaggaaggtacgcggtcgaaccatacgacgctaaagtactgatgccagcaggaggtgccgtaccatggccagaattcctagcactgagtgagagcgccacgttagtgtacaacgaaagagagtttgtgaaccgcaaactataccacattgccatgcatggccccgccaagaatacagaagaggagcagtacaaggttacaaaggcagagcttgcagaaacagagtacgtgtttgacgtggacaagaagcgttgcgttaagaaggaagaagcctcaggtctggtcctctcgggagaactgaccaaccctccctatcatgagctagctctggagggactgaagacccgacctgcggtcccgtacaaggtcgaaacaataggagtgataggcacaccggggtcgggcaagtcagctattatcaagtcaactgtcacggcacgagatcttgttaccagcggaaagaaagaaaattgtcgcgaaattgaggccgacgtgctaagactgaggggtatgcagattacgtcgaagacagtagattcggttatgctcaacggatgccacaaagccgtagaagtgctgtacgttgacgaagcgttcgcgtgccacgcaggagcactacttgccttgattgctatcgtcaggccccgcaagaaggtagtactatgcggagaccccatgcaatgcggattcttcaacatgatgcaactaaaggtacatttcaatcaccctgaaaaagacatatgcaccaagacattctacaagtatatctcccggcgttgcacacagccagttacagctattgtatcgacactgcattacgatggaaagatgaaaaccacgaacccgtgcaagaagaacattgaaatcgatattacaggggccacaaagccgaagccaggggatatcatcctgacatgtttccgcgggtgggttaagcaattgcaaatcgactatcccggacatgaagtaatgacagccgcggcctcacaagggctaaccagaaaaggagtgtatgccgtccggcaaaaagtcaatgaaaacccactgtacgcgatcacatcagagcatgtgaacgtgttgctcacccgcactgaggacaggctagtgtggaaaaccttgcagggcgacccatggattaagcagcccactaacatacctaaaggaaactttcaggctactatagaggactgggaagctgaacacaagggaataattgctgcaataaacagccccactccccgtgccaatccgttcagctgcaagaccaacgtttgctgggcgaaagcattggaaccgatactagccacggccggtatcgtacttaccggttgccagtggagcgaactgttcccacagtttgcggatgacaaaccacattcggccatttacgccttagacgtaatttgcattaagtttttcggcatggacttgacaagcggactgttttctaaacagagcatcccactaacgtaccatcccgccgattcagcgaggccggtagctcattgggacaacagcccaggaacccgcaagtatgggtacgatcacgccattgccgccgaactctcccgtagatttccggtgttccagctagctgggaagggcacacaacttgatttgcagacggggagaaccagagttatctctgcacagcataacctggtcccggtgaaccgcaatcttcctcacgccttagtccccgagtacaaggagaagcaacccggcccggtcaaaaaattcttgaaccagttcaaacaccactcagtacttgtggtatcagaggaaaaaattgaagctccccgtaagagaatcgaatggatcgccccgattggcatagccggtgcagataagaactacaacctggctttcgggtttccgccgcaggcacggtacgacctggtgttcatcaacattggaactaaatacagaaaccaccactttcagcagtgcgaagaccatgcggcgaccttaaaaaccctttcgcgttcggccctgaattgccttaacccaggaggcaccctcgtggtgaagtcctatggctacgccgaccgcaacagtgaggacgtagtcaccgctcttgccagaaagtttgtcagggtgtctgcagcgagaccagattgtgtctcaagcaatacagaaatgtacctgattttccgacaactagacaacagccgtacacggcaattcaccccgcaccatctgaattgcgtgatttcgtccgtgtatgagggtacaagagatggagttggagccgcgccgtcataccgcaccaaaagggagaatattgctgactgtcaagaggaagcagttgtcaacgcagccaatccgctgggtagaccaggcgaaggagtctgccgtgccatctataaacgttggccgaccagttttaccgattcagccacggagacaggcaccgcaagaatgactgtgtgcctaggaaagaaagtgatccacgcggtcggccctgatttccggaagcacccagaagcagaagccttgaaattgctacaaaacgcctaccatgcagtggcagacttagtaaatgaacataacatcaagtctgtcgccattccactgctatctacaggcatttacgcagccggaaaagaccgccttgaagtatcacttaactgcttgacaaccgcgctagacagaactgacgcggacgtaaccatctattgcctggataagaagtggaaggaaagaatcgacgcggcactccaacttaaggagtctgtaacagagctgaaggatgaagatatggagatcgacgatgagttagtatggatccatccagacagttgcttgaagggaagaaagggattcagtactacaaaaggaaaattgtattcgtacttcgaaggcaccaaattccatcaagcagcaaaagacatggcggagataaaggtcctgttccctaatgaccaggaaagtaatgaacaactgtgtgcctacatattgggtgagaccatggaagcaatccgcgaaaagtgcccggtcgaccataacccgtcgtctagcccgcccaaaacgttgccgtgcctttgcatgtatgccatgacgccagaaagggtccacagacttagaagcaataacgtcaaagaagttacagtatgctcctccaccccccttcctaagcacaaaattaagaatgttcagaaggttcagtgcacgaaagtagtcctgtttaatccgcacactcccgcattcgttcccgcccgtaagtacatagaagtgccagaacagcctaccgctcctcctgcacaggccgaggaggcccccgaagttgtagcgacaccgtcaccatctacagctgataacacctcgcttgatgtcacagacatctcactggatatggatgacagtagcgaaggctcacttttttcgagctttagcggatcggacaactctattactagtatggacagttggtcgtcaggacctagttcactagagatagtagaccgaaggcaggtggtggtggctgacgttcatgccgtccaagagcctgcccctattccaccgccaaggctaaagaagatggcccgcctggcagcggcaagaaaagagcccactccaccggcaagcaatagctctgagtccctccacctctcttttggtggggtatccatgtccctcggatcaattttcgacggagagacggcccgccaggcagcggtacaacccctggcaacaggccccacggatgtgcctatgtctttcggatcgttttccgacggagagattgatgagctgagccgcagagtaactgagtccgaacccgtcctgtttggatcatttgaaccgggcgaagtgaactcaattatatcgtcccgatcagccgtatcttttccactacgcaagcagagacgtagacgcaggagcaggaggactgaatactgactaaccggggtaggtgggtacatattttcgacggacacaggccctgggcacttgcaaaagaagtccgttctgcagaaccagcttacagaaccgaccttggagcgcaatgtcctggaaagaattcatgccccggtgctcgacacgtcgaaagaggaacaactcaaactcaggtaccagatgatgcccaccgaagccaacaaaagtaggtaccagtctcgtaaagtagaaaatcagaaagccataaccactgagcgactactgtcaggactacgactgtataactctgccacagatcagccagaatgctataagatcacctatccgaaaccattgtactccagtagcgtaccggcgaactactccgatccacagttcgctgtagctgtctgtaacaactatctgcatgagaactatccgacagtagcatcttatcagattactgacgagtacgatgcttacttggatatggtagacgggacagtcgcctgcctggatactgcaaccttctgccccgctaagcttagaagttacccgaaaaaacatgagtatagagccccgaatatccgcagtgcggttccatcagcgatgcagaacacgctacaaaatgtgctcattgccgcaactaaaagaaattgcaacgtcacgcagatgcgtgaactgccaacactggactcagcgacattcaatgtcgaatgctttcgaaaatatgcatgtaatgacgagtattgggaggagttcgctcggaagccaattaggattaccactgagtttgtcaccgcatatgtagctagactgaaaggccctaaggccgccgcactatttgcaaagacgtataatttggtcccattgcaagaagtgcctatggatagattcgtcatggacatgaaaagagacgtgaaagttacaccaggcacgaaacacacagaagaaagaccgaaagtacaagtgatacaagccgcagaacccctggcgactgcttacttatgcgggattcaccgggaattagtgcgtaggcttacggccgtcttgcttccaaacattcacacgctttttgacatgtcggcggaggattttgatgcaatcatagcagaacacttcaagcaaggcgacccggtactggagacggatatcgcatcattcgacaaaagccaagacgacgctatggcgttaaccggtctgatgatcttggaggacctgggtgtggatcaaccactactcgacttgatcgagtgcgcctttggagaaatatcatccacccatctacctacgggtactcgttttaaattcggggcgatgatgaaatccggaatgttcctcacactttttgtcaacacagttttgaatgtcgttatcgccagcagagtactagaagagcggcttaaaacgtccagatgtgcagcgttcattggcgacgacaacatcatacatggagtagtatctgacaaagaaatggctgagaggtgcgccacctggctcaacatggaggttaagatcatcgacgcagtcatcggtgagagaccaccttacttctgcggcggatttatcttgcaagattcggttacttccacagcgtgccgcgtggcggatcccctgaaaaggctgtttaagttgggtaaaccgctcccagccgacgacgagcaagacgaagacagaagacgcgctctgctagatgaaacaaaggcgtggtttagagtaggtataacaggcactttagcagtggccgtgacgacccggtatgaggtagacaatattacacctgtcctactggcattgagaacttttgcccagagcaaaagagcattccaagccatcagaggggaaataaagcatctctacggtggtcctaaatagtcagcatagtacatttcatctgactaatactacaacaccaccaccatgaatagaggattctttaacatgctcggccgccgccccttcccggcccccactgccatgtggaggccgcggagaaggaggcaggcggccccgatgcctgcccgcaacgggctggcttctcaaatccagcaactgaccacagccgtcagtgccctagtcattggacaggcaactagacctcaacccccacgtccacgcccgccaccgcgccagaagaagcaggcgcccaagcaaccaccgaagccgaagaaaccaaaaacgcaggagaagaagaagaagcaacctgcaaaacccaaacccggaaagagacagcgcatggcacttaagttggaggccgacagattgttcgacgtcaagaacgaggacggagatgtcatcgggcacgcactggccatggaaggaaaggtaatgaaacctctgcacgtgaaaggaaccatcgaccaccctgtgctatcaaagctcaaatttaccaagtcgtcagcatacgacatggagttcgcacagttgccagtcaacatgagaagtgaggcattcacctacaccagtgaacaccccgaaggattctataactggcaccacggagcggtgcagtatagtggaggtagatttaccatccctcgcggagtaggaggcagaggagacagcggtcgtccgatcatggataactccggtcgggttgtcgcgatagtcctcggtggcgctgatgaaggaacacgaactgccctttcggtcgtcacctggaatagtaaagggaagacaattaagacgaccccggaagggacagaagagtggtccgcagcaccactggtcacggcaatgtgtttgctcggaaatgtgagcttcccatgcgaccgcccgcccacatgctatacccgcgaaccttccagagccctcgacatccttgaagagaacgtgaaccatgaggcctacgataccctgctcaatgccatattgcggtgcggatcgtctggcagaagcaaaagaagcgtcattgacgactttaccctgaccagcccctacttgggcacatgctcgtactgccaccatactgtaccgtgcttcagccctgttaagatcgagcaggtctgggacgaagcggacgataacaccatacgcatacagacttccgcccagtttggatacgaccaaagcggagcagcaagcgcaaacaagtaccgctacatgtcgcttaagcaggatcacaccgttaaagaaggcaccatggatgacatcaagattagcacctcaggaccgtgtagaaggcttagctacaaaggatactttctcctcgcaaaatgccctccaggggacagcgtaacggttagcatagtgagtagcaactcagcaacgtcatgtacactggcccgcaagataaaaccaaaattcgtgggacgggaaaaatatgatctacctcccgttcacggtaaaaaaattccttgcacagtgtacgaccgtctgaaagaaacaactgcaggctacatcactatgcacaggccgagaccgcacgcttatacatcctacctggaagaatcatcagggaaagtttacgcaaagccgccatctgggaagaacattacgtatgagtgcaagtgcggcgactacaagaccggaaccgtttcgacccgcaccgaaatcactggttgcaccgccatcaagcagtgcgtcgcctataagagcgaccaaacgaagtgggtcttcaactcaccggacttgatcagacatgacgaccacacggcccaagggaaattgcatttgcctttcaagttgatcccgagtacctgcatggtccctgttgcccacgcgccgaatgtaatacatggctttaaacacatcagcctccaattagatacagaccacttgacattgctcaccaccaggagactaggggcaaacccggaaccaaccactgaatggatcgtcggaaagacggtcagaaacttcaccgtcgaccgagatggcctggaatacatatggggaaatcatgagccagtgagggtctatgcccaagagtcagcaccaggagaccctcacggatggccacacgaaatagtacagcattactaccatcgccatcctgtgtacaccatcttagccgtcgcatcagctaccgtggcgatgatgattggcgtaactgttgcagtgttatgtgcctgtaaagcgcgccgtgagtgcctgacgccatacgccctggccccaaacgccgtaatcccaacttcgctggcactcttgtgctgcgttaggtcggccaatgctgaaacgttcaccgagaccatgagttacttgtggtcgaacagtcagccgttcttctgggtccagttgtgcatacctttggccgctttcatcgttctaatgcgctgctgctcctgctgcctgccttttttagtggttgccggcgcctacctggcgaaggtagacgcctacgaacatgcgaccactgttccaaatgtgccacagataccgtataaggcacttgttgaaagggcagggtatgccccgctcaatttggagatcactgtcatgtcctcggaggttttgccttccaccaaccaagagtacattacctgcaaattcaccactgtggtcccctccccaaaaatcaaatgctgcggctccttggaatgtcagccggccgctcatgcagactatacctgcaaggtcttcggaggggtctacccctttatgtggggaggagcgcaatgtttttgcgacagtgagaacagccagatgagtgaggcgtacgtcgaattgtcagcagattgcgcgtctgaccacgcgcaggcgattaaggtgcacactgccgcgatgaaagtaggactgcgtattgtgtacgggaacactaccagtttcctagatgtgtacgtgaacggagtcacaccaggaacgtctaaagacttgaaagtcatagctggaccaatttcagcatcgtttacgccattcgatcataaggtcgttatccatcgcggcctggtgtacaactatgacttcccggaatatggagcgatgaaaccaggagcgtttggagacattcaagctacctccttgactagcaaggatctcatcgccagcacagacattaggctactcaagccttccgccaagaacgtgcatgtcccgtacacgcaggcctcatcaggatttgagatgtggaaaaacaactcaggccgcccactgcaggaaaccgcacctttcgggtgtaagattgcagtaaatccgctccgagcggtggactgttcatacgggaacattcccatttctattgacatcccgaacgctgcctttatcaggacatcagatgcaccactggtctcaacagtcaaatgtgaagtcagtgagtgcacttattcagcagacttcggcgggatggccaccctgcagtatgtatccgaccgcgaaggtcaatgccccgtacattcgcattcgagcacagcaactctccaagagtcgacagtacatgtcctggagaaaggagcggtgacagtacactttagcaccgcgagtccacaggcgaactttatcgtatcgctgtgtgggaagaagacaacatgcaatgcagaatgtaaaccaccagctgaccatatcgtgagcaccccgcacaaaaatgaccaagaatttcaagccgccatctcaaaaacatcatggagttggctgtttgcccttttcggcggcgcctcgtcgctattaattataggacttatgatttttgcttgcagcatgatgctgactagcacacgaagatgaccgctacgccccaatgatccgaccagcaaaactcgatgtacttccgaggaactgatgtgcataatgcatcaggctggtacattagatccccgcttaccgcgggcaatatagcaacactaaaaactcgatgtacttccgaggaagcgcagtgcataatgctgcgcagtgttgccacataaccactatattaaccatttatctagcggacgccaaaaactcaatgtatttctgaggaagcgtggtgcataatgccacgcagcgtctgcataacttttattatttcttttattaatcaacaaaattttgtttttaacatttc

SEQ ID NO: 180 - DNA, 11826 bp, Chikungunya virus
atggctgcgtgagacacacgtagcctaccagtttcttactgctctactctgcaaagcaagagattaagaacccatcatggatcctgtgtacgtggacatagacgctgacagcgcctttttgaaggccctgcaacgtgcgtaccccatgtttgaggtggaacctaggcaggtcacaccgaatgaccatgctaatgctagagcgttctcgcatctagctataaaactaatagagcaggaaattgatcccgactcaaccatcctggatattggtagtgcgccagcaaggaggatgatgtcggacaggaagtaccactgcgtttgcccgatgcgcagtgcagaagatcccgagagactcgccaattatgcgagaaagctagcatctgccgcaggaaaagtcctggacagaaacatctctggaaagatcggggacttacaagcagtaatggccgtgccagacacggagacgccaacattctgcttacacacagatgtatcatgtagacagagagcagacgtcgcgatataccaagacgtctatgctgtacacgcacccacgtcgctataccaccaggcgattaaaggggtccgattggcgtactgggtagggtttgacacaaccccgttcatgtacaatgccatggcgggtgcctacccctcatactcgacaaattgggcagatgagcaggtactgaaggctaagaacataggattatgttcaacagacctgacggaaggtagacgaggcaaattgtctattatgagaggaaaaaagctagaaccgtgcgaccgtgtgctgttctcagtagggtcaacgctctacccggaaagccgtaagctacttaagagctggcacctaccatcggtgttccatttaaagggcaagctcagcttcacatgccgctgtgatacagtggtttcgtgcgaaggctacgtcgttaagagaataacgatgagcccaggcctttacggaaaaaccacagggtatgcggtaacccaccacgcagacggattcctgatgtgcaagaccaccgacacggttgacggcgaaagagtgtcattctcggtgtgcacgtacgtgccggcgaccatttgtgatcaaatgaccggcatccttgctacagaagtcacgccggaggatgcacagaagctgttggtggggctgaaccagagaatagtggttaacggcagaacgcaacggaatacgaacaccatgaaaaactatatgattcccgtggtcgcccaagccttcagtaagtgggcaaaggagtgccggaaagacatggaagatgaaaaactcctgggggtcagagaaagaacactgacctgctgctgtctatgggcatttaagaagcagaaaacacacacggtctacaagaggcctgatacccagtcaattcagaaggttcaggccgagtttgacagctttgtggtaccgagcctgtggtcgtccgggttgtcaatcccgttgaggactagaatcaaatggttgttaagcaaggtgccaaaaaccgacctgaccccatacagcggggacgcccaagaagcccgggacgcagaaaaagaagcagaggaagaacgagaagcagaactgactcttgaagccctaccaccccttcaggcagcacaggaagatgttcaggtcgaaatcgacgtggaacagcttgaggacagagcgggtgcaggaataatagagactccgagaggagctatcaaagttactgcccaaccaacagaccacgtcgtgggagagtacttggttctttccccgcagaccgtactacgtagccaaaagcttagcctgattcacgctttggcggagcaagtgaagacgtgcacgcacagcggacgagcagggaggtatgcggtcgaagcgtacgacggcagagtcctagtgccctcaggctacgcaatctcgcctgaagacttccagagcctaagcgaaagcgcaacgatggtgtacaacgaaagagagttcgtaaacagaaagctacaccatattgcgatgcatggaccagccctgaacaccgacgaagagtcgtatgagctggtgagggcagagaggacagaacacgagtacgtctacgacgtggaccagagaagatgctgtaagaaggaagaagctgcaggactggtactggtgggcgacttgactaatccgccctaccacgaattcgcatatgaagggctaaaaatccgccctgcctgcccatacaaaattgcagtcataggagtcttcggagtaccaggatctggcaagtcagctattatcaagaacctagttaccaggcaagacctggtgactagcggaaagaaagaaaactgccaagaaatcaccaccgacgtgatgagacagagaggtctagagatatctgcacgtacggttgactcgctgctcttgaatggatgtaacagaccagtcgacgtgttgtacgtagacgaggcgtttgcgtgccactctggaacgttacttgcattgatcgccttggtgagaccaagacagaaagttgtactttgtggtgacccgaagcagtgcggcttcttcaatatgatgcagatgaaagtcaactataatcacaacatctgcacccaagtgtaccacaaaagtatctccaggcggtgtacactgcctgtgactgccattgtgtcatcgttgcattacgaaggcaaaatgcgcactacgaatgagtacaacaagccgattgtagtggacactacaggctcaacaaaacctgaccctggagatctcgtgttaacgtgcttcagaggatgggttaaacaactgcaaattgactatcgtggacacgaggtcatgacagcagccgcatcccaagggttaaccagaaaaggagtttacgcagttaggcaaaaagttaacgaaaacccgctttatgcatcaacgtcagagcacgtcaacgtactcctaacgcgtacggaaggtaaactggtatggaagacactctccggtgacccgtggataaagacgctgcagaacccaccgaaaggaaacttcaaagcaactattaaggagtgggaggtggagcatgcatcaataatggcgggcatctgcagtcaccaaatgacctttgatacattccaaaacaaagccaacgtttgttgggctaagagtttggtccctatcctcgaaacagcggggataaaactaaacgacaggcagtggtcccagataattcaagccttcaaagaagacaaagcatattcacccgaagtagccctgaatgaaatatgcacgcgcatgtatggggtggatctagacagcgggctattttctaaaccgttggtgtctgtgtattacgcggataaccactgggataataggcctggagggaagatgttcggattcaaccccgaggcagcatccattctagaaagaaagtatccatttacaaaagggaagtggaacatcaacaagcagatctgcgtgactaccaggaggatagaagacttcaaccctaccaccaacattataccggccaacaggagactaccacactcattagtggccgaacaccgcccagtaaaaggggaaagaatggaatggctggttaacaagataaacggccaccacgtgctcctggtcagtggctgtagccttgcactgcctactaagagagtcacttgggtagcgccactaggtgtccgcggagcggactatacatacaacctagagttgggtctgccagcaacgcttggtaggtatgacctagtggtcataaacatccacacaccttttcgcatacaccattatcaacagtgcgtagaccacgcaatgaaactgcaaatgctcgggggtgactcattgagactgctcaaaccgggtggctctctattgatcagagcatatggttacgcagatagaaccagtgaacgagtcatctgcgtattgggacgcaagtttagatcatctagagcgttgaaaccaccatgtgtcaccagcaacactgagatgttttttctattcagcaactttgacaatggcagaaggaatttcacaactcatgtcatgaacaatcaactgaatgcagcctttgtaggacaggccacccgagcaggatgtgcaccgtcgtaccgggtaaaacgcatggatatcgcgaagaacgatgaagagtgcgtagtcaacgccgccaaccctcgcgggttaccaggtgacggtgtttgcaaggcagtatacaaaaaatggccggagtcctttaagaacagtgcaacaccagtgggaaccgcaaaaacagtcatgtgcggtacgtatccagtaatccacgccgttggaccaaacttctctaattattcggagtctgaaggggaccgagaattggcggctgcctatcgagaagtcgcaaaggaggtaactagactgggagtaaatagtgtagctatacctctcctctccacaggtgtatactcaggagggaaagacaggctgacccagtcactgaaccacctctttacagccatggactcgacggatgcagacgtggtcatctactgccgcgacaaagaatgggagaagaaaatatctgaggccatacagatgcggacccaagtggagctgctggatgagcacatctccatagactgcgatgttgttcgcgtgcaccctgacagcagcttggcaggcagaaaaggatacagcaccacggaaggcgcactgtactcatatctagaagggacccgttttcaccaaacggcagtggatatggcagagatatatactatgtggccaaagcaaacagaggccaacgagcaagtttgcctatatgccctgggggaaagtattgaatcgatcaggcagaaatgcccggtggatgatgcagatgcatcatctcccccgaaaactgtcccgtgcctctgccgttacgccatgacaccagaacgcgttacccgacttcgcatgaaccatgtcacaagcataattgtgtgttcttcgtttccccttccaaagtacaaaatagaaggagtgcaaaaagtcaaatgctccaaggtaatgctatttgaccacaacgtgccatcgcgcgtaagtccaagggaatacagaccttcccaggagtctgtacaggaagcgagtacgaccacgtcactgacgcatagccaattcgatctaagcgttgacggcaagatactgcccgtcccgtcagacctggatgctgacgccccagccctagaaccagcccttgacgacggggcgatacacacgttgccatctgcaaccggaaaccttgcggccgtgtctgactgggtaatgagcaccgtacctgtcgcgccgcccagaagaaggcgagggagaaacctgactgtgacatgcgacgagagagaagggaatataacacccatggctagcgtccgattctttagggcagagctgtgtccagtcgtacaagaaacagcggagacgcgtgacacagctatgtctcttcaggcaccgccgagtaccgccacggaactgagtcacccgccgatctccttcggtgcaccaagcgagacgttccccatcacatttggggacttcaacgaaggagaaatcgaaagcttgtcttctgagctactaactttcggagacttcctacccggagaagtggatgatttgacagatagcgactggtccacgtgctcagacacggacgacgagttacgactagacagggcaggtgggtatatattctcgtcggacactggtccaggtcatttacaacagaagtcagtacgccagtcagtgctgccggtgaacaccctggaggaagtccacgaggagaagtgttacccacctaagctggatgaagcaaaggagcaactactacttaagaaactccaggagagtgcatccatggccaacagaagcaggtatcagtcgcgcaaagtagaaaacatgaaagcaacaatcatccagagactaaagagaggctgtagattatacttaatgtcagagaccccaaaagtccctacctaccggaccacatatccggcgcctgtgtactcgcctccgattaacgtccgactgtccaaccccgagtccgcagtggcagcatgcaatgagttcttggctagaaactatccaactgtttcatcataccaaatcaccgacgagtatgatgcatatctagacatggtggacgggtcggagagttgtctggaccgagcgacattcaatccgtcaaaacttaggagctacccaaaacagcacgcttaccacgcgccctccatcagaagcgctgtaccgtccccattccagaacacactacagaatgtactggcagcagccacgaaaagaaactgcaacgtcacacagatgagggaattacccactttggactcagcagtattcaacgtggagtgtttcaaaaaattcgcatgcaaccaagaatactgggaagaatttgctgccagccctatcaggataacaactgagaatttaacaacctatgttactaaactaaaggggccaaaagcagcagcgctatttgcaaaaacccataatctgctgccactgcaggaagtgccaatggataggttcacagtagacatgaaaagggatgtgaaggtgactcctggtacaaagcacacagaggaaagacctaaggtacaggttatacaggcggctgaacccttggcaacagcatacctatgtgggattcacagagagctggttaggaggctgaacgccgtcctcctacccaatgtacatacactatttgacatgtctgccgaggatttcgatgccatcatagccgcacactttaagccaggagacactgttttagaaacggacatagcctcctttgataagagccaagatgattcacttgcgcttactgctttaatgctgttagaggatttaggggtggatcactccctgttggacttgatagaggctgctttcggagagatttccagctgtcatctaccgacaggtacgcgcttcaagttcggcgccatgatgaaatctggtatgttcctaactctgttcgtcaacacactgctaaatatcaccatcgccagccgagtgctggaagatcgtctgacaaaatccgcgtgcgcagccttcatcggcgacgacaacataatacatggagtcgtctccgatgaattgatggcagccagatgcgccacttggatgaacatggaagtgaagatcatagatgcagttgtatcccagaaagccccttacttttgtggagggtttatactgcacgatatcgtgacaggaacagcttgcagagtggcagacccgctaaaaaggctatttaaactgggcaaaccgctagcggcaggtgacgaacaagatgaggatagaagacgagcgctggctgacgaagtggtcagatggcaacgaacagggctaattgatgagttggagaaagcggtatactctaggtatgaagtgcagggtatatcagttgtggtaatgtccatggccacctttgcaagctccagatccaacttcgagaagctcagaggacccgtcgtaactttgtacggcggtcctaaataggtacgcactacagctacctattttgcagaagccgacagtaagtacctaaacactaatcagctacaatggagttcatcccaacccaaactttttacaacaggaggtaccagcctcgaccctggactccgcgccctactatccaagtcatcaggcccagaccgcgcccgcagaggcaagctgggcaacttgcccagctgatctcagcagttaataaactgacaatgcgcgcggtaccccaacagaagccacgcaagaatcggaagaataagaagcaaaagcaaaagcagcaggcgccacaaaacaacacaaaccaaaagaagcagccacctaaaaagaaaccagctcaaaagaaaaagaagccgggccgcagagagaggatgtgcatgaaaatcgaaaatgactgtattttcgaagtcaagcacgaaggtaaggtaacaggttacgcgtgcttggtgggggacaaagtaatgaaaccagcacacgtaaaggggaccatcgataacgcggacctggccaaattggcctttaagcggtcatctaagtacgaccttgaatgcgcgcagatacccgtgcacatgaagtccgacgcttcgaagttcacccatgagaaaccggaggggtactacaactggcaccacggagcagtacagtactcaggaggccggttcaccatccctacaggtgcgggcaaaccaggggacagcggtagaccgatcttcgacaacaagggacgcgtggtggccatagtcttaggaggagctaatgaaggagcccgtacagccctctcagtggtgacctggaataaagacattgtcactaaaatcacccctgagggagccgaagagtggagtcttgccatcccagttatgtgcctgttggcaaataccacgttcccctgctcccagcccccttgcataccctgctgctacgaaaaggaaccggaggaaaccctacgcatgcttgaggacaacgtcatgagacctgggtactatcagctgctacaagcatcattaacatgttctccccaccgccagcgacgcagcaccaaggacaacttcaatgtctataaagccacaagaccatacctagctcactgtcccgactgtggagaagggcactcgtgccatagtcccgtagcactagaacgcatcagaaatgaagcgacagacgggacgctgaaaatccaggtctccttgcaaattggaatagggacggatgatagccatgattggaccaagctgcgttacatggacaatcacataccagcagacgcagggagggccgggctatttgtaagaacatcagcaccatgcacgattactggaacaatgggacacttcatcctggcccgatgtccgaaaggagaaactctgacggtgggattcactgacagtaggaagattagtcactcatgtacgcacccatttcaccacgaccctcctgtgataggccgggaaaaattccattcccgaccgcagcacggtaaagagctaccttgcagcacgtacgtgcagagcaacgccgcaactgccgaggagatagaggtacacatgcccccagacacccctgatcgcacattgctgtcacaacagtccggcaacgtaaagatcacagtcaatagtcagacggtgcggtataagtgtaattgcggtggctcaaatgaaggactaataactacagataaagtgattaataactgcaaggttgatcaatgtcatgccgcggtcaccaatcacaaaaagtggcagtataactcccctctggtcccgcgtaacgctgaactcggggaccgaaaaggaaaaattcacatcccgtttccgctggcaaatgtaacatgcatggtgcctaaagcaaggaaccccaccgtgacgtacgggaaaaaccaagtcatcatgctactgtatcctgaccacccaacactcctgtcctaccggagtatgggagaagaaccaaactatcaagaagagtgggtgacgcacaagaaggaggtcgtgctaaccgtgccgactgaagggctcgaggttacgtggggcaacaacgagccgtataagtattggccgcagttatctgcaaacggtacagcccacggccacccgcatgagataatcttgtactattatgagctgtaccctactatgactgtagtagttgtgtcagtggcctcgttcatactcctgtcgatggtgggtatggcagtggggatgtgcatgtgtgcacgacgcagatgcatcacaccatacgaactgacaccaggagctaccgtccctttcctgcttagcctaatatgctgcatcagaacagctaaagcggccacataccaagaggctgcggtatacctgtggaacgagcagcaacctttgttttggctacaagcccttattccgctggcagccctgattgtcctatgcaactgtctgagactcttaccatgctgttgtaaaacgttggcttttttagccgtaatgagcatcggtgcccacactgtgagcgcgtacgaacacgtaacagtgatcccgaacacggtgggagtaccgtataagactctagtcaacagaccgggctacagccccatggtactggagatggagctactgtcagtcactttggagccaacgctatcgcttgattacatcacgtgcgaatacaaaaccgtcatcccgtctccgtacgtgaaatgctgcggtacagcagagtgcaaggacaaaaacctacctgactacagctgtaaggtcttcaccggcgtctacccatttatgtggggcggcgcctactgcttctgcgacgctgaaaacacgcaattgagcgaagcacatgtggagaagtccgaatcatgcaaaacagaatttgcatcagcatacagggctcataccgcatccgcatcagctaagctccgcgtcctttaccaaggaaataacatcactgtaactgcctatgcaaacggcgaccatgccgtcacagttaaggacgccaaattcattgtggggccaatgtcttcagcctggacaccttttgacaacaaaatcgtggtgtacaaaggtgacgtttacaacatggactacccgccctttggcgcaggaagaccaggacaatttggcgatatccaaagtcgcacgcctgagagcaaagacgtctatgctaacacacaactggtactgcagagaccggctgcgggtacggtacacgtgccatactctcaggcaccatctggctttaagtattggttaaaagaacgaggggcgtcgctacagcacacagcaccatttggctgccaaatagcaacaaacccggtaagagcgatgaactgcgccgtagggaacatgcccatctccatcgacataccggatgcggccttcactagggtcgtcgacgcgccctctttaacggacatgtcatgcgaggtaccagcctgcacccattcctcagactttgggggcgtcgccattattaaatatgcagtcagcaagaaaggcaagtgtgcggtgcattcgatgaccaacgccgtcactatccgggaagctgagatagaagttgaagggaattctcagctgcaaatctctttctcgacggccttggccagcgccgaattccgcgtacaagtctgttctacacaagtacactgtgcagccgagtgccaccctccgaaggaccacatagtcaactacccggcgtcacataccaccctcggggtccaggacatttccgctacggcgatgtcatgggtgcagaagatcacgggaggtgtgggactggttgtcgctgttgcagcactgattctaatcgtggtgctatgcgtgtcgttcagcaggcactaacttgacgactaagcatgaaggtatatgtgtcccctaagagacacaccgtatatagctaataatctgtagatcaaagggctatataacccctgaatagtaacaaaatacaaaatcactaaaaattataaaaaaaaaaaaaaaaaaacagaaaaatatataaataggtatacgtgtcccctaagagacacattgtatgtaggtgataagtatagatcaaagggccgaacaacccctgaatagtaacaaaatataaaaattaataaaaatcataaaatagaaaaaccataaacagaagtagttcaaagggctataaaaacccctgaatagtaacaaaacataaaactaataaaaatcaaatgaataccataattggcaaacggaagagatgtaggtacttaagcttcctaaaagcagccgaactcactttgagatgtaggcatagcataccgaactcttccacgattctccgaacccacagggacgtaggagatgttattttgtttttaatatttc

SEQ ID NO: 181 - DNA, 10976 bp, Japanese encephalitis virus
agaagtttatctgtgtgaacttcttggcttagtatcgttgagaagaatcgagagattagtgcagtttaaacagttttttagaacggaagataaccatgactaaaaaaccaggagggcccggtaaaaaccgggctatcaatatgctgaaacgcggcctaccccgcgtattcccactagtgggagtgaagagggtagtaatgagcttgttggacggcagagggccagtacgtttcgtgctggctcttatcacgttcttcaagtttacagcattagccccgaccaaggcgcttttaggccgatggaaagcagtggaaaagagtgtggcaatgaaacatcttactagtttcaaacgagaacttggaacactcattgacgccgtgaacaagcggggcagaaaacaaaacaaaagaggaggaaatgaaggctcaatcatgtggctcgcaagcttggcagttgtcatagcttacgcaggagcaatgaagttgtcgaatttccaggggaagcttttgatgaccatcaacaacacggacattgcagacgttatcgtgattcccacctcaaaaggagagaacagatgctgggtccgggcaatagacgtcggctacatgtgtgaggacactatcacgtacgaatgtcctaagctcaccatgggcaatgatccagaggatgtggattgctggtgtgacaaccaagaagtctacgtccaatatggacggtgcacgcggaccaggcattccaagcgaagcaggagatccgtgtcggtccaaacacatggggagagttcactagtgaataaaaaagaggcttggctggattcaacgaaagccacacggtatctcatgaaaactgagaactggatcataaggaatcctggctatgctttcctggcggcgacacttggctggatgcttggcagtaacaacggtcaacgcgtggtatttaccatcctcctgctgttggtcgctccggcttacagttttaattgtctgggaatgggcaatcgtgacttcatagaaggagccagtggagccacttgggtggacttggtgctagaaggagatagctgcttgacaatcatggcaaacgacaaaccaacattggacgtccgcatgattaacatcgaagctagccaacttgctgaggtcagaagttactgctatcatgcttcagtcactgacatctcgacggtggctcggtgccccacgactggagaagctcacaacgagaagcgagctgatagtagctatgtgtgcaaacaaggcttcactgatcgtgggtggggcaacggatgtggacttttcgggaagggaagcattgacacatgtgcaaaattctcctgcaccagcaaagcgattggaagaacaatccagccagaaaacatcaaatacgaagttggcatttttgtgcatggaaccaccacttcggaaaaccatgggaattattcagcgcaagttggggcgtcccaggcggcaaagtttacaataacacccaatgctccttcgataaccctcaaacttggtgactacggagaagtcacgctggactgtgagccaaggagtggactgaacactgaagcgttttacgtcatgaccgtggggtcaaagtcatttctggtccatagggaatggtttcatgacctcgctctcccctggacgtccccttcgagcacagcgtggagaaacagagaactcctcatggaatttgaagaggcgcacgccacaaaacagtccgttgttgctcttgggtcacaggaaggaggcctccatcaggcgttggcaggagccatcgtggtggagtactcaagctcagtgaagttaacatcaggccacctgaaatgtaggctgaaaatggacaaactggctctgaaaggcacaacctatggcatgtgtacagaaaaattctcgttcgcgaaaaatccggcggacactggccacggaacagttgtcattgaactatcctactctgggagtgatggcccctgcaaaattccgattgtctccgttgcgagcctcaatgacatgacccccgttgggcggctggtgacagtgaaccctttcgtcgcgacttccagtgccaactcaaaggtgctggtcgagatggaaccccccttcggagactcctacatcgtggttgggaggggagacaagcagatcaaccaccattggcacaaagctggaagcacgctaggcaaggccttttcaacaactttgaagggagctcaaagactggcagcgttgggcgacacagcctgggactttggctccattggaggggtcttcaactccataggaaaagccgttcaccaagtgtttggtggtgccttcagaacactctttgggggaatgtcttggatcacacaagggctaatgggtgccctactactctggatgggcgtcaacgcacgagaccgatcaattgctttggccttcttagccacaggaggtgtgctcgtgttcttagcgaccaatgtgcatgctgacactggatgtgccattgacatcacaagaaaagagatgagatgtggaagtggcatctttgtgcacaacgacgtggaagcctgggtggacaggtataaatacttgccagaaacgcccagatccctagcgaagatcgtccacaaagcgcacaaggaaggcgtgtgcggagtcagatctgtcactagattggagcaccaaatgtgggaagccgtacgggacgaattgaacgtcctgctcaaagagaatgcagtggacctcagtgtggttgtgaacaagcccgtgggaagatatcgctcagcccctaaacgcctatccatgacgcaagagaagtttgaaatgggctggaaagcatggggaaaaagcattctctttgccccggaattggctaactccacatttgtcgtagatggacctgagacaaaggaatgccctgatgagcatagagcttggaacagcatgcaaatcgaagacttcggctttggcatcacatcaacccgtgtgtggctgaaaattagagaggagagcactgacgagtgtgatggagcgatcataggcacggctgtcaaaggacatgtggcagtccatagtgacttgtcgtactggattgagagtcgctacaacgacacatggaaacttgagagggcagtctttggagaggtcaaatcttgcacttggccagagacacacaccctttggggagatggtgttgaggaaagtgaactcatcattccgcataccatagccggaccaaaaagcaagcacaatcggagggaagggtataagacacaaaaccagggaccttgggatgagaatggcatagtcttggactttgactattgcccagggacgaaagtcaccattacagaggactgtggcaagagaggcccttcggtcagaaccactactgacagtggaaagttgattactgactggtgctgtcgcagttgctcccttccgcccctacgattccggacagaaaatggctgctggtacggaatggaaatcagacctgtcaggcatgatgaaacaacactcgttagatcacaggttgatgctttcaatggtgaaatggttgacccttttcagctgggccttctggtgatgtttctggccacccaggaggtccttcgcaagaggtggacggccagattgaccattcctgcggttttgggggccctacttgtgctgatgcttgggggcatcacttacactgatttggcgaggtatgtggtgctagtcgctgccgctttcgcagaggccaacagtggaggagacgtcctgcatcttgctttgattgccgtttttaagatccaaccagcgtttctagtgatgaacatgcttagcacgagatggacgaaccaagaaaacgtggtcctggtcctaggggctgccttgtttcaactggcctcagtagatctgcaaataggagtccacggaatcctgaatgccgccgctatagcatggatgattgtccgagcgatcaccttccccacaacctcctccgtcaccatgccagtcttagcgcttctaaccccgggaatgagggctctatacctagacacttacagaatcatcctcctcgtcatagggatttgctccctgctgcaagagaggaaaaagaccatggcaaaaaagaaaggagctgtactcttgggcttagcgctcacatccactggatggttctcgcccaccactatagctgccggactaatggtctgcaacccaaacaagaagagagggtggccagccactgagtttttgtcggcagttggattgatgtttgccatcgtaggtggcttggccgagttggatattgaatccatgtcaatacccttcatgctggcaggtctcatggcagtgtcctacgtggtgtcaggaaaagcaacagatatgtggcttgaacgggccgccgacatcagctgggagatggatgctgcaatcacaggaagtagtcggaggctggatgtgaaactggatgatgacggagattttcacttgattgatgatcccggtgttccatggaaggtctgggtcctgcgcatgtcttgtattggcttagccgccctcacgccttgggccatcgttcccgccgctttcggttattggctcactttaaaaacaacaaaaagagggggcgtgttttgggacacgccatccccaaaaccttgctcaaaaggagacactactacaggagtctaccgaattatggctagagggattcttggcacttaccaggccggcgtcggagtcatgtacgagaatgttttccacacactatggcacacaactagaggagcagccattatgagtggagaaggaaaattgacgccatactggggtagtgtgaaagaagaccgcatagcttacggaggcccatggaggtttgaccgaaaatggaatggaacagatgacgtgcaagtgatcgtggtagaaccggggaaggctgcagtaaacatccagacaaaaccaggagtgtttcggactcccttcggggaggttggggctgttagtctggattacccgcgaggaacatccggctcacccattctggattctaatggagacatcataggcctatacggcaatggagttgagcttggcgatggctcatacgtcagcgccatcgtgcagggtgaccgtcaggaggaaccagtcccagaagcttacaccccaaacatgttgagaaagagacagatgactgtgctagatttgcaccctggctcagggaagaccaggaaaattctgccacagataatcaaggacgccatccagcagcgcctaagaacagctgtgctggcaccgacgcgggtggtagcagcagaaatggcagaagctttgagagggctcccagtgcgatatcaaacttcagcagtgcagagagagcaccaagggaatgaaatagtggatgtgatgtgccacgccactctgacccatagactgatgtcaccgaacagagtgcccaactacaacctatttgtcatggatgaagctcatttcactgacccagccagcatagccgcacgaggatacattgctaccaaggtggaattaggggaggcagcagccatcttcatgacagcgaccccgcctggaaccacggatccttttcctgactcaaatgccccaatccatgatttgcaagatgagataccagacagggcatggagcagtggatacgaatggatcacagaatatgcgggcaaaaccgtgtggtttgtggcgagcgtaaaaatggggaatgagattgcaatgtgcctccaaagagcggggaaaaaggtcatccaactcaaccgcaagtcctatgatacagaatacccaaaatgtaagaatggagactgggactttgtcattaccaccgacatctctgaaatgggggccaacttcggtgcgagcagggtcatcgactgtagaaagagcgtgaaacccaccatcttagaagagggagaaggcagagtcatcctcggaaacccatctcccataaccagtgcaagcgcagctcaacggaggggcagagtaggcagaaaccccaaccaagttggagatgaatatcactatgggggggctaccagtgaagatgacagtaacctagcccattggacagaggcaaagatcatgttagacaacatacacatgcccaatggactggtggcccagctctatggaccagagagggaaaaggcttttacaatggatggtgaataccgtctcagaggtgaagaaaagaaaaacttcttggagctgcttaggacggctgacctcccggtgtggctggcctacaaggtggcgtccaatggcattcagtacaccgacagaaggtggtgttttgatgggccgcgcacgaatgccatactggaggacaacaccgaggtagagatagtcacccggatgggtgagaggaaaatcctcaagccgagatggcttgatgcaagagtttatgcagatcaccaagccctcaagtggttcaaagactttgcagcagggaagagatcagccattagcttcatagaggtgctcggtcgcatgcctgagcatttcatgggaaagacgcgggaagctttagacaccatgtacttggttgcaacggctgagaaaggcgggaaagcacaccgaatggctctcgaagagctgccagatgcactggaaaccatcacacttattgttgccattactgtgatgacaggaggattcttcctactaatgatgcagcgaaagggtatagggaagatgggtcttggagctctggtgctcacgctagctaccttcttcctgtgggcggcagaggttcctggaactaaaatagcagggaccctgctgatcgccctgctgctgatggtggtgctcatcccagaaccggaaaaacagaggtcacagacagataaccaactggcggtgtttctcatctgcgtcttgaccgtggttggagtggtggcagcaaacgagtacgggatgctagagaaaaccaaagcagatctcaagagcatgtttgtcggaaagacgcaggcatcagggctgactggattgccaagcatggcactggacctgcgtccagccacagcctgggcactgtatggggggagcacagtcgtgctaacccctcttctgaaacacctgatcacgtcggaatacgtcaccacatcgctagcctcaattaactcacaagctggctcattattcgtcttgccacgaggcgtgccttttaccgacctagacttgaccgttggcctcgtcttccttggctgttggggtcaaatcacccttacaacgtttctgacagccatggttctggcgacacttcattatgggtacatgctccctggatggcaagcagaagcactcagggctgcccagagaaggacagcggctggaataatgaagaatgccgttgttgacggaatggtcgccactgatgtgcctgaactggaaaggaccacccctctgatgcaaaagaaagtcggacaggtgctcctcataggggtaagcgtagcagcgttcctcgtcaaccctaatgtcaccactgtgagagaagcaggggtattggtgacggcggctacgctcactttgtgggacaatggagccagtgccgtctggaattccaccacagccacgggactctgccatgttatgcgaggtagctacctggctggaggttccattgcttggactctcatcaagaacgcggataagccctccttgaaaaggggaaggcccgggggcaggacgctaggggagcaatggaaggaaaaactaaacgctatgagcagagaagagttttttaaataccgaagagaggccataatcgaggtggaccgcactgaagcacgcagggctagacgtgaaaacaacatagtgggaggacatccggtttcgcgaggctcagcaaaactccgttggctcgtggagaaaggatttgtctcgccaataggaaaagtcattgatctagggtgtgggcgtggaggatggagctactacgcagcaaccctgaagaaggtccaggaagtcagaggatacacgaaaggtggggcgggacatgaagaaccgatgctcatgcagagctatggccggaatctggtctccttgaaaagtggagtggacgtgttttacaaaccttcagaacccagtgacaccctgttctgtgacataggggaatcctctccaagtccagaagtagaagaacaacgcacactacgcgtcctagagatgacatctgactggttgcaccgaggacctagagagttctgcataaaagttctctgcccttacatgcccaaggttatagaaaaaatggaagttctgcagcgccgcttcggaggtgggctagtgcgtctccccctgtcccggaactccaatcacgagatgtattgggttagtggagccgctggcaatgtggtgcacgctgtgaacatgaccagccaggtactactggggcgaatggatcgcacagtgtggagagggccaaagtatgaggaagatgtcaacctagggagcggaacaagagccgtgggaaagggagaagtccatagcaatcaggagaaaatcaagaagagaatccagaagctcaaagaagaattcgccacaacgtggcacaaagaccctgagcatccataccgcacttggacataccatggaagctatgaagtgaaggctactggctcagccagctctctcgtcaacggagtggtgaagctcatgagcaaaccttgggacgccattgccaacgtcaccaccatggccatgactgacaccaccccttttggacagcaaagagtcttcaaggagaaagttgacacgaaggctcctgagccaccagctggagccaaggaagtgctcaacgagaccaccaactggctgtgggcccacttgtcacgggaaaaaagaccccgcttgtgcaccaaggaagaatttataaagaaagtcaacagcaacgcggctcttggagcagtgttcgctgaacagaatcaatggagcacggctcgtgaggctgtggatgacccgcggttctgggagatggttgatgaagagagggaaaaccatctgcgaggagagtgtcatacatgtatctacaacatgatgggaaaaagagagaagaagcctggagagtttggaaaagctaaaggaagcagggccatttggttcatgtggcttggagcacggtatctagagtttgaagctttggggttcctgaatgaagaccattggctgagccgagagaattcaggaggtggagtggaaggctcaggcgtccaaaagctgggatacatcctccgtgacatagcaggaaagcaaggagggaaaatgtacgctgatgacaccgccggatgggacactagaattaccagaactgatttagaaaatgaagccaaggtgctggagctcctagacggtgaacaccgcatgctcgctcgagccataattgaactgacttacaggcacaaagtggtcaaggtcatgagacctgcagcagaaggaaagaccgtaatggacgtgatatcaagagaagatcaaagggggagtggacaggtggtcacttatgcccttaacactttcacgaacattgctgtccagctcgtcaggctgatggaggctgagggggtcattggaccacaacacttggaacagctacctagaaaaaccaagatagctgtcaggacctggctctttgagaatggagaggagagagtgaccaggatggcgatcagcggagatgactgtgtcgtcaagccgctggatgacagattcgccacagccctccacttcctcaacgcaatgtcaaaggtcagaaaagacatccaggaatggaagccttcgcatggctggcacgactggcagcaagttcccttctgctctaaccattttcaggagattgtgatgaaagatggaaggagcatagttgtcccgtgcagaggacaggatgagctgataggcagggctcgcatctctccaggagctggatggaatgtgaaggacacagcttgtctggccaaagcatatgcacagatgtggctactcctatacttccatcgtagggacttgcgtctcatggcaaatgcgatttgctcagcagtgccagtggattgggtgcccacaggcaggacgtcctggtcaatacactcgaaaggagagtggatgaccacggaagacatgctgcaggtctggaacagagtctggattgaagaaaatgaatggatgatggacaagactccaatcacaagctggacagacgttccgtatgtgggaaagcgtgaggacatctggtgtggtagcctcatcggaacgcgatccagagcaacctgggctgagaacatctatgcggcgataaaccaggtcagagctgtcatagggaaagaaaattatgttgactacatgacctcactcaggagatacgaagacgtcctgatccaggaagacagggtcatctagtgtgatttaaagtagaaaagtagactatgtaaataatgtaaatgagaaaatgcatgcatatggagtcaggccagcaaaagctgccaccggatactgggtagacggtgctgtctgcgtctcagtcccaggaggactgggttaacaaatctgacaacagaaagtgagaaagccctcagaaccgtctcggaagtaggtccctgctcactggaagttgaaagaccaacgtcaggccacaaatttgtgccaccccgctagggggtgcggcctgcgcagccccaggaggactgggttaccaaagccgttgagcccccacggcccaagcctcgtctaggatgcaatagacgaggtgtaaggactagaggttagaggagaccccgtggaaacaacaatatgcggcccaagccccctcgaagctgtagaggaggtggaaggactagaggttagaggagaccccgcatttgcatcaaacagcatattgacacctgggaatagactgggagatcttctgctctatctcaacatcagctactaggcacagagcgccgaagtatgtagctggtggtgaggaagaacacaggatct

SEQ ID NO: 182 - DNA, 984 bp, La Crosse virus
agtagtgtaccccacttgaatactttgaaaataaattgttgttgactgttttttacctaaggggaaattatcaagagtgtgatgtcggatttggtgttttatgatgtcgcatcaacaggtgcaaatggatttgatcctgatgcagggtatatggacttctgtgttaaaaatgcagaattactcaaccttgctgcagttaggatcttcttcctcaatgccgcaaaggccaaggctgctctctcgcgtaagccagagaggaaggctaaccctaaatttggagagtggcaggtggaggttatcaataatcattttcctggaaacaggaacaacccaattggtaacaacgatcttaccatccacagattatctgggtatttagccagatgggtccttgatcagtataacgagaatgatgatgagtctcagcacgagttgatcagaacaactattatcaacccaattgctgagtctaatggtgtaggatgggacagtgggccagagatctatctatcattctttccaggaacagaaatgtttttggaaactttcaaattctacccgctgaccattggaattcacagagtcaagcaaggcatgatggaccctcaatacctgaagaaggccttaaggcaacgctatggcactctcacagcagataagtggatgtcacagaaggttgcagcaattgctaagagcctgaaggatgtagagcagcttaaatggggaaaaggaggcctgagcgatactgctaaaacattcctgcagaaatttggcatcaggcttccataaatatggcatgaggcattcaaattaggttctaaattctaaatttatatatgtcaatttgattaattggttatccaaaagggttttcttaagggaacccacaaaaatagcagctaaatgggtgggtggtaggggacagcaaaaaactataaatcaggtcataaataaaataaaatgtattcagtggggcacactact

SEQ ID NO: 183 - DNA, 4527 bp, La Crosse virus
agtagtgtactaccaagtatagataacgtttgaatattaaagttttgaatcaaagccaaagatgatttgtatattggtgctaattacagttgcagctgcaagcccagtgtatcaaaggtgtttccaagatggggctatagtgaagcaaaacccatccaaagaagcagttacagaggtgtgcctgaaagatgatgttagcatgatcaaaacagaggccaggtatgtaagaaatgcaacaggagttttttcaaataatgtcgcaataaggaaatggctagtctctgattggcatgattgcaggcctaagaagatcgttgggggacacatcaatgtaatagaagttggtgatgacctgtcactccatactgaatcatatgtttgcagcgcagattgtaccataggtgtagacaaagagactgcacaggtcaggcttcagacagataccacaaatcattttgaaattgcaggcactactgtgaagtcaggatggttcaagagcacgacatatataactcttgatcaaacttgcgaacaccttaaagtttcctgcggcccaaaatctgtacagttccatgcctgcttcaatcagcatatgtcttgcgtcagatttttacacaggacaatattgcctggctctatagccaattccatatgtcagaatatcgaaatcataattttagttacacttactctattaatctttatattgttaagcattttaagtaagacttatatatgttatttattaatgcctatattcatccccatagcatatatatacggtataatttacaataagtcgtgcaaaaaatgcaaattatgtggcttagtgtatcatccattcacagagtgtggcacacattgtgtctgtggtgcccgctatgatacttcagatagaatgaaactgcatagagcttctggattgtgccctggttataaaagcctaagagctgccagagtcatgtgcaagtcgaaagggcctgcatcaatattgtctataattactgcggtactggtcttaacctttgtgacaccaatcaactccatggttttaggagagagtaaagaaacctttgaacttgaagatcttccagacgacatgttggaaatggcatcgagaataaattcttattatctcacctgtatcttgaattatgctgtaagctggggtcttgttatcattggattgttgatcgggctgctttttaagaaataccagcacagattcttaaatgtttacgcaatgtactgtgaagaatgtgacatgtatcatgacaagtctgggttgaaaagacatggtgatttcaccaacaaatgcagacagtgcacatgtggtcaatatgaagatgctgcaggtttgatggctcacaggaaaacctataactgcttagtgcagtacaaagcaaagtggatgatgaacttcctgataatttacatattcttaattttgatcaaagattctgctatagttgtacaagctgctggaactgacttcaccacctgcctagagactgagagtataaattggaactgcactgggccatttttgaacctcgggaattgccaaaagcaacaaaagaaagaaccttacaccaacattgcaactcagttaaagggactaaaggcaatttccgtactagatgtccctataataacagggataccagatgatattgcgggtgctttaagatatatagaagagaaggaagatttccatgtccagctaactatagaatatgcgatgttaagcaaatactgtgactattatacccaattctcagataactcaggatacagtcagacaacatggagagtgtacttaaggtctcatgattttgaagcctgtatactatatccaaatcagcacttttgcagatgtgtaaaaaatggtgagaagtgcagcagctccaattgggactttgccaatgaaatgaaagattattactctgggaaacaaacaaagtttgacaaggacttaaatctagccctaacagctttgcatcatgccttcagggggacctcatctgcatatatagcaacaatgctctcaaaaaagtccaatgatgacttgattgcatacacaaataagataaaaacaaaattcccaggtaatgcattgttgaaggctataatagattatatagcatatatgaaaagtttgccaggtatggcaaatttcaaatatgatgaattctgggatgaattactgtacaaacccaacccagcaaaggcctcaaaccttgctagaggaaaggagtcatcttacaacttcaaactagcaatttcatcaaagtctataaaaacctgcaagaatgttaaggatgttgcctgcttatcgccaaggtcaggtgctatatatgcttcaataattgcgtgtggtgaacccaatgggccaagtgtgtataggaaaccatcaggtggtgtattccaatctagcactgatcggtctatatactgcttgctggatagccattgtctagaagaatttgaggccatcggccaggaggagctggatgcggtaaagaaatccaaatgttgggaaattgaatatcctgacgtaaagctcatccaagaaggcgatgggactaaaagctgtagaatgaaagattctgggaactgcaatgttgcaactaacagatggccagtgatacaatgtgagaatgacaaattttactactcagagcttcaaaaagattatgacaaagctcaagatattggtcactattgcttaagccctggatgtactactgtccggtaccctattaatccaaagcacatctctaactgtaattggcaagtaagcagatctagcatagcgaagatagatgtgcacaatattgaggatattgagcaatataagaaagctataactcagaaacttcaaacgagcctatctctattcaagtatgcaaaaacaaaaaacttgccgcacatcaaaccaatttataaatatataactatagaaggaacagaaactgcagaaggtatagagagtgcatacattgaatcagaagtacctgcattggctgggacatctatcggattcaaaatcaattctaaagagggcaagcacttgctagatgttatagcatatgtaaaaagtgcctcatactcttcagtgtatacaaaattgtactcaactggcccaacatcagggataaatactaaacatgatgaattgtgtactggcccatgcccagcaaatatcaatcatcaggttgggtggctgacatttgcaagagagaggacaagctcatggggatgcgaagagtttggttgcctggctgtaagtgatgggtgtgtatttggatcatgccaagatataataaaagaagaactatctgtctataggaaggagaccgaggaagtgactgatgtagaactgtgtttgacattttcagacaaaacatactgtacaaacttaaaccctgttacccctattataacagatctatttgaggtacagttcaaaactgtagagacctacagcttgcctagaattgttgctgtgcaaaaccatgagattaaaattgggcaaataaatgatttaggagtttactctaagggttgtgggaatgttcaaaaggtcaatggaactatttatggcaatggagttcccagatttgactacttatgccatttagctagcaggaaggaagtcattgttagaaaatgcttcgacaatgattaccaagcatgcaaatttcttcaaagccctgctagttacagacttgaagaagacagtggcactgtgaccataattgactacaaaaagattttaggaacaatcaagatgaaggcaattttaggagatgtcaaatataaaacatttgctgatagtgtcgatataaccgcagaagggtcatgcaccggctgtattaactgcttcgaaaatatccattgcgaattaacgttgcacaccacaattgaagccagctgcccaattaaaagctcgtgcacagtatttcatgacaggattcttgtgactccaaatgaacacaaatatgcattgaaaatggtgtgcacagaaaagccagggaacacactcacaattaaagtctgcaatactaaagttgaagcatctatggcccttgtagacgcaaagcctatcatagaactagcaccagttgatcagacagcatatataagagaaaaagatgaaaggtgtaaaacttggatgtgtagggtaagagatgaaggactgcaggtcatcttggagccatttaaaaatttatttggatcttatattgggatattttacacatttattatatctatagtagtattattggttattatctatgtactactacctatatgctttaagttaagggatacccttagaaagcatgaagatgcatataagagagagatgaaaattagataggggatctatgcagaacaaaattgagtcctgtattatatacttctatttgtagtatagctgttgttaagtggggggtggggaactaacaacagcgtaaatttattttgcaaacattattttatacttggtagcacactact

SEQ ID NO: 184 - DNA, 6980 bp, La Crosse virus
agtagtgtacccctatctacaaaacttacagaaaattcagtcatatcacaatatatgcataatggactatcaagagtatcaacaattcttggctaggattaatactgcaagggatgcatgtgtagccaaggatatcgatgttgacctattaatggccagacatgattattttggtagagagctgtgcaagtccttaaatatagaatataggaatgatgtaccatttgtagatataattttggatataaggcccgaagtagacccattaaccatagatgcaccacatattaccccagacaattatctatatataaataatgtgttatatatcatagattataaggtctctgtatcgaatgaaagcagtgttataacatatgacaaatattatgagttaactagggacatatccgatagattaagtattccaatagaaatagttatcgtccgtatagaccctgtaagtaaggatttgcatattaactctgatagatttaaagaactttaccctacaatagtggtggatataaacttcaatcaatttttcgacttaaaacaattactctatgaaaaattcggtgatgatgaagaattcctattgaaagttgcacatggtgacttcactcttacagcaccctggtgcaagactgggtgccctgaattttggaaacaccccatttataaagaatttaaaatgagtatgccagtacctgagcggaggctctttgaagaatctgtcaagttcaatgcttatgaatctgagagatggaatactaacttggttaaaatcagagaatatacaaagaaagactattcagagcatatttcaaaatctgcaaaaaatattttcctggctagtggattttataagcagccaaataagaatgagattagtgaggggtggacattaatggttgagagggttcaagatcagagagaaatctcaaaatctctccatgaccagaaacctagcatacattttatatggggagcccataacccaggaaatagtaataatgcaaccttcaaactcatattgctttcaaagtccttacaaagcataaaaggtatatcaacttacacagaagcgttcaaatctttaggaaaaatgatggatattggagataaggctattgagtatgaagaattctgcatgtccctaaaaagcaaagcaagatcatcatggaagcaaataatgaacaaaaaattagagcctaaacaaataaacaatgcccttgttttatgggaacagcagtttatggtaaataatgacctgatagacaaaagtgagaagttgaaattattcaaaaatttctgcggtataggcaaacacaagcaattcaagaataaaatgctagaggatctagaagtgtcaaagcccaaaatattagactttgatgacgcaaatatgtatctagctagcctaaccatgatggaacagagtaagaagatattgtccaaaagcaatgggttgaagccagataattttatactgaatgaatttggatccaaaatcaaagatgctaataaagaaacatatgacaatatgcacaaaatatttgagacaagatattggcaatgtatatccgacttctctactctgatgaaaaatatcttatctgtgtcccaatataacaggcacaacacatttaggatagctatgtgtgctaataacaatgtctttgctatagtatttccttcggctgacataaaaactaagaaagcaactgtagtttatagcattatagtgctgcataaagaggaagaaaacatattcaacccaggatgtttgcacggcacatttaagtgtatgaatgggtatatttccatatctagagctataaggctagataaagagaggtgccagagaattgtttcctcacctggactgtttttaacaacttgcctactattcaaacatgataatccaactctagtgatgagcgatattatgaatttttctatatacactagcctgtctatcacaaagagtgttctatctttaacagagccagcacgctacatgattatgaactcattagctatctccagcaatgttaaggactatatagcagagaaattttccccttacacaaagacactgttcagtgtctatatgactagactaattaaaaatgcttgctttgatgcttatgaccagagacagcgtgtccaacttagagatatatatttatctgattatgacataacccaaaaaggtattaaagacaatagagagctaacaagtatatggttccctggtagtgtaacattaaaggagtatttaacacaaatatacttaccattttattttaatgctaaaggactacatgagaagcaccatgtcatggtggatctagcaaagactatattagaaatagagtgcgaacagagggaaaacataaaggagatatggtctacaaattgtaccaaacagacagtgaaccttaaaattttgatccattccttgtgcaagaatttactagcagacacttcaagacacaaccacttgcggaacagaatagaaaataggaacaattttagaaggtctataacaactatttcaacatttacaagttcaaagtcttgcctcaaaataggggactttagaaaagagaaagagctgcagtcagttaaacagaagaaaatcttagaggtgcagagtcgcaaaatgagattagcaaacccaatgttcgtgacagatgaacaagtatgccttgaagttgggcactgcaattatgagatgctgaggaatgctatgccgaattatacagattatatatcaactaaagtatttgataggttatatgagttattagataaaggagttttgacagacaagcctgttatagagcaaataatggatatgatggtcgaccacaaaaagttctatttcacatttttcaataaaggccagaaaacgtcaaaggatagagagatattcgttggagaatatgaagctaaaatgtgtatgtacgcagttgagagaatagcaaaagaaagatgtaaattaaatcctgatgaaatgatatctgagccgggtgatggcaagttgaaggtgttggagcaaaaatcagaacaagaaattcgattcttggtcgagactacaaggcaaaagaatcgtgaaatcgatgaggcaattgaagcattagctgcagaaggatatgagagtaatctagaaaaaattgaaaagctttcacttggcaaagcaaagggcctaaagatggaaataaatgcagatatgtctaaatggagtgctcaggatgttttttataaatatttctggctcatagccttagaccctatcctctacccacaggaaaaagagagaatattatactttatgtgcaactacatggataaagaattgatactgccagatgaattattattcaatttgctggaccaaaaagttgcataccagaatgatataatagctactatgactaatcaattaaattcaaatacagttctgataaagagaaattggctccaagggaatttcaactacacctcaagttacgtccatagctgcgcaatgtctgtgtataaagaaatattaaaagaggccataacattactagacgggtctatattagtcaactcattagtccattcggatgataaccaaacatcgataacaatagttcaggataagatggaaaatgataaaattatagattttgcaatgaaagaatttgagagagcctgtttgacatttggatgccaagcaaatatgaaaaagacatatgtaacaaattgcataaaagagtttgtttcattatttaacttgtacggcgaacccttttcaatatatggcagattcctattaacatctgtgggtgattgtgcctatatagggccttatgaagatttagctagtcgaatatcatcagcccagacagccataaagcatggttgtccacccagtctagcatgggtgtccatagcaataagtcattggatgacctctctgacatacaacatgctaccagggcagtcaaatgacccaattgattatttccctgcagaaaataggaaggatatccctatagaattgaatggtgtattagatgctccattgtcaatgattagtacagttggattggaatctgggaatttatacttcttgataaagttgttgagcaaatataccccggtcatgcagaaaagagagtcagtagtcaaccaaatagctgaagttaagaactggaaggtcgaggatctaacagacaatgaaatatttagacttaaaatactcagatatttagttctagatgcagagatggaccctagtgatattatgggtgagacaagcgacatgagagggaggtctattttgacacctagaaaattcacaacagcaggcagtttaaggaaattatattctttcagtaagtaccaggatagactgtcttcccctggaggcatggttgaattgttcacttatttgcttgagaaacctgagttgttagtgactaaaggggaagatatgaaagattatatggaatctgtgatattccgatataattccaaaaggttcaaagaaagtttgtcaatacagaacccagcacaattatttatagaacagatattgttctcacataagcccataatagacttttctggtatcagggacaaatatataaacctacatgatagtagagctctagagaaggaacctgacatattaggaaaagtaacatttacagaggcttatagattattaatgagggacctgtctagcctagaactaaccaatgatgacattcaagtaatttattcttacataatacttaatgaccctatgatgataactattgcaaacacacatatattgtcaatatacgggagtcctcaacggaggatgggcatgtcctgttcaacgatgccagaatttagaaatttaaaattaatacatcattccccagccttagttttgagagcatatagtaaaaataatcctgacatccagggtgctgatcccacggaaatggctagagatttagttcatctgaaagagtttgttgagaacacaaatttagaagaaaaaatgaaagttaggattgctataaatgaagcagagaaaggacaacgggatatagtctttgaactaaaagagatgactagattttatcaggtttgctatgagtatgtcaaatctacagaacacaagataaaagtcttcattctcccgacaaaatcatacacaacaacagatttctgttcactcatgcaggggaatttaataaaagataaagagtggtacacagttcactacctaaaacagatattgtctggtggccataaagccataatgcagcataatgccactagtgagcaaaatattgcttttgagtgtttcaaattaattacccattttgcagactcattcatagattcattatctaggtcagcttttttgcagttgataatagatgaattcagttataaagatgtgaaggttagcaaactttatgacataataaagaatgggtataatcgaactgacttcataccattgctttttagaactggcgatttaagacaagctgacttagacaagtatgatgctatgaaaagtcatgagagggttacatggaatgattggcaaacatctcgtcacttggacatgggctcaattaatctaacaataaccggttacaatagatcaataacaataatcggagaagataacaaattgacatatgcagaattatgtctgactaggaaaactcctgagaatataactataagtggcagaaaattgctaggtgcaaggcatggacttaaatttgaaaatatgtccaaaatccaaacatacccaggcaattattatataacatatagaaagaaagatcgccaccagtttgtataccagatacattctcatgaatcaataacaaggaggaatgaagagcatatggctatcaggaccagaatatacaatgaaataactccagtatgtgtagttaacgttgcagaggtggatggggaccaacgtatattgataagatctttagactatctaaataatgatatattttctctttcaaggattaaagtcgggcttgacgaatttgcaacaataaaaaaagcacactttagtaaaatggtctcatttgaaggacccccaattaagacagggctcctcgaccttactgaattgatgaaatctcaagatttgcttaaccttaattatgataatataaggaatagcaacttgatatctttttcaaaattgatttgctgtgaggggtcagataatataaatgatgggttagagtttctgtccgatgaccctatgaactttacagagggtgaagcaatacattcaacaccgatctttaatatatattactcaaaaagaggagaaagacatatgacatacaggaatgcaattaaattactgatagaaagagaaactaagatttttgaagaagctttcacattcagtgagaatggcttcatatcgccagagaatcttggttgcttagaagcagtagtatcattaataaaattgttgaaaactaatgagtggtccacagttatagataaatgtattcatatatgtttaataaagaatggtatggatcacatgtaccattcatttgatgtccctaaatgttttatggggaatcctatcactagagacatgaattggatgatgtttagagaattcatcaatagtttaccagggacagatataccaccatggaatgtcatgacagagaacttcaaaaagaaatgtattgctctgataaactctaagttagaaacacagagagatttctcagaattcactaaactgatgaaaaaggaaggtgggaggagtaatatagaatttgattagtagttatgagtttacagagaacctacaattaggctataaatttgggagggttttggaaattggctaaaattcaaaaagagggggattaacagcaactgtataaatttgtagataggggcacactact

SEQ ID NO: 185 - DNA, 1690 bp, Rift Valley fever virus
acacaaagaccccctagtgcttatcaagtatatcatggattactttcctgtgatatctgttgatttgcagagtggtcgtcgtgttgtgtcagtggagtactttagaggagatggtcctcccaggataccttattctatggttgggccctgttgtgtctttctcatgcaccatcgtcctagtcacgaggttcgcttgcgattctctgatttctacaatgtcggagaattcccataccgagtcggacttggagactttgcatcaaacgttgcacctccaccagcgaagccttttcagagacttattgatctaataggccatatgactcttagtgatttcacaaggttccccaatctgaaagaagccatatcctggcctcttggagaaccctcactggctttctttgacctaagctctactagagtgcataggaatgatgacattagaagggatcagattgccactctagcaatgaggagttgcaagatcaccaatgatctagaggactcctttgttggcttacacaggatgatagcgactgaggccatcctcagagggattgacctgtgcctgttgccaggctttgatctcatgtatgaggttgctcacgtacagtgcgttcggcttctgcaagcagcaaaagaggacatttctaatgctgtagttccaaactcagccctcattgttcttatggaggagagcctgatgctgcgctcatcacttcccagcatgatggggagaaacaactggattccagttattcctccaatcccagatgttgagatggaatcagaggaggagagtgatgatgatggatttgttgaggttgattagaggttaaggctgccccaccccccaccccccaatcccgaccgtaaccccaactccccttccccccaaccccctgggcagccacttaggctgctgtcttgtaagcctgagcggctgccatgacagcagctgacggcttcccattggaatccacaagtccaaaggctttcaagaattctctcctcttctcatggcttataaagttgctattcactgctgcattcattggctgcgtgaacgttgcagcaacctcctcttttgttctacctcggaggtttgggttgatgacccgggagaactgcagcagatacagagagtgagcatctaatattgcccttagatagtctcctggtagagaaggatccaccatgccagcaaagctggggtgcatcatatgcctcgggtatgcaggggataggccgtccatggtagtcccagtgacaggaagccactcactcaagacgaccaaagcctggcatgtccagccagccaaggcggcagcaactcgtgatagagtcaactcatcccgggaaggattcccttcctttagcttatacttgttgatgagagcctccacagttgctttgccttctttcgacattttcatcatcatcctcctgggcttgttgccacgagttagagccagaacaatcattttcttggcatccttctcccagtcagccccaccatactgctttaagagttcgataactctacgggcatcaaacccttgataagcaaactctcggacccactgttcaatctcattgcggtccactgcttgagcagcaaactggatcgcaagctcttgatagttgtccattattgtaatagtgtttgtatctctagggagctttgtgt

SEQ ID NO: 186 - DNA, 3885 bp, Rift Valley fever virus
acacaaagacggtgcattaaatgtatgttttattaacaattctaatctcggttctggtgtgtgaagcggttattagagtgtctctaagctccacaagagaagagacctgctttggtgactccactaacccagagatgattgaaggagcttgggattcactcagagaggaggagatgccggaggagctctcctgttctatatcaggcataagagaggttaagacctcaagccaggagttatacagggcattaaaagccatcattgctgctgatggcttgaacaacatcacctgccatggtaaggatcctgaggacaagatttccctcataaagggtcctcctcacaaaaagcgggtggggatagttcggtgtgagagacgaagagatgctaagcaaatagggagagaaaccatggcagggattgcaatgacagtccttccagccttagcagtttttgctttggcacctgttgtttttgctgaagacccccatctcagaaacagaccagggaaggggcacaactacattgacgggatgactcaggaggatgccacatgcaaacctgtgacatatgctggggcatgtagcagttttgatgtcttgcttgaaaagggaaaatttccccttttccagtcgtatgctcatcatagaactctactagaggcagttcacgacaccatcattgcaaaggctgatccacctagctgtgaccttctgagtgctcatgggaacccctgcatgaaagagaaactcgtgatgaagacacactgtccaaatgactaccagtcagctcattacctcaacaatgacgggaaaatggcttcagtcaagtgccctcctaagtatgagctcactgaggactgcaacttttgtaggcagatgacaggtgctagcctgaagaaggggtcttatcctctccaagacttgttttgtcagtcaagtgaggatgatggatcaaaattaaaaacaaaaatgaaaggggtctgcgaagtgggggttcaagcactcaaaaagtgtgatggccaactcagcactgcacatgaggttgtgccctttgcagtgtttaagaactcaaagaaggtttatcttgataagcttgaccttaagactgaggagaatctgctaccagactcatttgtctgtttcgagcataagggacagtacaaaggaacaatggactctggtcagactaagagggagctcaaaagctttgatatctctcagtgccccaagattggaggacatggtagtaagaagtgcactggggacgcagcattttgctctgcttatgagtgcactgctcagtacgccaatgcctattgttcacatgctaatgggtcagggattgtgcagatacaagtatcaggggtctggaagaagcctttatgtgtagggtatgagagagtggttgtgaagagagaactctctgccaagcccatccagagagttgagccttgcacaacttgtataaccaaatgtgagcctcatggattggttgtccgatcaacagggttcaagatatcatcagcagttgcttgtgctagcggagtttgcgtcacaggatcgcagagtccttccaccgagattacactcaagtatccagggatatcccagtcttctgggggggacataggggttcacatggcacacgatgatcagtcagttagctccaaaatagtagctcactgccctccccaggacccgtgcttagtgcatgactgcatagtgtgtgctcatggcctgataaattaccagtgtcacactgctctcagtgcctttgttgttgtgtttgtattcagttctattgcaataatttgtttagctattctttatagggtgcttaagtgcctgaagattgccccaaggaaagttctgaatccactaatgtggatcacagccttcatcagatggatatataagaagatggttgccagagtggcagacaacattaatcaagtgaacagggaaataggatggatggaaggaggtcagttggttctagggaaccctgcccctattcctcgtcatgccccaatcccacgttatagcacatacctgatgttattattgattgtctcatatgcatcagcatgttcagaactgattcaggcaagctccagaatcaccacttgctctacagagggtgttaacaccaagtgtagactgtctggcacagcattgatcagagcagggtcagttggggcagaggcttgtttgatgttgaagggggtcaaggaagatcaaaccaagttcttaaagataaaaactgtctcaagtgagctatcatgcagggagggccagagttattggactgggtcctttagccctaaatgtttgagctcaaggagatgccaccttgtcggggaatgccatgtgaataggtgtctgtcttggagggacaatgaaacttcagcagagttttcatttgttggggaaagcacgaccatgcgagagaataagtgttttgagcaatgtggaggatgggggtgtgggtgtttcaatgtgaacccatcttgcttatttgtgcacacgtatctgcagtcagttagaaaagaggcccttagagtttttaactgtatcgactgggtgcataaactcactctagagatcacagactttgatggctctgtttcaacaatagacttgggagcatcatctagccgtttcacaaactggggttcagttagcctctcactggacgcagagggcatttcaggctcaaatagcttttctttcattgagagcccaggcaaagggtatgcaattgttgatgagccattctcagaaattcctcggcaagggttcttgggggagatcaggtgcaattcagagtcctcagtcctgagtgctcatgaatcatgccttagggcaccaaaccttatctcatacaagcccatgatagatcaattggagtgcacaacaaatctgattgatccctttgttgtctttgagaggggttctctgccacagacaaggaatgacaaaacctttgcagcttcaaaaggaaatagaggtgttcaagctttctctaagggctctgtacaagctgatctaactctgatgtttgacaattttgaggtggactttgtgggagcagccgtatcttgtgatgccgccttcttaaatttgacaggttgctattcttgcaatgcaggggccagggtctgcctgtctatcacatccacaggaactggatctctctctgcccacaataaggatgggtctctgcatatagtccttccatcagagaatggaacaaaagaccagtgtcagatactacacttcactgtgcctgaagtagaggaggagtttatgtactcttgtgatggagatgagcggcctctgttggtgaaggggaccctgatagccattgatccatttgatgataggcgggaagcagggggggaatcaacagttgtgaatccaaaatctggatcttggaatttctttgactggttttctggactcatgagttggtttggagggcctcttaaaactatactcctcatttgcctgtatgttgcattatcaattgggctctttttcctccttatatatcttggaagaacaggcctctctaaaatgtggcttgctgccactaagaaggcctcatagatcagtacgtgtaaaagcaatatgttgaaataagtagacataagcaaacctaattatgtaagtattgtacagataggtcaaattattggaatatccaagcttagaaacttatgcaataatactttagatgtaagcttagttgtaatttggggtggtggggtgaggcagcagcagtctcaagtgcttgtgaatattctagttggcgtaatcgtcttttgccagattagctgggaattaaactaactctttgaagttgcaccggtctttgtgt

SEQ ID NO: 187 - DNA, 6404 bp, Rift Valley fever virus
acacaaaggcgcccaatcatggattctatattatcaaaacagctggttgacaagactggttttgttagagtgccaatcaagcattttgactgtacaatgctaactctggcacttccaacatttgatgtttccaagatggtagatagaattaccatagacttcaatctggatgatatacaaggagcatctgaaataggctcaactttgctaccctccatgtcgatagatgtggaagatatggccaattttgttcacgatttcacctttggccacttagctgacaagactgacagactgttaatgcgtgagtttcccatgatgaatgacgggtttgatcatttgagccctgacatgatcattaaaactacatctggcatgtacaacatcgttgagttcaccacctttaggggagatgaaagaggtgcattccaggctgccatgactaaactcgctaagtatgaggttccttgtgagaacagatctcagggcaggactgttgttctttatgttgttagtgcttatcggcatggtgtatggtctaatctggagctagaggactctgaagcagaggagatggtttataggtacagacttgctcttagtgtgatggatgagctaaggaccttgttcccagaactgtcatccacagatgaggaactagggaagactgagagagagttgctagccatggtctcctccatccaaataaattggtcagtcacagaatctgtgtttccacccttcagcagagaaatgtttgacaggtttagatcctcccctcccgattcagagtatatcacgaggatagtgagcagatgcctaataaattctcaagagaaactcatcaatagttccttctttgctgaagggaatgataaggctctgagattttcaaaaaacgctgaagagtgttccttggcagtagagagagccttaaatcagtatagagcagaagacaaccttagggacctcaatgaccacaagtcaactattcagctgcctccctggctgtcctatcatgatgtcgatggcaaagatctgtgccctcttcagggactagatgtgagaggggaccatcccatgtgcaacttgtggagggaagtggtcacctctgcaaacctagaggagattgagaggatgcacgatgatgcagcagcagaacttgagtttgccctttcgggagtaaaggacaggccagatgagagaaacagataccatagagtccacctaaatatgggctcagatgatagtgtctacatagctgctttaggagttaatggaaagaagcataaagcagacactttagtgcaacaaatgagagacaggagtaaacagcctttctccccagaccacgatgtggatcacatatctgaatttctctctgcatgctctagtgacttgtgggcaacagatgaggacctgtacagccctctctcttgtgataaagagcttagattggcagcccagaggattcatcagccatccttgtcagaaaggggtttcaatgagatcataacagagcactacaaattcatgggaagtaggataggttcatggtgccaaatggtcagcttgataggagctgagctatcagcttctgttaaacaacatgtcaagcctaactactttgtgattaaacgactactaggttctgggattttcttgctaatcaagcccacttccagcaaaagccatatatttgtgtcttttgcaattaagcgctcttgctgggcctttgatctctccacttccagggttttcaagccctacatagatgctggggatctgttagttactgactttgtttcttataagctaagcaagcttaccaacctctgcaagtgcgtttcattaatggagtcctccttctcattctgggcagaagcatttggaattccaagctggaactttgttggtgacttgttcaggtcttcagactctgcagcaatggatgcctcatacatgggcaaactttctttattaacccttttggaagacaaagcagcaactgaagagttacagactattgcaagatatataatcatggagggctttgtctcgcccccagaaatcccaaaacctcacaagatgacctctaagtttcctaaggttctcaggtcagagctgcaggtttacttattaaactgcttatgcagaactatccagagaatagcaggtgagcccttcattcttaagaagaaggatgggtctatatcctggggtggcatgttcaatcctttttcagggcgtccactgcttgatatgcaaccactcatcagctgttgttacaatggttactttaaaaataaagaagaagagactgagccttcgtccctttctgggatgtataagaaaatcatagaacttgagcaccttagaccacagtcagatgccttcttgggttacaaagatccagaacttcccagaatgcatgagttcagtgtttcctacttgaaggaggcttgcaatcatgctaagctagtcttgaggagcctctatggacagaatttcatggagcagatagacaaccagattattcgagagctcagtgggttgactctagaaaggttggccacacttaaggccacaagcaactttaatgagaattggtatgtctataaggatgtagcagacaaaaactacacaagggataaattattagtgaagatgtcaaaatatgcctctgagggaaagagcctagctatccagaagtttgaggattgtatgaggcagatagagtcacaaggatgcatgcatatttgtttgtttaagaaacaacagcatggaggtctgagagagatctatgtgatgggtgcagaggaaagaattgttcaatcggtggtggagacaatagccaggtccatagggaagttctttgcttctgataccctctgtaacccccccaataaagtgaaaattcctgagacacatggcatcagggcccggaagcaatgtaaggggcctgtgtggacttgtgcaacatcagatgatgcaaggaagtggaaccaaggccattttgttacaaagtttgccctcatgctgtgtgagttcacctctcctaaatggtggccgctgatcattaggggatgctcaatgtttaccaggaaaaggatgatgatgaatttgaattatcttaagatcctggatggtcatcgggagcttgatattagagatgactttgtgatggatctcttcaaagcttatcatggcgaggcagaagttccatgggcctttaaaggcaaaacatatttggaaaccacaacagggatgatgcagggaatactgcattatacttcctcactattacacaccattcaccaagaatacatccggtccttgtcctttaagatattcaacctgaaggttgctcctgagatgagcaagagcctggtttgtgacatgatgcaaggatcagatgatagtagtatgctaatcagcttcccagctgatgatgagaaggttcttaccagatgcaaagtggccgcagctatatgcttccgcatgaagaaggagctgggagtgtaccttgccatttacccctcagagaagtccacagcaaacacagattttgtgatggagtacaattctgaattttatttccacacccagcatgttagaccaacgatcaggtggattgcagcttgttgcagcctgccagaagtggaaacactagtagcccgccaggaagaggcctctaacctaatgacttcagttactgagggaggtgggtcattctccttagctgcaatgattcagcaagctcagtgtactctccattacatgctgatgggcatgggagtgtctgagctattcttagagtataagaaggcagtgctgaagtggaatgaccctggcctgggtttcttcctgcttgacaatccttatgcgtgcggattgggaggtttcagatttaatctcttcaaagctatcaccagaactgatttgcagaagctatatgctttcttcatgaagaaggtcaagggctcagctgctagggactgggcagatgaagatgtcaccatcccagaaacgtgtagcgtgagcccaggtggcgctctaattcttagctcctctctaaagtggggatctaggaagaagtttcagaaattgagagaccgtttgaacataccagagaactggattgaactaataaatgagaatccagaggtgctctatcgggctcccagaacaggcccagaaatattgttgcgcattgcagagaaagtccatagcccaggtgttgtgtcatcattgtcttctggcaatgcagtttgtaaagtcatggcctcagctgtatacttcttatcagcaacaatttttgaggacactggacgtcctgagttcaacttcttggaggattctaagtacagcttgctacaaaagatggctgcatattctggctttcatggtttcaatgatatggagccagaagatatattattcttattcccgaatattgaggaattagaatcactggattctatagtttacaacaagggagaaatagacatcatcccaagagtcaacatcagggatgcaacccaaaccagggtcactatctttaatgagcagaagaccctccggacatctccagagaagttggtgtcagacaagtggtttgggactcagaagagtaggataggcaaaacaaccttcctggctgaatgggaaaagctaaagaaaattgtaaagtggttggaagacactccagaagcaactctagctcacaccccactgaataaccatattcaagttaggaatttctttgctagaatggaaagcaagcctagaacagtcagaataacaggagctccagtaaagaagaggtcaggggttagtaagatagctatggttatccgtgacaatttctcccggatgggccatcttcgaggtgtagaagaccttgctggcttcactcgtagtgtgtcagctgaaattctcaagcactttctattctgtatactacaaggtccatacagtgagagctataagctacagctaatctacagagtcctaagctcagtgtcaaacgttgagataaaggaatcagatggtaagacaaaaaccaacttgattggaatccttcagagatttctagatggtgatcacgttgtccccataattgaagagatgggagccggaacagtgggtggattcatcaagagacaacaatctaaagttgtgcagaacaaagtggtctattatggagttgggatttggagaggcttcatggatggatatcaggtccatctagagatagaaaatgacataggacagcccccaaggcttaggaatgtcacaactaactgtcagagcagcccatgggacctgagtattccaataaggcaatgggcagaagacatgggggtcacaaacaaccaggattattcctctaaatctagcaggggggccagatattggatgcattcattcaggatgcaaggacctagcaagccatttggatgcccagtttatattattaagggtgatatgtcagatgtcatcagactgagaaaggaggaggtggagatgaaagtacggggctctactctcaacttgtacaccaagcaccattctcatcaggacctacacattctatcttacactgcatcagacaatgatctcagtccaggcattttcaagtcaatatcagatgagggggtggctcaagccctgcaattatttgagagggagccaagcaactgctgggtgagatgtgagtctgtagccccaaaatttatatcagccatccttgagatatgtgaggggaagagacagataaagggaattaacagaaccagactctcagagattgtgagaatttgttctgaatcttccctaagatcaaaagtcggatctatgttctcatttgtcgccaatgtcgaggaggcccatgatgttgattatgatgcgttaatggatctaatgatagaggatgccaagaacaatgcattcagtcatgttgttgactgcatagagttggatgttagtggcccttacgagatggagtcttttgatacatctgatgtcaatctctttgggccagcccattacaaggacatcagttcattatctatgattgctcatcccttaatggataagtttgttgattatgctatttctaagatggggagagcctcagttaggaaagttctagaaacaggtcggtgctccagcaaagactatgatttatcaaaggttctcttcagaactctacagagaccagaagaaagcattaggatagatgatctggaattatatgaggagacagatgtggcggatgacatgctaggctaagaccagtaagcaaagtcaggcttagatttagggatactatgctagtattggaatccatgtgggttctgatactagcatagtgctacaatattgggcggtctttgtgt

SEQ ID NO: 188 - DNA, 675 bp, Colorado tick fever virus
gacattttgtctcagaacgatgccctgtaatcgcgctgttttcggagccttcgtattagcgttactcataagcctacagtcagtatatttcaaactttacgaattttacaagaataacgaaactgcaagaaatacgagtgtcgccgggtttttgaaacgtcacgaagttgctgtcaacgtgattgttgagttctcttttgacattttgttctttctttgtggactactcggatttgagttaagcccaaccgctcgacgccttatttttagacgaacagctagtgcagaaaaagctgatactgttgaacttgaacatgtgtcgtcacgacgacggaatgactctagagatgattcgacagtacgcaatgtctcgaagacatcaccacttgcctcccaacgctcccgtgatcactttgacggagatccacgagaacccgcccccccagcttattctcccgccgacttctatcctccgccagcctctcctcacatatgtgagaccccgctctcgacgcgtgtggcgccctctgctcctagcgctagtttgtttactgctggtggtattggtcttccttagattttatgcgtgacgggcagggtagtcgctgaggacctcgccggcttacggaatgatgacgtcctagcatcattctcccgggacgggtaattgcagtc

SEQ ID NO: 189 - DNA, 1880 bp, Colorado tick fever virus
gacattttgagatgctcaagcgtccggcttactacaacattttcttgcttcctactgggcgacgactggcaaaaacttacaatatactagagaatttaatcaccctacccaaaaccgattggaaactgtacgagaccattgaacagaaactgaaatggatgattcaagaatatcgaagtgattggcgagatagactttctcatcatgaaagatatggtatgaaagttaggttgacctaccgatctgaaagcgagcgaacgaaacttgaagagaaaatcactgatttagttatatctcatggtaagaaagcttcgaccgttcatttctgtacacgtgagtcatacaaagggagagttcgtgctaaccaaattttaattttgttggagcctgagggtttaggcgaagttgagggtttgaccgttcgagcggaaggcaattggatgtctttagttacacattgtttatttatcttaggctctacacttacctgttttggtttcgtggacccagctagaggttgtcgttttaatctgctaccgtatataaagacattacatcctaacgacaaatggttgcttgatcttcaggcgagttggcggcttgaatacggagtctctcgatccatagaggaaggtgcactttatgatttttttgctgagtcacatactctgtacgctgtccggacttggcctggatgtgagaaatacttgggagctttggaggcgttcgttgggagattggctgttctacctgcgcaagttttgacctctaaggagcatgattttcagtctaaattaatgagtaaagctaaaaagacaggatttcattatttgtattatttggtttctttcaccatgaaaacgtccctgacggaccgcatcgtcaaggaggcattggctacagtgaaagtgttcagtttcgtcgttgggcgagatcacttgcctgctgtgggcgtctattcgggtgaagacttcagtaagcaattcttatcaatggctgtaggaacgatggatacaccgagtaggtatgccataactattgtgtccggaatgcaggttgatgtggatgtgaaaagtgttactggcattgctagctttaaggatgggactcagcatacgattgttgatgagatactactgcagccggcacgtttggtattgttgggtcggaaaggaggcggtaaatcaaggttgtcgaagatcttttcagaattgggatacaatgtgttagattcagacacttacggaaaagtgcttacacttgtggcagatcggggagaggatggtttagatgacgcattaaagaagtttgtgcgattgactccagatgaaaggaaagcggttccttctatattcgagactgagatggatagattatgtgaagtttttggttctagaggccttcgcccttatgcccagcgatgtcagcaacaggctggtcgattgcattgggagttgtacgctgcatttcaggagttttatgatcgaacgatacgagtcatcactccggataagtttcgattcgcttattttgcagagttagagcgtggtgggtttgatgacaatggattaactttttctcctgagttgaagactgttgtgttcgttcattctatgcctgagctgttcgaggccatgggtggatgtgttgctgagatagttccgacccacagtaccagattagctatactactccggggccaaggtttgtcagttaatgctgagcttcatctgcatgatttttatgttgctcttaatcagaatggtgcgcggaaagtctctttagggtggttagtacacgccttgaacgagttgttaaaaatgaggtagtaagccggtgggattggtgaccggtgcaggatgctgatctcccttgcagtc

SEQ ID NO: 190 - DNA, 2029 bp, Colorado tick fever virus
gacattttgtcgcgctaggatgagagccgacagacagagtaccgctaagctacgcccatccttacatgctgtgattcaaactggaaatttaaatgcgttcaattttaccgttgaaggggttgattgcccaacgcccgcggatctaagtagatactgtgttgcaaatggctggttctttaaaattggtaaccaggttatcatacctgttctgcgaaatttccctgcattcaactacaacactgacattggaaggtttacctcttttccttttgaaactcttgaagatgtgacaaagctacatgatttagctaatggagatttggtcccacattttgcttttgttgaggatggatccccagtagttgctgccatatgtgatagacatgataatgtagtcactctgcgcttccgagatagtggagggcgaatcataacggttgaagagttgctagctggtgagcaacgagacttgaatctatatcaaggtttagaccaactggcagatgaggctggaattcggcctgaagatattgatcaagcggctttagcggctcaagctgttgctgatgcaggaggtggggttgcacaacaacaggcggctgcagcggcggcaggtgtgcaggctcaagaggatttaccagttgggcgtgaagatgaacttagaccagaagatgtagcagatgctcgtggacaagcggctgctccacctcaggcacaggcaccagcaccacctgatgccgcactacaacgtcaacgcgagcaagcaattctgcggcaggttcccaacttgcatgtcttgcctcagcctcgacagcaattaatcgatcggctggctcaggtacgtgaggcggagcagaaattcattaatgaaatgattcaagaagtgggcgtaattgagcaacagagagatgtggcggcggctggaatgcgattggagttgtgtcggtccgtgcatcgggttgatggaattttacgggcttaccaagagcgagtgaatccgttcagattaggtttgaattatagacctcctatcttgctcgaggaagagattagagttgaagagaatgctcgtcgtttaggtggtgaaatcggtctacatgattttgaaattgcagagaggccagaaagagctctcttacatgccgagtacttggggaatctaatgcatgttgaacaggaaaagttattaacaactggtcgtacgtttgtagcccatattcatcaggctgggtactgtaatccagagggatggtgttgtttgcaagatgttgaggtgcaagtccaagggattgagcccgagagtctcttgcctgcgttggctgttcgcacaaattgtcgaggattggtgctccgagccccgcttccgatcatacgggttttgactcagataattcaccacccctcaggtctcgaccgactcgaagcgaccttgaatgtattacttactgacatgcgtgagcgagtttcgactttgacgacagctgattctacgagacgtattcgtgtaaatgatgctcatgatcttgcagccatgacagcgccgttaggtcacgtatatgctatgctgtctagatggagggacaacgtggccaggttgagggcgagcgctcaacatcaattgatagctcaggaacttgctcgtaagtatgcggagtggcgtccagggcaacactacaccattcctggtagagtattaaatttatttgcaaatcgtcagctgcgatatcaatcccagcttgaatgggtgtatcctcatctatggatagccgacaggaatttggcaggagcatggattctcaacggtgttgttccaacgtatcggaatcttggtgagtgggtgcctgatattgcctttattggcttggttcaatttttggagttctgggaggagtttgtgacatggttccctcattatggggttggaccaattaatcgtggagttccagtgttccctactgtgttttctcctagaatgtcatcgttagcggtgcggcttctttaggctctcgcgcacggggaatttgcagtc

SEQ ID NO: 191 - DNA, 2133 bp, Colorado tick fever virus
gacattttgtccacatcacgaacatggcagctcgacttcctatcgacgccttcggcatgtcagtgattcaacaaaatggtctcaaagtatacacaatcctaccaacaagcaacttgtccaatctgagtgatcaaatatctcaaaacaaactctatgctgtaagtgaacgacacgttcgtgaacttgatcaaagagataaaggaaaagtcaagaaaattaaatttatagtcacatctaagtcggttgattatgaaaattggtttggcccagacacagacacagaaattatacagtatcttgaagaaggaggtttgtaccatgcactttacaacgcctgcaaagaacagaaaagtactccatcttttgttgccagcccctcaaaccctgctcctgtgtcacttaagcaaaaagaaattttatcgaactggaagctgggcactatcgtggaattctgtcaagctgttggtttgaatcgaacacctgaggaaccatggcgtcagctagctcgatcctatggattgattttcattagtgaagttggtgcattggcatccactcatgttgcctctctagacgctgatttggcaaaattcgagcagcgcgagcaacgttggatgaaaatggtcgactacaaggagtcttttgcacatcttggcactgatttcaacagatatgctttctgccctttgataccacctccttgtcctgaagattctgaagaagcgattttgattcatggctcgtgggtaagaagtgaagagcatgacggaggcttgtttgtgctattcaaacgtgtgacgattatggaccggcaccaagtgatgggagcgagagcgcctagcgaggatgaggaagagagctctgacccaacagaaggttcaatggatgaggtgacccaccagactgaaaccttgtccctagactcgataccccctccagatttctctagggctccagtgattgtgactgggatgacgagtgccaaagcatcaacatcgtatagtcgagatgagccacctgaggacgaaggaaaccgtgcaagtgctcgacccaaatctagtccatgtgatacgtgtactgacgactcgtctttgcttcagtccttgctcagtacagattgggttacttcggtcagtacacctcttcatggccctacactgcctatagatgcggcgaaggatttgtcagtagcttcagagtcggaggacgaagtctcgatgtctcaaagtgatgcccctcccgaaacggcaatggatgtatccgccaatcataagccgaacaccgattctgcccattgtgccccctctcccttgcctcagcgtgcgcgaaagattagaccaacggaagcgcggcgtcgagcagagagagagaaaagaaaattgaagccttattatcggtctatggaagagtgttttgttccagcgtgcgatattgaatcatatcgtactagtgtaattgttcaaccattgccgcagaatgttttgccgttccctggtactcagttgacgcgagagactgttttacgcaaggcattggtacgagagtgtgagcgtgttgctcctagtcaggcgcctgatccagaagagttgctagactcggatacagtaaagatttgtgagggcagagcgaaggtgatgtatgagtccattccttctcatcttcgtggagttgaaattgagtcagttgctcctgagtctaacgaggtctcagtcatctatcctcgacctcagatttctatgcctgataatttttcattgggtaacgaggaggagagaattcgcacatacgtaaggaaaaggactattatggagcgagaatctggaggttacgcgatgcttcgtcctggttatggagctgaggcattagagcatgcgagatatgtctctgcagccggcgtaccgattcctgaactcagggggcaagttttgcgttctagagcttcgcgagagatgatgagtcagactgatttgcgtttgttagaactgatgatgcctgtagtgaatgtaccacctgaaggagttgataaggacctgttggcggtgtacaaagcaacagtgatggatattttaaccggttaggcgtggatgagtggggctgcgcagtgtgtgacgagtgggtagaacggttgcagtc

SEQ ID NO: 192 - DNA, 2141 bp, Colorado tick fever virus
gacattttgtaagaatggcagcctcgggatggaacgcagtgataccaaagacctcaagttatgattatattactgtttcaatacaacctgctcaacaagataacaagaaaaatttggtaatagagttcccaccagtctcgtacttctatggtgtctattggactacagatgatatgattattgttagacttccagcttcaaccacttcctcacaagatttaagcaaaatggtcacaattacaaagttacggtggactttccaaaaccagaaatttacgtgtagtgttggcagtgatctggcatttcggataattatgacttgtaacgttggtacgatgtattttactgctacctttctgttaaatacattaacatccactgggactaaggtatatggtatgttcaattatgtgtctttatcaagtttggtggtcgttgtaactggtaatgatgctgcacatgtggaagcattaatcgctgttgaaggtgctgcagtccgtaaccaagtagcaaaattaattttgtggtctgtaactgagacaactaattatttgagttttgaaaaactgatttctaaggcgggtaaggatgttgagtcaggctactataaaggtgatacaaaaacaaagcgggccattcaagcactttcgatctctcagggtgagtcgtggtactacaccgaactgtgtactagttccccattagatgttggtggctcagggttagctttcttcatgcgtattcgcggagtcggactacggtcagaggcaggggtaacaccttggaaggtgagtgaaatttttaagcctctcacttctcgtttggaatcggacttttcttattcaattcatccagaagcacaggaagatgacagtgtggtggttcataaggctcatttactggcccagaacattattcgggatttgggatataagacggtagcggagttggatacagcagaggattcccatttacccgtagggtcggctgattgtttggctgctttgctcgatttattatatcgtaggtcggaggaaatgacattagcattaaatcgagaatataagcctcgtagacggcgagctgctattgctccgcaaatccaagacccagctgttcccgcgatccagacttatcaaaatctggtggcggggatgttaggagagcttaacaagtcgcaacaggaggtgcttgcgtttaaaggaaaatttgagcagttggagaggaaagtgaataaccatttagccgtcaatccgcttacgaagctaagtcggataaagcagagaatggatcagtttgaaactagccttgcgggtgtctcatccgtagtgaatgaggtgcagggattacgtaactcccacggtcagttgtctacagagattaatagaattaaggaggctgagggtcatttcttgaatgatctagagagtgtgcgccgtcatttgcaaggtgagactggtcatttaaggagtcaacttgggaattctctcgtgacaatttttaagccaataattaagatgatatcgagagatataggaatgtgtctgaaagttggcagtgctgatcaatctcagaatgatgtggtggctctttcgtctcgaattgataggctgactcaggaagtagtagctttacaaaatagtgagaagccgaggttattctatcttcatgataaaagtgagattaaggctgcagcaggagcattagaggccgtagctgcgcatgtgtacttagggtggatgagtcagcgtttcatttgcccccctgttttgggaaccgtgtaccatcatgaccgatatattcagggtgtatattataaattggtggcgtgtactattgaaatggttcaccttgataaagggacgatgatcctgttaattcgtgatgaaattctgccggtgggtgttctgcatgaagtcgaatcaaacattgtgttggaccaatgtgatcatgttcccgggattgttcggttgtctcgagatcgggtgtctcctgtggattatattgaagtttatgaagttgtagatccgggagtgtttactttgtctttttcccatgttattgcgatctatatcccgagatgttccgggctgaggttgcttccgtgatggcggtgcaccacgccatacacaattgcagtc

SEQ ID NO: 193 - DNA, 2432 bp, Colorado tick fever virus
gacattttgtcctgaagactgagactgcgtcttgttttctgccgtgcttttgctcaactcacttaccaaatctcaacatgttcaccaacaaagcaattcttgccgtttaccaactccctgaagaatgtactttggaactggtcgtgcgtgatggaactggtaaccttgtgaattcatgctatgtggagacattccagcacagaggaaacattaaattcggtgaccgtcaggctcaagtgatctctcatttcaatcaagtcattgatttgctaagaacatcagtcagcgacagtattgacagtatgattaggtacgttggtgagcagggaaatgatgacactcgagcccttgttgttcgtgctatgaatgacttctttccagccaaggtcggggaggctgtgtttcaggctgttcaggcggcgcttcaaggaccaggcatgctgacaacgttgatgaccagacaactggagtttcttggaaatacgacgctttacaacactcgtatgctggaggcgattctgcacatcgtggataccaagcgagctccagctcaagatgtggcacctgttgattatatcaatgggccagcgaagacaccgttgtgggagccctatgttgttcaatgtcctgatctggcgcccactggtcgggttgatgttcctgatatgcatgtcactcataatggccagccattgaccactgcatggtacccgccccctgcttccctgagaccgcttcttcctgatggaactgttggtgcaaatcctgagccgtccgctgctggtgccaactttgagcctccctcagcttctagccgcaatcccgatgatggtgggtcaactccggttgatacagtcgagctccgctctgcgacagatgtgcccgagaacgatcatgctctaaggcttcttgaggagatagctcgtagtcatctgcctagccatcagcagacgcataatatgattgtgcctcagaaagatggtgcccagggtgtggttgtgacgccagattatgcaaaatctggatgcaaggtggacatgcagccgttccactcatatggaggtccgaatgaatctcatttcgcaccgatggggatcatgttgaattatgacaaatatgactgtggttttgtcattcctttggaagatcctcgtcacacagattgcaacttgtggaccgaaatgccaaccatgcgggatgactttgcacgccaaggtcgtttttggaggtatgatttgaatgtggatcatttccgggagtgcattgctcgacacactcacgtgtacgcagacggggccaggttgatgggaacatttgtgttcgaactggtgaaaggggagagatggactctagagatttgctcgtaccgagatcgacaatttagatctgctcttttggctcgagcgaccccccgcctcatgcacgctctcggttatgggacaaattttggccggttcatcatcgctatggacccgagaatgaacttgtctgactttcctgtggacgtgatgagacctgcagagggacgtcggccttgtgtatgtcaggagtcacgtggtgctgggcctttgatggatgagctcgatttctattttgaaaagaactggaatgagcttgaacgtcgtgctcaagaaggtggagagcctaagacgctgacccggccgaccgaactgatagaggcgttaactgcactgggcaagggtactgctttctctctcacgccgcagaagggatcatgtgttccaacaacaatggcccgaatgttgagagatcgcggagcggatgagtgggccgttatcttggagaagatggcaacatctcttgcattggcggcggcgaaggagggtaacccggcagaggccttctatcgtgacatgtcctcatggaccaatgatgagaggagcagggcgatgcagcttatcacctggaagcggctggcaattaattttggtgtcaaggtttcaatgcgtgcactgggagtgagaaatggctatcgtgtctctcgggcggcgattccaaaaggcgttatggcgttgaacaattgtgaattgttcggtggtgggcacgtgtgtcctgagtgtcattctgtgtttcagagtgctggcgagagaaagatgtgcacgactttggatctgatgtttcaccagctgttcctattatcaacgggtgatgtttggcttggagcgttggtgattcatgatccccgaagtcatgtctctaagacgatgaagggtgtcaacagaggagcgaatggtggtgtcaagtatgaggagattcgcaaggtgaggcagttcatggtcaagtttccgtttggccgaacttgtcctcattgagattggatattttctaagactgcttgcttaaaggtgtgaaaatcaattgtcggtgtaatctgacgcaggggttcagtctgtgttcggatgcatgcagtc

SEQ ID NO: 194 - DNA, 3157 bp, Colorado tick fever virus
gacattttgtcacccgtcagaatggggaaccgagtgtcaacatacagccctcaattcatcacaatcaatggaaataataatgcactggatacaaaaacgatggaacgctttgatcagactaattcggtagacgcagccgttaaattacccgatggaatcaatccaactagagctgaattctcaactgtgaatgacatgcgtgcatttctcggactgcgagatgatttgctatgtgaggatgatgatatcttcgaagatatgtttgatcagatggttggttcagaaggtaaaatcaaaggtgtggtgtctggtacattggatggctatgaaaagatccgaaaagcagcgaattggctcggtggaacgtatagccgaccgtggagagttgaaacaagggaaatgtctgagattcagaagcggattgatactgcgttacctgccatgacatcaatcattggagggacctttggacccggtgcagccagagtaggaggggatcatatgctcgtgcgacctgagcagtgggttaatgtaaggggtgatttctttctggggcatgatgatggatttgagtcgaggcatatcgcagtagggacggatgcgtttcagtgtgttcgcctaggaagattgatgccagaatttggtgatgcagtgcgcggtggaggttgggcaaatggtgtaagttatttgatgggtcagcccttgtttcagattgcatatggtcgagtggtgaatgatgtagatcgtccgattcaaatcttgtggcaggcagctttaaggacggcagcttcgagtgagggagatgtcccagtggcggaggctttaaaaattcttggggcgatgacaaagagcacgttttcctggatggtgtcgattgtagggacggagtactcaatggaggctacagcggagaggccaatgtttccaatgacgcaccttacgtccgctgattatgagctcttgcatagactttttgttatgtggttgaagggcgatgtcatgcattcgcgattttttgatgtcgttgcgaatctcgaatcgtttacttctggaatgtgctttttaaaccgagttagattggccttgcaattgtttgttactaagttggatgaggagacgaagtcgcgtcaagattattggtgtgatatgttaaatcagcttatggaggtgcactcctgccctttgctatatacagcttttcttctaagtggtggatggaatgatgaggtgtctatgaaagtggagcccattgacggtgtggtgctggaacgattggaattctccggccgctatttgtggatgtcttggaggaatgctgctacgtattctgagtatgtgcgaatgcatgcagagggaggggatggtgatgatgatatcttaggcttgttgaagcgaggtgcagcccagatgaaagggatggtggcgggacatcttcggccagttctgaatgaggcggcgggagcggctgaacgcgtgatgaccggttgggcaaaacagaaggctggtacgttaaagcaagcggtgacgaacgcgatggctggggtgttattggacacgaagagggaggcccaggcggaagctaatgtgtacgggagcatggttggtggtcggcatgttttggctcttccccctacggatcatttgcaaaaattggcgcctttagtcccaccaggtgctgctgacacggttattgatgatgtgaaacgggttggtcaccatgtcggattggctatcatggagagaggggagccagtgagagagccggttgtcgagaatcatgtggtgcatgagatggtaaacaggacaaagactggagtcggccagattggcgaggttaggagggagttagcaaagtgttctgaagttatgaaggatgtatcagtggagaagatggtagctagaccggatgaggtgcggggaacatcatttccgatacacactcgggggtatcatgtatctttagttgatgggtgtgacaagcatgcgatgaaggacccgacgaataatctcgctgcaggggcgactttctcttgtcaaggattagtgacggggaaacttaaaacatgtttttcagtgacgttagcaaaagctcatcataacagagaaacatctccgactacgttgcatgtcatttcagggggtttcttctcctatgacccggcagctgttcacataggagggcaagatggtgggggaccagatcatgatatgaatattaacgttgtagtgacagcggcagtgaagaagtccacatcggagacggcatgtaaggtgtacgttggtgctattgctaagtctccgaatacgactcatcacacaaccaacaatggggttggatttgttccagcgattgacgacaaggggcagacatattttacgacatcgggagtgtttgtggggagactttctttcaatatttccgcactgctgaggggtggattaacaggtgtgacctcttgtccctgggatggtacctttgctttcgttgtagcttgtggatgttcgaattatgggagcagtggttgtacgcatgttgaactcgtgcaattaggtgttgagtttggggagtgcattattgtgccgagggggctggatcgatattacatatttaatcgggttcggtactatgacaagaccatttttgatttcataggtcgggttgatgcaactgtcgctgtttcagaatctcctttagatgtagtgagtgcgtggtcggagttaatcagtcccttggtggtgtatcttccattgatggtgcacgaattgaagagcgctaacactttagccctcgtgaagactcggtatcgtgcatggctgaagaaggttggtttgaaaatgggtgaaaacaatccttttagaactgatgaagactgtgatggctgggtgtgtgcagcaattttggcgatgcctatgtggatgcgttacgcaggtggcaatcctttaattattatgactcaagatgatcgaaaggcgtcggcgataatgttgttgtctactgctaaggccatgcttcctcttagtgcatttcagttggtggatggatccttgtctcgtgctgcagccaaaggacttaagtgggcggctgatcgtgagattatggggtaggtatgtgacattcattcccagggtgcattcttgatgtgaagacaatgcagtc

SEQ ID NO: 195 - DNA, 3586 bp, Colorado tick fever virus
gacattttgtcatggcacagctgttgttcaggaaaacgactcaagacttccgagattgctttggactgaaacacgaaatacttgcatcaatttacaacgaaaaaagcaccttctctagtgaaaacgggtcaatccaaatattggaagaagcagaagttaatgctctaggtgagttagtaagagatggcacggtcgcaatttcattcggacctgggatttattcacgtatgttttctcatttacgtgatgattctgattatcggtctgcccttactgactgcgtggctcatgggtggaagcaaactcgagatgcgagggatgttcgagagtggcaacgatctgctgcgattatgtgcgcggagaggtatatgtataaggtgaggcaggcgtataagagggtggttgaaaacttggatcatatgtacgcctggcattacttgaccgaagggccctccgagcatgtctttattctgccagctatgtatgaatctgtacggcatgaaactacttctgaggcgtatggaatgcaatgtggtggtatcatcggaggaaatgtatcattgatgcttcctagagacgagcaatacacaactttatttaaagcgtggttgatgtctctggcgaaaatgagtttgtctgagcttcgcgagccccattggaacggtgttcgggtgcaactatcgagggatcatagaatcttgtactatggtgatttattaccaagtgatggagacattacatacctagtgaataaattagagtatcacactatctggtttccagaaggagatttcgagaccatgatgggtgcaatgcttcgagattcgtttccagcaggttgtcatgcacacttaaatattccagtgcctcattatttcgtatttgatactgatgatgatttgatattgaggtgttggaagggtgtgcgggatacatggattaagttgcggctcggttatgaggagggaggagtgaacgattctcgtatgagcgaggctttaattgtgaatagagatttacctgctgatttaagtgagtctttattctgttgttgtctagctcgaggtgtgtcacgtgatcaagtgcggacgctgaaggatgtacggaatgtagctcaggcgcagattaggcacgttgtttcagggcagggcgtatggtgggagcatatggtgcggggtcaacctctggcatgttcaatcagacctggtaaggtggtgctagttgtagattacgaggatggacctcttcacgtgtctattcgtgttaggcttttgaatgtacattatgctagagagttgggcatgaaagcgagcgatgttgtagttcggattcccacatcgaatcgtccacggtgggttgagactaaggagtatgagcgatctttgagattttatgagttccgacctggcccaattactacagagttccaccatgtctttgctttttattgttactggggatgtggtcgggtggaaaagcgacgccacctttatcagattcgagaagtgagaaggggaaatctatatagtagatctaggtttttaagaaggattgccgaggacggagagaaagtgaaagttcaaggtcgaacacatgtgactgcgacgagggctgtccagcatgagaaatgtaatccgaatgaggatatcatctactcaagggaatttgctcgggaactggcgctgacgggaaaaatcaaggaggctggggcgctagctgtgatttatacttgcatgcaaacgttaggtgtagatatagatcctcctgctggttgggtgcgtgaaggtcgaccgaaacagagaaccgctaagctttgtcatcttttgactagaatattgacagcattcttttcttaccgtggcgggtcgtcaagtttggtgtgcagtgttatggttgtaattttttccatcatattatattacttgcgtttgaagcatgtggatcaagaggttcgatatgatgagctaacattgatctggtatggggatggcggggttgagctgcagcgtatcttgcgtgaagtgtcgatgacgaggtttgttgctgtggccggtgatccagctacgccagagtatatagcgcaggcaaagctttgggctaacaagaagagtaatatagtggtgttcaattacgcgcgtccatatgagaggggtccagtttttgagaatctgattcgtgatacagtttctcttcgggaagcggcggaggtttttattttgagaacagatgactcttggagtcaatacggaaatacagtagttgccatgctgggagagggtgatttttgtgatctagtccattttggtgcctcgtgcgatccgatggagcattattttgttcatatttctcaaccccctggtacaaaccctggctatgaaccggcgaatcaggaagagccttttgaggagtggttgtatgagacccaggctatggagcgagtaattccgacaacgtgggaatcagaaattgtcgatgcgcgtgggatgctagtgtcaatcttaacgtttcattttcgcttcgcggggtggtttgagctggatgtcccgggggatgatattggtcgtggcctgcagttgatgggaagcattaacaaggttgtgcatgttagctgtttcgtacaaaacggtagacgttattttcggctatcggtcgatttagatgttgatcgagtcttgaggaatatgagacatgaaggtgatgcattaatggcggcagagttatttgtcaccgacgcggtgttagtgtgtgaggggcttgtcgtaggtgagatgcatcggttacaacgaacctaccgatcagtaaatgcaatggtgtatcatcaagggatgactaactttattgtgtatgaatggatgaggcgcgttctcttaactaatttgttagatgagatgttagtttttgatattgggggacggaatggcgagttgtcgggatgggtggtgcaggatgtaaaagttcattacttttgtgtcgatcctgcgggggaagaggccattcctaaaggtcaacgcgttaggctgccgggtgggagagcgatatgggatatagcggaaaccgttgagcagaatgttgctcgttatctagaagttgtcggaaaaccacagactccagccgaaggcataatactaattttctcaaatagcattgtggcggcgtatgaggcggctggtcgcaacaacagaaaccaggtagcgaatttgtatcaacaattacaggcttggggtggtcgtgttttcattcgtgatcagttggttccgacgcgagcaaaccccggggattattggattcaggcggcttttcccggtaatgtttatcctcccggtttatgtgaggatttcaatattgatcctgatgcggggattttgcctctgagatatcctgatactggtcaaggtgctaccgatgttgttctagctaacggtagattggggcacttaacctcatcgtggtttcagagtctgtattgtggggccgcaagaggttttatcctgaatgggtttggcagattgatttggccaatctattgtcggcatgtcgtagttctggcaaccaggccatgatcgcgtagtctccgcgagttgcagtc

SEQ ID NO: 196 - DNA, 3909 bp, Colorado tick fever virus
gacattttgttcctgaccgcaacagccgtagtcgttaaggcagcaatgtccgcccgtaccaaagagaaaaccaaagacaaaactaaaaatgatgaacaaacagtctctaccgaagctagtgcagccgatcgtaatgatcgagaaaaatcgtcgtcttctgaacctgaagacaatgcaaaggaaacacttacgaagaaagactcgtcatccaagaaatctgttgatgtattggccgcaatgattgagcagaaagttcaaatgtctggaagcgctggtctgggtgagttttttggtcgtatgagacccgaaattactgatgcattttttgcggcattagagcgagaggctgatgtgtccaaggtagttccaagctcgctttccaagctagatgatggacaagtggtggatttactgtctgtaggcgaggagcgtactttaagccaatctttattccagttagaagtagttacatccattccccacttttaccagctcactgctaaacaaattggagcattgggagcacaaggtggatacctgaaagcttatcatggcgaacaagtgtacccgtttattgaccctgtggctaaccagtttgggcgtggatttgatttggcatatgttcgcattaacacgtctggacaaggtgttgagttgtttattgatccttttgacttcgataaggtttcgtgtaaggtgggtggtgagtcgttgacgggcattggactctcgaacgctgttggtgttgatgagattacttatgatgacgtgaagacgcctgaacaaatgatggagttcgtcgtactcctgattgctggagcagcaaagatgggacgtttttgttctagtggcgtcgacgccagaaggaggaggaaattgttcaaaacttgggtgcgccgtcctgtatcggacaattttcgccacgttcagggttggctgctggaagatgattatgagaactatccgcacgttcctgaggccctgactgtatttagtgaatatcaatggtttgcacgagaggttgccgataacatgacggataatggactaggtacatctgtgcagatggaggatgggccaaatattgagtcgttttttaatcggaagtatcgggaggcagcgatttgtaatttggattttattacagctgaggcgcatgcaaatgttatggaggagttgcaaaatgagaagatgaatgtcagtgcttatgttgatcttttgcagtcatgtcaaatgggaatttttgacattgaaggtgatactgatactattaagctgaaagtgtatatgcgtgaagtggaggattatgaggcagagttaacgagaatgatgttgtttccgggtgaccagctttacgtcgactgtctccgtacagcggcattagtgtctcctaacattcggcaatttattctcagtgtcctgattcaacaagcgacgtcgcgtgttggtctgattgagttgctccctgttgctgagatgactgcatctctgacttcacgtgataacatttctgtctcccataacatggctttgactttggcaatcggtgagtggaaagaattgcttcgtctgacgaatcctcagcagatctgtcagaaaattgtgtgtgacattatggcaccattcgttgatgggttgcgaatggaagattctttaggggttccgacacctagcaaactggttttttcgctgcttggtgcaaaggtcgcactgattctgactccaaacctatatgattataacctgcatcttaaggctcatttggttactatgattctttcttgcttcttcccggatcagtatggggcattgatagcttcccgtggatatggtcatgatgttaccggaaaccgaatcgacagcattcgagacggtgagcgaacgaagaagaactgcagatttgcaacttacacagtgctcgatccgattcctaacggtcctccagataggacgagaagaaagtggttattgatgaagcgagttcaggagtggcttttgcggaatgatcttgttaggcgtcgtgagatacgtgacatcatatatcgtccatatgccaatgtgttgcgtttgccgggacaaacatatttaccgaggcgacaagcggctggagcgcctttaccttgtgaagttttgttgaatgatgctatcgccatactggaggagtatcggaccgtgttccatcatcccaatgacaggaatcaaggacctcaggaccgtcatgcactgacgactctttctaatttgctccgctggtacacacgcgggtttgctgagtggtttcactgggtctatcgtcctttgtacttacagattgcattgcatccaattatcttctggtctcatcgtctcggacagggagtatggaggcaatttccagctgtgcgagaggatcgtgagcggcggtttgataaccacttggagggtgtgcctttcgattcacctgttattgctgcgtttgagccagacgttgcgttgaatccgtttactttacgtcaaggtgcggacttgcttggacgtgtgcatgcgcaggggtctacatttcggggtggagcatatgatagtgcgtcagtgattctcttgtcagaatatgaggctctttatcgaatgactgactccgaggggatggtggatgaatatattaagactttgatggcatctcgtcaactccttgagggactgagacttgtagccgaactttcaactggagagttgctgagggatactcccatactggactatatccggactgctttctgtgagggtcgttttccatcccacatattcttcaagattctcaatctgttcggggttaaaattaaccatggtgtgctggctcaggttggagagcggtcaattgaacatagactgcgaggtgactaccgtgtgtattaccctagacctgggtttttggaccctgctttggaatttattcctgacagaattgtggtggttgatcctgttcgaccgtccgtccgtcggaatgtcaagttgataatggatgctgtatttgatcctgaattcgggatgatcaaaatgaggaaaggagtaactttctcgttgcggcccacaaatgacctaactttttcatcatttcatgagattcctcctattcaagtcgagatgactgggaatgtgaactacgtgtatgattctgaaactgcacgtactcgagcggagtatgatgtccaagtccgttgggaagcacctgggcggattattaccatgaatctcttggttacaagcagttatgagattcttagtagtatggaggatattcttgggcgcgaagttcgtgcattttcctttgttgtacaggatgtttcaaagtttagtggcatttactatgatttcatgttgtctgctgtgcggaaagaacatgctatcgtttggttcccaaacctgcgaggtatattgcaccatcatgctatttctattgaaaaggttgagacgtgttttaaagcggcagagttggcgcaattttcttcgttcttaagtttgcgaccaactgctttaattaagcttaatgtggttcaaacaaccaatattcgaggtgggatattgcccccatctgtctcgaagcctattctgccttgtgagggggttcatccttcttttatctttgctctgatgtcaatgtggcgacgcatcggattcgcgggactaccatccagataagaaagttttttccgcctttggtgaaggatgcaagtggtcgaccacgagtgactgatgaaaatggcgtagtagtgaatgggctggagaaccatccctacgggcttagatctcttgtttttgtgtatcattttgatcctaccttccgacctaagatatgctcagtattacgttgacacagtctgtcaaagacggctgctggctgtccggtgagactcgggaatgagagttgcagtc

SEQ ID NO: 197 - DNA, 1884 bp, Colorado tick fever virus
gacattttgtgtcacgaacgttcaccctgcgttcagcatcatgtttggatatctgcagctcatcaaccccaccactgacatttacattaaagattatggaaacttttctgggattgttgcacaccaagcttatgaccctgtccgccgagaccatatgcttttgagatcaatgaaattgcactttggaccaaattcaaaattactatggctaggcgattttcacgccatcaccctgtcacatgcaaatatgatatttggagcaagctcggtcggatttaagggcgttaatgtgtctactttgccccctgacaccctgacgactggcattcgccctcgccccgtagtcacaatggattttgcacagctaaaaggtttttacagcgacttagctcagaaggaggattacatcatgtatttccatgacatggtgaagtttgtcagccagacaggaggtgctcctgtatcattgagagatgtgttcttgtggattagtgaaagcgtgaccgggcctgttgtcattcggacagattgtgttacgggctgcaacaacttatggccaagtggtagtggacacttttatttcccttatgagaggaagaccaaattcaggtatggcacgtttgttgagtgtggcaaaaatttgacttggtccgaagggcctcagtgggatgtgaagagttatgttgtgggctttaactttgtcacacgagcgaactcgctgcttggtgggggttttgacgaggtttgctatcgattgatgatgcaggcggaagtgcctcggcaggttgcagagcaaggattgacacttgaacaagcagttcggaagttggcgtcagaacatcacatgtctagaccgcaattgacttcacgccgagtgcctggaatcacagaccagacaaagtatgaggcttacgtggtatgtggtcctttccgaactggacaggtagtggctgattctttgcagatggctgaagatctggcgtggcgagagatgcttggtactctgaaaacattgattcacgatgaagcgcgtcaaaccaagggctgctgttgacggtgttggcctggtgagctgtacctcattaacatcgagagtgcaggctttcgtgaaggagcttcagcggctgcggcttaccaggcgggctttttgcgtgctttttatgggtgtctgaatacatctgtgtgttccttttcgtctttggatgatgggttgaggtggctgtgcacacgattgagcacaaaatccattggcgcaaaaggacgaaccgtggttctgtttggatgtcactcggagggtgaggtactggcagatggattcggaaaaacatattcagcagcagaggcgcgtgagcaggtagccctgtcgggaaaaatcggtgggagtgctcaagtgattgttgtgtggcaacgttgtcgtgagtccaaactccaaaggttgctgcctgaattggctatggtgtcttatgtgccagaggaggttgttgcaggctttaagcgagtgcgggagcttgagacctacccccaatggtgtctatggttatatagaagtatgattgagtctatggggggtattgatgttggcgtgcgcgacgcatctccgttaactgagagcggggttgtttatcaggtggaggctgctcagtacggaatgcgaacgacgcgagtgaggagggcagatggcacgcttgattaccagggtctgagttggacatcgttgttgatgctgttgttgggtcactatggggctgaccagacgtatgaggctcttcgcgtcagttccatgttcatccgtgctcgtgaagtcggctggcgcaagagggggaccttttcctgcatagtatccacatgatgtgacacaccctcatatagggaatccttgcagtc

SEQ ID NO: 198 - DNA, 4350 bp, Colorado tick fever virus
gacattttgcgagatggcacgccgtccttcgaaagagtggagagagagattcaatgccttatccctgaaatgcaagcaactaatacattcatcaattacaaatgattttacaacaactgacaaagcacaacaaagtaccttttattcctcttctggtttaatggatgttcgtaagaggttatcgatctctgaaagtttggaagtgtttggtagcctgattgataattgggatcttgttcagctagttggaactcgagcggagccttttgtgttgaataaccctgcttcttatttattggttaatcaattattggccttagcgggacaagctcattctgcagcttctatggtgtttctaaattcgttgatgtatgatgatgcacttgatcatgtgaatctatggccttatgaagttgagcgtccaatccctcagatcactagagaagttttgtcacccccacctttcagtgtcaattcatattacttgcagagagacatcgatgtcattaaggcgaagacaaaagccgcggtatatatcgagaattatcgagcaggcgacgtttttgcgaagaagcgaagtattagtaaaggagccacatttgaagagagagtctatcatggtgctgtgactatgttgcaacgaatggttaagctacgaggatctaccatccaagaatgctttgtcatcgctatttcgtcctatcgatgttcagattgtgttcggcgaatgatggcatccgagtctggtactggcgcaatccatgaaatggatcatatttgcattatgcgatctaacgcacttagatggctgcaagctgcgtttagtgactttccagaatttccgtttttaatgacgcgtgatggtgtaaagtttgcctcaaattgtggtgcagtaagtacgcaggttcctttgctgtttttccaaacactagagatgatggtgttaactatggatgggacattaagctcaacatgggaaggatgggtgtgttgtgagtggtatgacagggcgagagttggtttgttttccgagatgtttgatcggcggggagttgtagcccatctgagagaagccattttgcgtcagagtcgattgcttcgatatcagagtcgcggcttgcatttggcttcggtgtctaattttcctaagagaagcgtgagcgctgatggtttggatgatcgaataattgagggtttgcaaaaattcaacagtaaggtgtgctcttttatccagtcatggattttccagattgatttggttgatgaacctgctaggtggctagcggttatgataaaaacgtttgcaagtgcattgttatacgttatgggtgcaacatctctatctttggaacaatcagcacaaggtactttaggtattggagatccaatatcgtttccaagacaagagattttgttagaaggggaatggattgcagtggactggtactatcctgacccagatttagcggacatgcgtgagatgggaatggcattagtggataacgcatctccagagtacacggactgggaatatgggttcttcaatgtgcagactactaatagtgcaggtaatgtgaaagaggtaattgaagagcgaagaaagcagttggttgccgagtttggggatcaaggaaaattgctggcgaaagtcgagaacacacgtatccttgatgctgttcaaaaaatcacttccacatttcagaatcctcaagatttctgtgattctgccgataatgtacgtaaagctggtgagaggcatcaagttggtcggcggcctagagtgatacagatggttggtactgagggtcaattgtccgcatttgtattgcacaatgtacttcgtcctgcctataaggctactaggtttactacgtcaggcaagaattctggggatataagagatatgaacattgtgcttgaaatttcaggcgagcttggatataagtcttctctggatgtaaaaggtatggattcgtctacgaagccttttcagactaatttgtcacttagttgtgtgtttcatcgtcttaggggagaggttctcggttatccagcgtttttcttgggatcgacgtcgtcttccaaagataattatgtagtgacgagaacacggtatcgtgatgagcatggggggatcctcgttgaagaagagtataagttgacttatccgcagtacgttttattgctgggagcgatacactggacgagtccaaccaggtttactgatggttactttcaggagttcgtcatgacatctcgaactgtttttaggtcaggtttgttaaatactgcggatcagcatacgtttcttggcgtgattatgtatgcccttttggagaaaagattgaggcaacgatggtatggcaagcatggtaaggagatgcgggaaaagattggccagcggagagaagcgcttgaagagtatgaggagcatgttaagttgctcggttctgtacttggtgatgatcaggttgctggagctttttgtcaaggaattgtagatgaagaagttattttaaggattacgagggatttgtgcgatgagacaaagtttttgatggaaaggttaggttatgagtgtgagccggagatatctgaatattctgctgagtttcttaaacagaagggagtgcttggagcgcctgaattgtttccagagcggctgcttttattttcgtcggaaagaggtgatatggctgggtcacttcctcttgatcgagttaaaatcatgttgagtatgacggatgagaagattggccgcgcgcgatgtcctttgccttatgcgtcattaatgttgttcacatcctgggtgtcggggactgcttctttttcaattggtgaagaaggtcggctgttatatcggactggtagaaattggaagaaggtatttgcatctaaaagagccgcatccgttgcatggaaggatcaattcacgtccgatggagtgtttgacgtccgatggaatggttttgggatgttctataaagagtgggcttctgcaaataccaagacgatcttacttggatgcgggttattgtgggcttgcagtgacgcgcttggagttccgttccctcccctggtgcaaaaagatgagattctatgtccgggaacgtcggtatatacgattccttcgaacgcaatgacacactatctcctctgggcaacacgtagagatcgagcagacgcagaacgtatgtggcgggcagtccgagacgatttacttcgtggtgacaatgatccattggaaagctacattgaatatgtagataagatgtttgccgaagtgggagttattgacattcctttttcagcgcttcatatttacggagttgggatgggattcgtcgctggagtaatgcctgtacctatggaagtgtggtatgattttggcttgtttggaaaagtaggagggtttgggacgtggattgcagaacttgtttttaaggacatccggattgaccgtgagaaatacgatttacctcggctgtctatgtggaagaatgcggccaaccattcactgccgagtgaggttcgtagggcgagtttgtatgcacgggatacgttgcatgaaaagtatggaatggtagtcccgtcagctgttctagttgctgaacgtccaggatgtaagatcgatcaggcgctgtttgaggtccgacgagtcgggatggaggatgttagagaacttgagaaagtgcttgatgagctaacacgcttgaaccacctggagcggaagtttactaagaggctggcgatgggcttatttatcgttgagaaattgactgagcgtagaactgggtatggccctgcaatagcaagtaatggatgggggcatattgccgcgccatatagctttcaggcacgattgctagagtgtttggcgtttccaatgtacaatgggttcaactacgaagcagtacgtgaaagagtgtttgttgatgggaagctcccgggtgaccctaaattgtatctaaagatagggaggcaggcattatcctatagtgaagaggcgtataaccttgtatctgcttcaatggggttgtcaagcagacaagctgcggacatgcgcgacatgatcttggagggaattaacgggctagaggaagcacgatttgccctaaatcctcgtaagacatttctgtttgatgtttcgcgcagaaagggtgcaggttttttccaaactcctcaccggcggaagactaatcaggcatattgtgagatgatgggtatggcgctactgttaatggaaccatggaaattcagtagtggagattggcgaatgtctttctctcatcgcttgcgcgcaattcttgggaggaggtaggaatctgagctctccatcgctttgcagtc

SEQ ID NO: 199 - DNA, 998 bp, Colorado tick fever virus
cacattttgtctctgtgatccccgcacagacgttccactatgccggctcttgctataatcggtgatactctcttgaatgcctctcttattgataaatacacaccgccctcaagcaatgctcaaaaccaaggatttacaacatacgtgcactctgttaaacctctgattccccagataattggcatacccgaagatgctctcaagcagtggactttatttactgattgggcaaaactaaatgacattgatttgaatgctgatgagacatttaaagagattttgaccattggtaagagattggtatcaggtgacatcacccagtttgtgtatcggcagtttcgtggaaaattggaagttggatacttcgggaagacggacaatgttcgtgaaaaaccatctttctttccgctgttgggagcaggacaaattgagagtttgaaggatctcctttcacgccacttcgaggtctgggtctactttgcgccaaagcctgtgattgattggatgatccgtcatgagatagatctggccacagtggagtttgatgttcgtaacatgctgaaaatgttgtccaacaatccaatcaagtgggagacgttgcttgagaaaatcgccaatgtagctgaaagtcggattacggcagatcgggacgaggttggtgaatggcgcccctgggtgattggcctgttaatgatattcggtcagtcattgaagattggtggcttgatggctgttttgaagtggaggcagttggggcccgtttgctacaggaacttatcgcgcgtatgaagagtgaccctggagccgtgccgcatcttcaatttgttaacaatgagttgaaggtcgggtggaaggtcgcgccgatacgtcgtgatgggcgaaactactccattcgtctcaatgctcgtaatcctcagttaggcggtgcttttacgattgagagcggagcctttaaggtgtagtgtgaacggggctaaggcctggatacaaatgcagtg

SEQ ID NO: 200 - DNA, 11014 bp, Murray Valley encephalitis virus
agacgttcatctgcgtgagcttccgatctcagtattgtttggaaggatcattgattaacgcggtttgaacagttttttggagcttttgatttcaaatgtctaaaaaaccaggaggacccgggaagccccgggtcgtcaatatgctaaaacgcggcataccccgcgtattcccactagtgggagtgaagagggtagtaatgaacttgctagatggcagagggccaatacggtttgtgttggctctcttagctttcttcaggtttacagcacttgccccgaccaaggccttgatgaggcgctggaagagcgtgaacaagacaacggccatgaaacatctgaccagttttaagaaagaattaggaacactgattgatgtggtgaacaaaaggggcaaaaaacaaaagaaaagaggtggcagtgaaacatccgtgcttatgctcattttcatgctgattggatttgccgctgccttaaagctttccaccttccagggcaagataatgatgactgtgaacgctacggacattgctgatgtgatcgccattccaaccccgaagggacccaatcaatgctggattcgagccattgacattggatttatgtgtgatgacaccatcacttatgaatgcccgaaattggaaagtggaaatgaccctgaagacattgactgctggtgtgacaaacaagctgtgtacgtaaactatggaaggtgcacacgtgctcgccattcaaagcgcagtcgtcgttccatcacagtgcagactcatggtgaaagcactttggtcaacaaaaaggatgcctggctggattccacgaaggccacgcgttatctcaccaaaacagagaactggattataagaaatcctggttacgcgctggtggccgttgtccttggctggatgctgggcagcaacactggacaaaaagttatttttacagtgcttttgctcctcgttgctcctgcctacagttttaactgtctgggaatgagcagccgtgatttcattgaaggtgcttcaggagctacatgggtcgatttggtgctggagggcgacagttgcatcaccatcatggccgctgacaaacccacccttgacataagaatgatgaacattgaagccaccaatcttgcactggttagaaattactgctatgcagctactgtgtcagacgtttctacggtgtcaaactgtcccactacaggggagtcacacaacacgaagcgggcagatcacaattacttgtgcaaacgaggtgtgaccgacagaggctggggtaatggatgtggcttgtttggtaaggggagcattgacacatgcgcaaagttcacctgctctaactcagctgcggggagacttatcttacctgaggacatcaaatatgaagttggggtttttgttcacggatcaacggactcaaccagtcatggaaattattctacccaaattggagctaaccaagcagtcaggttcaccatttcaccaaacgctccagccatcacagcaaagatgggcgactatggagaagtcactgtggagtgtgaaccgaggagtggactgaatacagaggcctactacgtcatgaccattggaacgaaacactttctagtgcatcgtgagtggttcaatgatttgctcttgccatggacatcacctgcaagcacggaatggaggaatagagaaattctcgtggagtttgaagagccacatgccaccaaacaatcagtggttgccttgggttcacaggaaggagctttgcaccaagctctggctggagccataccagtcgagttttcgagcagcacacttaaactcacttcaggacaccttaagtgtcgcgtgaaaatggagaaattgaaactgaaaggaaccacttatgggatgtgcacagaaaaatttactttctcaaagaatccagccgacaccggtcatggcacggtagtactagaactgcagtacaccgggagtgatggaccatgcaaaattccaatatcctctgtagcaagtctcaatgacatgacgcctgtcggaagaatggtgacagctaatccatatgtagcttcatcaactgccaatgctaaagttctggtggagattgaaccacccttcggagactcatacattgtggtaggcaggggagacaagcagatcaatcaccactggcataaggagggtagttcaattggcaaagccttcagcacaaccttgaagggagcacagagattggcagctcttggagacacggcgtgggactttggatcagtaggcggagtcttcaattcaatcggaaaggcagtacaccaagtctttggaggagcatttagaaccctctttggaggaatgtcatggatcagcccaggtctgctgggggcgttactgctatggatgggggtcaatgctagagataaatcaattgctttggctttcctagcaacaggaggcgttttgttgttcctggccacaaatgtccatgctgacactggttgcgcgattgacatcaccaggagggagctcaagtgtggcagcggaatattcatacacaatgatgttgaagcctggattgaccgctacaagtacctgccagagacccccaagcaactggctaaagtggttgaaaacgctcacaagagcggaatatgtgggatacggtcagtgaatagatttgaacatcaaatgtgggaatctgtgcgtgatgaactcaatgctttactcaaggaaaatgccattgatttgagtgttgtcgtggaaaaacagaaaggcatgtacagagcagcacccaataggctgagactcactgtggaagaacttgatataggctggaaggcctggggtaagagtttgctttttgcggcggaattggccaattcaacgtttgtggttgatggacctgaaacagctgaatgtcctaattcaaagagggcatggaacagctttgaaattgaagactttggatttggcataacatccaccaggggttggcttaaactcagagaggaaaatacctcggagtgtgacagcaccattattgggaccgcagttaagggcaaccatgcagtacacagtgacctttcctactggattgagagtggactcaatgggacatggaaacttgagagagccatttttggagaggtaaaatcctgcacctggcccgagacacacacactatggggtgatgcagtggaagaaacggagttgataatcccagtgactctcgccggcccacgcagcaagcacaacagaagagaaggatacaaggttcaagttcaaggtccgtgggatgaagaagacataaaattggactttgactactgcccaggaacaaccgtcacagtgagtgaacattgtggaaaacgaggtccctcagtacgcaccacaactgacagcgggaaactcgtcacggactggtgttgtaggagctgcacgcttcctcctttaagatttaccacggccagtggatgttggtatggaatggagataagacctatgaagcatgatgagtccactctagttaaatcaagggttcaagcatttaatggagatatgattgatccttttcagttaggccttctggtgatgtttctggccacccaggaggtcttgaggaagaggtggacggccagacttactctgccagcagcggttggggctctgctagtcctcctccttgggggcattacctacactgatctagtgcggtatctcatattggtgggttcagcatttgcagaatcaaacaacggaggtgatgtcattcatttggcactcattgctgtattcaaggtacagcccgcttttcttgttgccagcttgacacgcagtagatggactaatcaagagaatctcgtcctggtcttgggagcggccttctttcagatggcagcttcagacctggagttgacaattccaggtttgttgaactcagctgctacagcttggatggtgttgcgagcaatggcttttccgtcaacctcagcaatagccatgcccatgctagcaatgcttgctccgggaatgagaatgcttcaccttgacacatataggatagtgctcttgctgattggcatttgcagcttgctgaatgagagaaggaggtctgtggagaaaaagaaaggagctgttttaattggtctagccctgacttcgactggatatttttcaccaacaatcatggcagcaggccttatgatatgcaaccctaacaagaagagaggatggcccgccacagaggtgttaacagcagtgggactgatgttcgccattgttggaggactcgctgagctagacattgattctatgtcagtcccttttaccatagctggcctcatgttagtgtcctatgttatctcgggaaaagccacagacatgtggcttgaaagagcagcagatgtgtcatgggaagcgggggcagcaataacaggtaccagcgaaagactggatgtccaattggacgatgatggagactttcatctgctcaatgaccctggagttccatggaaaatctgggttttaagaatgacatgcttaagcgtagctgccatcactccaagggccattttgccatccgcgtttgggtattggctgactctgaagtacacaaaacgagggggtgttttttgggatacgccttccccaaaagtgtatcccaagggggatacgacgccaggagtctaccgaataatggccagaggtatcctgggaaggtaccaagctggggtaggagtcatgcatgagggtgtgttccacacgctgtggcacacaactagaggagctgccataatgagtggtgaaggaagattgacaccatactggggcaatgtgaaagaggacagagtgacctatggtggcccatggaaattagatcaaaaatggaatggagtggatgacgtccagatgatagtggtggaaccaggaaagccagcaataaacgtgcagaccaagcccgggatttttaagacagcacatggagaaattggagccgtgagcttggattacccgattggaacttcaggatccccaatagtcaatagcaatggagaaatcattggcctttatggaaatggagtgatactaggtaatggggcctacgtcagtgctattgttcaaggagaaagagtagaggaaccagtgccagaggcctacaatcctgagatgctaaagaaaaggcaactaaccgtgctggacctgcacccaggtgctgggaaaacacgacgcatactcccccaaataattaaagatgccatccaaaaaagactacgaacagctgttcttgcaccaacgagggtggttgcagcagaaatggcagaagctttgaggggccttccagttaggtatttgactccagctgtacaaagagaacacagtggaaacgagatagtggatgtgatgtgccatgcgacactaacacatcgattgatgtcgccgctaagagtcccgaattacaacctgtttgtcatggatgaagcccatttcacagatccagccagtatagcagctcgtggatatattgccacccgtgttgaagctggagaggccgcggccatctttatgacggccacccctccaggcacatctgacccattcccggacaccaattcaccagtccatgatgtatccagtgaaatcccagacagagcatggagcagtggatttgagtggataaccgactatgctggaaagaccgtctggttcgtggcaagcgtaaaaatgagcaatgagatcgcgcagtgcttgcaacgagcagggaagcgagttatccaattgaacaggaagtcctatgatacggaatacccgaaatgcaaaaatggtgattgggactttgtgataacaactgacatctcggaaatgggagcaaattttggggcaagcagagtgattgattgtcgcaagagtgtcaagccaacgatcttggacgaaggagagggaagagtcattctcagtgtgccgtcagccatcactagtgccagtgctgcccaacggagaggtagagtgggcaggaatccaagtcaaataggagatgagtaccactatggaggcggaaccagtgaggatgacaccatgctggcgcactggactgaagcaaaaattcttttggacaacatccacctcccaaatggcctagtagctcagctgtacggtcccgaaagagataaaacttacaccatggatggagagtaccgactcagaggcgaagaacgcaagacattcctcgagctcataaaaacagccgatttgccggtgtggcttgcttacaaggtagcgtcaaatggcatccagtacaatgacaggaaatggtgttttgatggaccccgatccaacattatcctcgaagacaacaacgaagtggaaatcataacaagaataggagaaagaaaagttttgaagccacgatggttagatgcacgcgtgtattcagaccaccagtccttaaaatggttcaaggactttgcagctgggaagcggtcggcgatcggattttttgaagtgctaggccggatgccagagcattttgcagggaaaacacgtgaagctctggacaccatgtacctggtggcaacatcagaaaaaggaggcaaagcgcatagaatggctcttgaagaactacctgatgctctggaaaccataacactcattgcagcgttgggagtcatgaccgcagggttttttctcctcatgatgcaaagaaaaggaattggtaaactgggactcggagcactcgtcttggtagtggccacttttttcctttggatgtcagacgtttctggcaccaaaatagctggtgtgttgctgcttgcgctgcttatgatggttgtgttaatccctgaacctgagaaacagcgttcccagacggacaaccaactggcagtattcttgatatgtgtgctgcttgttgttgggttggtggctgcaaatgaatatgggatgttggaaaggacaaaaactgacataagaaacctatttgggaagtcactaattgaggaaaacgaggtccatatccctccctttgattttttcaccctggatttgaagcctgctactgcttgggctttgtacggaggaagcacagttgtgttgactccactgataaaacatctggtgacatcacagtatgttaccacctcattggcatcaataaatgcccaagcagggagcttgtttacattgcctaaaggaattcctttcactgattttgacttgtctgtagcactggtgtttcttggttgctggggacaagtgacgctcaccaccttgataatggcaacaatactggtaaccctccactacggatatcttttacctggttggcaagcagaggctttgagggctgcacagaagcgcacagccgctggtatcatgaaaaacgcagttgttgatggcatagtcgcgacagatgttccagagctggaaagaacgaccccacagatgcagaaaaggctaggccagattctactcgtcttggccagcgtggcagcagtatgcgtgaaccccagaataactaccatccgtgaagctggaatactctgtaccgcagcagctctcaccctgtgggacaacaacgccagcgcggcttggaattccaccacggctactgggctgtgccatgttatgcgtggaagctggatagcgggagcttcaatagcctggactctcataaaaaatgcagaaaaaccagcgttcaaaagaggaagagcaggaggaagaactctcggagagcaatggaaagaaaagctaaatgccatgggtaaagaagaattcttcagctatcggaaagaagccatcttggaggtggatagaaccgaagccagaagggccagaagagagggaaacaaggtaggaggccacccagtgtcacgagggacagcgaaactcagatggttggttgaaagacgctttgtccagcccataggaaaagtagtggatctggggtgtggcagagggggctggtcatactacgcagcaaccatgaagaacgtccaggaagtgagaggatacacgaaaggtgggccaggccatgaagaacccatgttgatgcagagctatgggtggaacatcgttactatgaaaagtggcgttgatgttttctacaaaccatctgaaatcagtgacacccttttgtgtgacataggagagtcatcacctagtgctgaaatagaagaacaacggaccctgcggattttggaaatggtgtctgactggctaagccgtggtccaaaggaattttgcataaagatactctgcccgtacatgcccaaggtgattgaaaaactggagagcctgcaacgcaggtttggaggtggattggtacgcgtccccctttctcgtaactccaaccatgagatgtactgggtcagtggagcctcggggaacatcgtgcacgcggtgaacatgaccagtcaggtgctcattggaagaatggacaagaagatttggaaaggcccaaaatatgaggaagatgtcaacctgggcagcggcacgagagcagtaggaaaaggtgtgcagcacacggattacaagaggatcaaatccagaatagaaaaactgaaggaggagtatgcagccacgtggcacacggatgataaccacccgtatagaacttggacttatcatgggagttatgaggtgaagccatcggggtcagccagcacgttggtaaatggagtggtgcggcttttgagcaaaccatgggacgctatcactggagtcaccaccatggccatgactgataccacaccatttggccagcagcgagtgttcaaagagaaggttgacacaaaagctcctgagcctccccaaggagtgaagactgtgatggatgagaccaccaactggctgtgggcttatttggctaggaacaaaaaagccagactgtgcaccagagaggagtttgtgaaaaaagtgaacagccacgccgccttgggagccatgtttgaagagcaaaaccagtggaagaacgcacgagaagctgtggaagacccaaagttctgggaaatggtggatgaggaaagggaatgccacctccgaggggaatgccgaacctgcatatataacatgatgggcaaacgtgagaaaaaacccggagaatttggaaaggccaagggaagcagagccatctggttcatgtggctgggagccagattcttggagtttgaagctctaggattcctcaatgaagaccattggatgagtagagagaattcaggaggaggagttgaaggagctggtattcagaagctgggatacatcttgagagatgtggctcaaaagcctggagggaaaatttatgccgatgacacagctggttgggacacccgcatcacacaagctgaccttgagaacgaagctaaagttctggagttgatggaaggtgagcagcggactttggcaagagcaatcattgagctgacatacaggcacaaagtggtcaaggtcatgcgcccggcagctggaggaaagactgtgatggatgtcatttcacgcgaagatcaaagaggaagtggacaagtagtgacctatgctttaaacacattcaccaacatcgctgtgcaattggttagactcatggaagccgaagcggtcataggtccagatgacattgaaagcattgaaaggaaaaagaaatttgcagtccgcacatggctttttgagaacgcagaagaaagagtgcagcgcatggctgttagtggtgatgactgtgttgtcaaaccattggatgatagattttccactgctttgcatttcttgaacgccatgtcaaaggtgagaaaagacatccaggagtggaaaccctcacaaggctggtatgactggcaacaagtccccttctgttcgaatcatttccaggaagtcatcatgaaagatgggaggaccttggtggtgccctgcagaggacaggacgagctgattggaagagcacgaatatcccctggctcaggatggaacgtcagggacacggcatgcttagcaaaagcatatgcacagatgtggcttgtgttgtacttccatcgacgggatctgcgcctgatggccaacgccatatgctcttcagtcccagttgactgggttccaaccggcaggactacttggtccatccatggaaaaggagaatggatgacaacagaagacatgctaagcgtgtggaaccgtgtgtggattttggaaaatgaatggatggaggacaagaccacggtttccgactggacggaagtcccatatgtagggaagagagaagacatctggtgcggaagtctcatagggaccaggaccagggcaacatgggctgagaacatctacgccgccatcaaccaagtgaggtcagtcatagggaaagaaaaatatgtagactacgtgcagtcgctgaggaggtatgaagaaactcatgtgagtgaagatagggtcttgtaaataacattgatagaaaattttgtaaatatttaatgtaatatagtataggtaaaattttttgaaattaagtaaaattaagtagcaagacttgatagtcaggccagccggttaggctgccaccgaaggttggtagacggtgctgcctgcgaccaaccccaggaggactgggttaccaaagctgattctccacggttggaaagcctcccagaaccgtctcggaagaggagtccctgccaacaatggagatgaagcccgtgtcagatcgcgaaagcgccacttcgccgaggagtgcaatctgtgaggccccaggaggactgggtaaacaaagccgtaaggcccccgcagcccgggccgggaggaggtgatgcaaaccccggcgaaggactagaggttagaggagaccctgcggaagaaatgagtggcccaagctcgccgaagctgtaaggcgggtggacggactagaggttagaggagaccccactctcaaaagcatcaaacaacagcatattgacacctgggaaaagactaggagatcttctgctctattccaacatcagtcacaaggcaccgagcgccgaacactgtgactgatgggggagaagaccacaggatct

SEQ ID NO: 201 - DNA, 7845 bp, Aedes aegypti
aggaccaggatttcaatgtttgtctccttgaactctagcggagactaatgaattcctcctcctggacctaataagggcatgtcgacagggggtcgtaatggttataacacggattccagatgatttgaaacagaatttaaattatttaagagggtatataaaagcacacaatctgctagtttgagattatttttattctcaaatgtagaaatgcagctttaagatttcatatgaaatctgtaaatttatcagcacaaccatacatgtttgctccttcgctcgaccttcagaaaaaatagccacggtccggttcgctcgtaataggcaccgtgccaaatttagccgaatttgcgccccctaatttccaattacactgcccagtttaatcccaacactttcgctaatgaaatactataaatcaatgaatcaacttcccaacgcacatcgcgcgtaccagcccccgtactccagtgctggaaaagttcgcatcacggagcagctcacgagtgtataccaacgcataacaaacatcacagactcgggatctggctaggtgtgagtaagcccgcacccgtctgctcgggagaacatgtcaaaagaagtagcaacaagctcgcgagcgtttactcgcgagtaaccgagcaaggtgtgatttattatggttttgacagacaaattaatggtataaccatcatatcgatagtaaactactagtttgtagtcaaaagcccccgaaaaccataaatctcggagggtaagcagcttttttcccaaaagcacaatatgactctgagcagctccgaacacgttcacgaatcactttttgcttcagttactcgggagtcgacagatgcgagtaagccagcgctctgacgctcgggagcgtttggttttgtttttgttccagttcagatgaagcgttcgctactttccatcactgccgtactcacacccatgcaccgtccaattatctattttttactcatttcttctaccacttttcctcttcctctcttacagacatactccggactgttctgcgtggtggtcaacccgtacaaaaagctgcccatctacaccgaaaagatcatggaaaagtataaaggcatcaaacggcacgaggtaccgccacacgtattcgccatcacagacaccgcatacagatcgatgctgcaagatcgagaagatcagtccatcctgtgtacgggcgagtccggtgccggtaagaccgaaaacacaaagaaagtgatacagtatttagcgtacgttgcagcatccaaaccgaagggatccgttgcgccgtcgccagcacttataattggtggtcactcatcaagcctatcgggagaactggaacagcaactcctgcaagccaatcctatcctggaagccttcggtaacgccaaaaccgtgaaaaacgacaactcgtcgcgtttcggtaaattcattcggataaactttgacgcgtccgggtacatctccggtgccaacatcgagacgtacctgctcgagaagtcccgtgccattcgccaagcgaaagatgaacgaacattccacattttctaccagctgctggccggggcctcgcccgagcagcacgacaaattcatcctggacgacatcaagacgtatccgttcctgtccaatggtagcctgccggtggccggcgtcgacgaccacatcgagttccaggccacggtcaagagcatgcacatcatgggcatgaccgaggaggacttcaactcgatcttccgcatcgtcagcgcggtgctgctgttcggttcgatgaagttcaaacaggaacgcagctccgaccaggccaccctgccggacaacacggtcgcacaaaagatcgcccatttgttgggtctgagcgtcacggatatgaccaaggccttcttgacgccccgaatcaaggtgggcagagactttgtcaccaaggcacaaaccaaggaacaggtcgaatttgcggtggaagccatcgcgaaggcttgctacgagaagatgttcaagtggctggtgaaccgaatcaaccgatcgctcgatcgaacaaagcgtcaaggcgcttcgttcatcggtatcctggatatggctggtttcgaaatcttcgagctgaactccttcgaacaactgtgcatcaactacacgaacgaaaagctgcaacagctgttcaaccacacgatgttcatcctggaacaggaagaatatcaacgcgaaggcatcgaatggaagttcattgatttcggactggatctgcagccaacgatcgatttgattgacaagccaggcggtatcatggctctgttggacgaagagtgctggttccccaaggctacggacaagacattcgtggaaaagctggccaccgcccacaccatgcacccgaagttcatgaaaaccgacttccgaggagtggccgatttcgccgtcgtgcattacgcaggaaaggtcgactattccgccaccaagtggttgatgaagaatatggatccgctgaacgagaacatcgtttcccttctgcaaggttcgcaggatccgttcgtggtccagatctggaaggatgccgaaatcgtcggaatggcccagcaggcccttaccgatacccagttcggagcccgcacccgcaagggtatgttccgtaccgtgtcccatctgtacaaggaacagctggccaagctgatggacactcttcgcaacaccaacccgaactttgttcgttgtatcattccgaatcacgagaaacgcgccggcaagatcgatgctcctcttgtgctggatcagctacgttgcaatggtgtcctggaaggtatccgtatctgtcgccagggtttccccaatcgtattccatttcaggaattccgacagcgttacgaactgctcaccccgaacgtcatccccaaaggattcatggacggtaagcgggcttgtgagcagatgatcaaggccctcgagctagacaacaatctgtaccgtatcggtcagtcgaagatcttcttccgagcgggagtgctggcacatcttgaagaagagcgcgactacaagatcacggacttgatcgtcaacttccaggcgtactgcagaggattcctggcccgccgcaactatcagaaacgcttgcagcagctgaatgccataagaattatccagcgaaactgtgctgcctacctcaagctgcgcaactggcagtggtggagattgtacactaaggtgaagccattgttggaagttaccaagcaggaggagaaactggtccagaaggaagacgaacttcggcaaattcgcgacaagctggacaatctgtccagaagctcgcaagagtacgagaagaagttccagcaagcgatagaggagaagacgcatctggcggagcaattacaagcggagattgaattgtgtgccgaggcagaagaaggtcgggctcggttggctgctcgcaagcaagaactggaagagctgatgcaggatttggaagcgcgcattgaagaagaagaagaacgtgtaaatgccctgtcgagtgagaagaagaagctgcagatcaacattcaggatctggaggagcaactcgaggaagaggaagccgctcgccagaagctgcaactggagaaggtacagttggatgctaaattgaagaagatggaagaggatgtggccttaacggaagatcagaaccagaagctgctgaaggagaagaagatcctcgaggaacgtgccaacgatttgtcgcagactcttgccgaagaggaagagaaggccaagcatttggccaagctgaaagcgaagcacgaatcgacgattgctgaactggaggaacgtttgctgaaggatcatcaacagcgccaggagtcggaccgctccaagcgaaagattgaaaccgaagtggcggacctgaaggagcagatcaacgaacgtcgcatgcagatcgaggagatgcaacaacagttgatcaagcgcgaagaggaactggcccagacgctggttagaattgacgaggaatcggctgcgaaggctgctgcccagaaggcgcaacgcgaactggaatcccaactggccgagattcaggaggatctggaagcagaaaaattggctcgttctaaggccgaaaagcagaaacgtgatctgaacgaggaactcgaagcgctgaagaatgaactgctggactctctggataccactgctgctcaacaagaactgcgctccaagcgtgaacaggaggtggccacgctgaagaaaaccttggaggacgaatccgccaaccatgagggccaggtgtccgacatgcgccacaagcatgcccaggagatctcttccatcaacgagcagctggagaatctcaagaaggtcaaaggtggcttggagaaggcgaagcaaacgctggaggctgaaaatgccgatctggctaccgaactgaggaacgtcaaccaatcgcgccaggagaacgaccgccgtcgcaagcaagccgaaacccaaattgccgagttgcaggttaaattggccgaagtggagcgggcccgcatggaactgcaggataaggtaacgaagttgcagcaagagtcggagaacattacccagcagttggacgacgccgaactgaaggcttcggcagcaatcaagagtgccagcaacatggagagtcagctgacggaagcgcaacagctgctcgaggaagaaactcggcagaagttggcgctgagctcgaagctgcgacaactggaaagcgaaaaggaagcccttcaagagcagctggaggaggacgaggaagccaagaagaactacgagaagaagctggccgaattgaattttaccatccaggagatgaagaggcgttccgaggaagattccgacattgccaaggaactggaagaagcgaagaagaagatgaacaaggacatcgaagtcctgcaaaggcaaatcttggaactgcaagctaccaacgatcggctggataagagcaaaaagaagatccaatcggagttggaagatgccaccattgagctggaaacgcagcgcaccaaggtgctagatttggagaagaagcagaagaacttcgataaggtcctcgcagaagagaaggccgttagcgagcagcacgcccaggaacgcgatgccgctgagcgagaagcgcgtgaaaaggaaaccaaggtattgtcgctgacgagggagctggacgaagcgtacgaaaagatcgatgacctggagaccaaacggaaggcactgcaaaacgaactggatgagttggctaatacacagggaacagctgacaagaacgtgcacgaactagaaaaggccaagcgagcgttggagagtcaactggcagaactgaaggcacagaatgaggaactggaagatgacctacagctcaccgaagacgctaagctgcgattggaggtcaacatgcaggcgttgcgggcgcagttcgaacgggacgtgcaggccaaggaggaacaatccgaagagaagcgacgtggtctggtgaaggctcttcgggatatggaagccgaattggacgaagaacgcaaacagcgggccgctgccgtagcagccaagaagaagctcgaaggtgacctgaaggacattgaagccaccttggagatgaacaacaaggtcaaggaagatgctctcaagcaggccaagaagctgcaagctcaggttaaggatgccatccgggacgccgaggaagctaaggccgctaaggaggagttagcggccgttagtaaggaagccgaacgcaaagcgaaagctctggaagcagaagtcatgcaattgtcggaggactttgccagctcagaacgagcaagaagggcagccgaagcagaacgggacgaactgctggaagaaatcaactccaactcgaacaagggctccctcatgattgacgagaagcgacggttagaagcacgaattgccaccctcgaggaagaactcgaagaagaacagtccaacgccgaactgctggtcgatcgcaaccgcaaggcacagattaccatcgaacaaattaccaccgaactgcagtcggagaaatccaactcgcaaaagttcgaaaacgtcaagaccggcctggaacggcagaacaaggaactgaaggccaagctgtccgaactggaaaccgcccaacgcaccaaggtgaaagctgccatggccagtctggaggccaagatcgccaacctggaggaacagctggagaacgaaaccaaggagcggctcggagggcagaaggcgaatcgcaagctggagaagaagatcaaggagctgacgatgaacatcgaagacgagaggcggcacgccgaccagtacaaggaacagatcgagaagatgaacaaccgtatgaagatcctgaagcgaaatctcgacgaagcggaagaggaaattcagaaggagaagacccagaaacgcaaggcccagcgagagtacgaggacatgcttgagagtcacgaggcgctgacgcgggaagtgaactcgcttaaaacaaagctgagacgcggcggtctcggtgtgagttcgacccggctgacgacaccgaagcgcgagaacgactccatggtccaggatgagtcgctcgacggcgaggacaacagcaactgacgactgccgagtacgtcttccaagtatctttccaacttttattagccacggaaagggtgagggaggtatgtaggtgaacaaaagaaacgaaaccggaagcatgggtgggagagaagtttcaggcacaatcgcagcagcaaaaaaaacgagattgagaacgaatgagagcgagtgtctttttttaaactgtgaaaataaagaaaaaaatgcgaatgtgcgacaaaagttgagcgatgcaaaaaaaacgtgaaactattggtagggaaacccattcattgttgtattaaatatttggataaaatcttattgaagtggggtcggtttctgtaaggcctaccctttttgcatgtatttaggagaaagtttatcgaaatagcagacagcggaggagaagagaacacagcagtaatgaaaataaggaaacgtatttagcgaataagtaatcaacattttcctaaatcaaaacaagcaagtaaaacgattaaaacctaaagcaagcaaaacgtagaccgatcattagaaaacttcataaaaaataccatttcatagaatctaccattataccggtaatgtatcgaacttacacaagtgaagcaaattcaatcattattgggcgaaacatataaacacaaatagcaaacagcaatctagcagcagcagcagcagcaaacggaagaaaacgaatggtgggacatatttttttacaaaatcagtatgttttattgctttcaaaatgggagaacagaaggatacgaatcaacattaacaattgaaccgatgagcatttaaatacgtttatatatgttacgaaaatttattgtttttaattattattattaaaataattaatgcctatttctctactattatttgtcgtcgtcattaagtttttcgcaacttatttcctcttttttatctatttcatttttgcgcgattatggtcaagatttacttatatattgaaacgcaacgcaacagacaacagactcgtacactctcagatacggccaagcacgatacaattccatttctaatagcacacacacacatacacattcactcgtacatacagaacacggtatgtttgaagagaacatgcctctttccggttgatacagagaaaagaaaatgttttaaaaacgacaggaaaaaccacgctgtatctgcttaagtaatgttcgctttttatattgattaacaagaaacgtctctagttgaaacagaaaaatccgttaaataataataaaaaatattgctattgaatat

SEQ ID NO: 202 - DNA, 567 bp, Aedes aegypti
cttcaacagatcctcaacatggaagacgacatgaattggtaccgagcggaactagacgggaaggaaggactaataccaagcaattacatagaaatgaaaaatcacgattggtactacggtcgcatcacacgggcagacgctgagaagctcctgtcgaacaaacacgagggcgccttcctgatacggatcagcgagtccagcccgggcgacttcagcctgtcggtcaaatgctcggacggcgtgcagcacttcaaggtgctccgggacgcgcaaggcaaattcttcctctgggtggtgaaattcaactccctgaacgaactggtcgactaccaccggacggctagcgtgtcccgctcgcaggaggtcaaactgcgcgatatggtgccagaagagatgttggtgcaagccctgtacgacttcgttgcgcaggagtccggcgagctggacttccggcgaggggacgtcatcacggttacggatcgctccgacgagcactggtggaacggcgaaatcggcaatcggaaaggactattcccagcaatatacgtggcgccctaccattcataa

SEQ ID NO: 203 - DNA, 9396 bp, Aedes aegypti
atgtcgctacatcgtactccaccaagtgacaagagcaacgaaaacattgctaagcgcatacgatcggatggcgatgttcatgaagtcccccagcctttgacgttggaggccgtaatgcaagctatgaaccatcagtttgcgcagacactagcacggatcgaggaaattagtgtcaacatcagcggaaaaatagacacagtaaaagctgatctagataggaaacttgaagctgttctccacgacatcaactccttcaaggcggactgcaatgctaagctcaaaagcaacgaagatgcactgtttgctctcgacgaaagagtgggcgctatatcgcaggatatcgacaatctccaaaacaggaacgagctaattgtgagtggtatcccgtatctcaaggacgaaaatctgatatcttatttcaacgcaatgtggaagtacttagatctgcagaagggatccattccatctgtcgacgtacggagattgagaccgagcactcaaaacgatggtctaattgtattacaatttgcgctacgaaatgaccgtgacgacttctacagcggctatttacataagcgagatctaaagctgtgccatctgggaatcgattcttcaaggcgagtttatgtgaacgagaacctgactgtcgctgcacgcaaaataaaggcaacagcattgcggctgaagaaagctgggaaactatcaacggtgtacacgaagctggggacagtcatggtgaggcgttccgtcgatcagccgcctgtggccgtgcactcggatgtatccgccaccgatccggactgcggcgtcaatgcgatggtaaattacaccctcggcgagggctacaagaagatcaccgagttcgagatccgctcgagcaccggcgaggtctgcatcgccgccgagctggactacgagacgcgcaattcgtacgagtttcccatcatcgccaccgatcgaggtggcctcagcacgacggcaatggtcaaaattcagctaaccgatgttaacgataaccgaccaacgttctaccctcgcgagtacaacgtttccctgcgtgaatccatgccgacgaattcactcctatccaccccggtagtggtgatcgtggcaaccgattcggactcgggtagctttggaacgatcagctatcgtatcgtggctggtaacgaagcgggcatcttccggatggatcggttgaccggagagatcttcgttgcccgtcccaacatgctgtcgagcaggagtcaaccgtaccaccggctgaacatctcggccagcgatggcggaggtttgcgatcgacacacgatgcagaggtgttcatcagtgtgatcgacgccacgcaaaggccaccgatcttcgacaagccacggtacacgtactacgtcaaggaggatgtcaagaagaatacggttgtgggaacggtgtcagccactagtagcaactcaggaagccgaggttccatccggtacttcatctattcaggagatccagacgggtactttgcaatcgatcccgtttctggaaacatccgcgttgcaagcactctggatcacgaaacgaagcctcaagttctgctcaatatccaagcgaccagcggcgatcctccagcctacggtcacacccaggtcaacatcgatatcgaagacgtgaacgataatccaccggagttcgaatccagcacggttcggatatcggtcccggagaacgtcgaaatcggatctcctctatacgcagccaacgcacacgacaaagactccggaatgagtggtgtgatcacctaccggttaagcaacaacgggcctgcaacgggtaatctcttcagcatagacagccgtagtggtcatctgagcttggcacgtcccctcgattacgaaaccgttcaacggcacacgctgattgtgacggcttcggattctgggataccgtccttgtcgaccaacctcactatcttggtcgaagttcaggacgtcaatgacaatgcaccggtatttgaacgtagcgaatatgcgatcaaggtatcggaatcaacgcccagtaattcacagatcatgcaagtaacggcagtggacgccgacaccggaaacaacgctcgactcacctaccggattctcggggatgatcaacgaacgcgcacggggaaatcctcttcgaaagcctccgaagcaaacactccggagattttcggcattttccccaacagtggctggatctacctgcgcacaaagctcgatcgcgaggaccaagagcgctacaacattacggtgatcgtcagtgataacggagttcccacgttgaccgccaccactcacgtgatcgtcagcgtactcgacgcgaacgacaacaacccgatcttcgccaagcaactgtacgagttccagatagaggaaaacatgagacgaggatcggtcattgggttgataacggctacggacgcggatgcaggcatcaatgccgtggttcggtacagcttgattccgagcaacaccagcttccagatcaacccgatttccggtgaaatcacaacgcgagacaggctcgatcgggagacgaaatccatctacgacctcgtggtggaagcacgcgatcagggaaccccctaccgcagctcgcgcgtttccatcaaaatcaagatcctcgacgtcaacgacaactcgccggagatcgtcgatccgcaggaggatgtggtgagcgtccgcgaagagcaaccgatcggcaccgaagtggtccgcgttcgggcgatcgatcgtgactacggcgtcaatgcgtcgatcacctattcgattctgaagggtcgtgactcggacgggcatggtatgttcacgatcgaccccatcaccgggcttatccgcaccaaggcatcgctcgatcacgaggagaaaacgatttaccgattggcagtggctgccaccgataatggaaaacctccgaggcaaaccgttcgcctgctccggatagaagtgctggatttgaacgacaaccgaccgacgttcactagctccagcctggtctttagactacgagaggatgttggcgttgggcacgtcattggctcgatcagtggcaacgaacagtccgatctggagaatctcatcaccagttcaaacgatcttcacatcacttacacgctaacgcccctaacgaacgatattgccgagggagctttcgacattgatcgcaactccggcaagctggttgtcgcgcgatcactcgatcgtgaacaacagagcgagtatcggatggagatccgtgcgttggacaccagtgccagcaacaatccgcagagttcggccgtaacggtgaaaatcgaaatagccgatgtaaacgacaatccaccgaagtggcccagcgatcccatgaacgtctacatttcggaggatgccgccgttggttcagtggtgttcaacttcacggccactgataacgactccggaactaacgctgagatcaagtacaatatttccaagccagccacggcgcaaaaggagtttttctcgatcgattcgctaaccggttcgttgactctgctggctccactggattacgaagaaaccaaagaattcctgctgattgttcaggcgacagatcaatcgtcgaacgttaccgaaaggatgacaacgtcggccaccgcccgaatcatggttaccgatgtcaacgacaattcgccgaaatttgtagttccgcaagctcaggatacaaccgtttacgttagcgactccatggaggtgaatcatattgtgtcgcacgtggtagccatcgatcgcgatagcggtgagaacggtcgcgttgtctacaaaattgtcagcggaaatgaagacgaacgatttgcgattgatcctgataccggattcgtcaaactggcgaaaccgttcagcagcaatttcatcgctgacaactccaagaattcgattaccggtcggtacaatttggtgatcactgcaactgatcaaggtacccctcgttccaaagaagccaagatcaccattcaagtggtgattcagaacaccagcaacaatccaccgagattcttggagtccgtctaccacatcaacatcacggagaacgtcccaaccggaagctttgtcgttcgagtttcggccaaatcttacaacgacaacggtaacgcaaatctcacctacgagattccgaaaggagtgggggatgatcactttgtagtcgattcggtacgagggatagtgaccactcgaggaacattcgatcgcgagtccaaggacatgtacactgtgccaatctacgtgacggagcagaaccgcttcaaaagtgctgcctccggaacaagtaaggacatgagccagtttgacgtcgctacgttggtggtgaggatcaccgatgtgaacgatcatgctccggagtttcttcctggatcgtgctatccattagccgtaccggagaacagtgaactgtcagtgattcacacggttgtggcaagcgacgcagatgaaggactcaacggagagatcacgtacagcatttccggaggcaacatcggcaacaagttcagcatcgatatgaacacgggcgctttgacggcccgtccgctagatcgggagatccacgcacggtacgtcctgcagatcacggcacaagatcgaggatcgccaacgtcgcatcagggccattgcaacattaccgtacgcgttgaagacgagaacgacaacgatccgaagtttgaactgcaaaagtatattgcaacgatcgacgaagacgctccgatcggtacgaccgtcctgacggtgaaagccgtggatgcagatatcggtatcaacgcgaggatcgtttactcgttggccaatgttaccgaatggctgttcgatatcgacagcaaaagtggcgttataacgactgctggacatttcgatcgtgagcggcaaagcatctacaacttcatggtagtcgcaacggatggcgggcgatacaacgcccgttcccagagtgtccaggttcaagtgatcattgcggatgtcaacgacaacaaaccagttttcgacaagtaccccttcaaggaacaaattggggctttggttcaaccgggacagactctgttgcacatatctgccaccgacgtcgatcaaggcagcaacggagagattgtatacagcttgaacgacaatccgaacaatgccaagttccggatcaatccgaatacgggagctctcagtgcgacgcagtccctggccagtgaaaacgggagactcttacatatagaagtcactgctagagacaagggaaaccctccgcaagttgctactgggttgatcgagcttcgcgtgggagatcttcagcaagaacttccggcactcaagttccagaacaactcctataaagtgaacttggttgaaaacacaccgatcggtcaaacagtgcttcacctaaatgcagttcgcagcgacggtcgtcgacagaagatcatctacagctttggatcgggcaatgaggacggtacgttttcgatcgacgccgttaccggagaagtgaagatccgtaactcgcacaacctggattacgaacgcttcagtcgtctgaatacggaaggaattgatcttgtggctgttgccagaacggacggcagtcctctgttgtacggatattgctcgatcaaagtagtgcttcaagacgaaaacgacaatgcacctcggttcacgcaacagcagtactcggcatcggtttgggaaggcaacaacaagggtgaattcgtgatcaaagtgaacgctttcgataccgatcagggatcgaacgctcacattctgtaccacatcgtagacggcaatcatgacaatgcgttcatcatcgaacccgcctttagcggaatcgtcaaaacgaacatcgtgctcgatcgggaaattcgcgacaagtacaaactgaaggtgatcgctaccgacgagggagttccgcagatgaccggcactgcaacgatcaacgtcaatgtggtggatgtgaacgacaatcaaccgactttcccacccaacagtgtgatcagtgtcagcgaagctacaaccgttggaactgtattaacgtcgataacggccaacgacgtggacaccaacccgcccctgacgtacagcttcggagacagtccggatgaggacgcgaagtcatacttctccatcgatcgctacagcggaaaggtgatcctgatcaagcccttggactacgaagcccgccacgagttccagttgaggatcttggcgtcggactctgcccacgtagctaggaccctgctgacggtacgggtaacggacgtcaacgacaatccgcctcagtttcagcagatcacctaccatgctatgttgaacggtacaaacttccctcgtttcaaaaatccaggtacacattctaatatttctttttctcttataacagacgacaccgacagcaacagcaatatcgcgataatcgcagtcaacgccacggacagtgacagcgagaacaacgccgccatccggtacacgatcattccgccgtcaatcgggtttgcgatcgacgccctcaccgggcagctgttcgtcaacatgagtcaggtacatcgaacccgttctggaacgctatacctcacgatcacagcaacggattccggcgtcccaccgctaagctcatcaactacggttaggttagagatgaagtccaagagtaaggccaatccacactttatccagagccagtaccggctatcgatcaacgaggacgccccgacgggaagcgtaatcacaaaccttatccccaaggctatcgccgagcaggtcgatgtaagttcgagcattgcgtttgaaatcatcgacggaaacgacgataattgctttgagatttcctacccgtcaggcgcaatccttttggtgaagtccctcgacagagaaaagaccgattactacgaactacgtctggttgtcaccgaacccggggcgaccatgatgtacaaaggtatgaacatgtcttcggctatccgggtaacgatcaccgtagaagacgccaatgacaatgcacccgagttccagccgggtccgtacgaagtggcgatcagcgaaacggctccgatcaagtactcgatcggtcaaatatcggccgttgatgccgatctgctgaattcgccgaactcggaggtcgtgtaccagattgtgtccggtaacgatggaggttggttctcgatcgacttgatcacaggcttgctctacatcaacaacaatctggattacgatcgcggacctacgcagttcaatttggtgattcgggcgtgcgacagccatgttctgccaaagtgtagcgtccatcctttcgtgataaatttgactgacgaaaacgataacgaaccgcagttcccagttccggagtatctggaattcgtgggggagaacgaaccgattgggatcagcatatttacggctcgagcaaccgatatggatcggggagagtacggccgggtaaactactcgattgacaacgcgatgaccagtggttactccagcgttgacgacggttggaaactgttcaaggtggattcggtttccggtgtgatcaactcgaatgcggtgttcgattacgaggagaagaatcgatactcgtttacgctgagagctacggataccggtggaaagtcgaaaaccgtgaaggttcgcattatgatcgaaagcagggatgagttcagtccacagttcactgaaaggacgtaccggtttatcctgaagacgcccgatacgggacatctgccagttgggtacgttgttggacacgtgactgctacggatcgcgatcgaggacctgatggaagaatagtgtatcagttgaccacgcagcatccgtacttcaagatgaatcggacaacgggagccatcttggtcaagaagaagttggatgacgtggcggcatcgttggaagctggcagggacattagtttggtcgtgacagccagttccggacggcaaggatcgcttacgaacatgaccgtagtggagatttcgatcgacactcttggtcatatgaagggaggtggtgaaggcggcggagactacggaagctcggagtccgtatcagcgagcaatggattggctaattgggcattgggcctgttgatatccatcttgctagtggtcatttgtgcagcgtctgtgttcttattcttgcacatgagaaatcggcagcagaagcatgtgaacaaatccggtttgagtacggagtccgtgggacattcgaacaactacgtagatccaagcgctttcgataccattccgatcagaggtagctctagcaatacgaacaacgctggtcagtttgctcccccgaagtacgacgagatacctccgtacggagccagttctaattcggggaatgcgacgacatctgaactttccggatcagaacagtcgggatcgagtggccgaggatccgcggaggatgacggtgaagatgaagaaatccgaatgatcaacgaaggtggtccacttcagagggatgccctgcagctggatggaagactttcggatgtttccgtacaaaatactcaggaatacttggcaaggctgggaattgtagataacgccactacaggcaatgcttcgaattcctcgcgaaggtgttcggaaagtattggactgggtagctccaaagatgctatgcttcatcacactctgccgatcgatacgttgcatatgttcgacgacgaacaccgggagtcagatctgacgaatctgatctatgccaaactgaacgacgtgacgaacaacagcgatcgggcgagtagtgtagatgaaacagtgaccaacgcaggcagtataggagccgccgttgatcacgtcatgatgggcaactacggagatgtccccgtggtcggtggacaacagggcatctccatgaacggttccctaagctcaattgtacatagcgaagaagaactaacgggtagttataactgggattacctcctagattggggtcctcagtaccagcctctggcgcacgtcttctcggagattgcacgcctcaaagacgacactctctcggttcacagtggaaacagtgggacttcaagtgccaaaagcaaaaactcgctccatcacaccgtcaagaacgtcccacctccactgctaaccaacgtggcaccacggtctatcaatgtcccggtgttttcggcccggggcaccagtagtcaccatggtcaaccacctaatcaatatctgctgccaagatcgcccataagtcacgactcggcagcaggcttcagcacatcgtcagccatgtcacctagtttctccccttccctttcccccttagcaactcgttcaccgtcgatttcgccccatgtggtctcgaccggtgtcccaacctcccatcacatggtatcgttaccaaggcctccacagcaaagaggccagcggaaaccttactga

SEQ ID NO: 204 - DNA, 750 bp, Aedes aegypti
atgacttttgcattcaacatcatccaagcacaactcgctggaatggactgcaatggaaacacctacttctgcgttgattccgacaactaccaaatttgcagtgaccttcccgaaggaagaacggaaaccaccgacacaacaacctatccgtgccctccagatttattctgtgacaattcaggacgagctgaatgtgattcttcaaccagacctgcaacaaacatggagcctgttgatgaaaccttacctaacccttcccaatccgaaacaccttctgaaacttctgcagaagccgatcaagcaccagaagaaccctcctcgacaaccacaacgcctttgttctcttgcaaggaagcaggtcgctttccggacagtaccagttgccacaactactacatctgtctacagctgccccttggtcttagccaaattcacaccaactgcctctttggaatggcattcgatccgataacgctacgctgcagcagcgatcagagctcgtgtcaaacggattcgttctgtaccgacgagggagtgtttcctgatctgtccgaccgcagtggctacttccggtgcacttggaacggctccggctatgagaagtaccacatgaaatgtggtttagggcagagattcaacgaagcgcaggggaggtgcaccttgttcgggctacgtgcgggtggcgctgagcaaagtgaatctcccatgcgagacttcatgcgggtgcccggtagaggaggatacaactag

SEQ ID NO: 205 - DNA, 1191 bp, Aedes aegypti
atgtctacgcaaagaacgccaccgtttcagctaatgtccgcctcgttaaaactgtgcaagtggtttggactttggaacgagtccaatctgaacagaccctgttggcaaaccgtattcgtcattttttgtctgctcttttggtacatactaccaggatatctgtacattgcacgtggcgagaaaacgcttcagactcttctgaagcctattatagagatttttgcgatgtccgtaattacgattaggtgcatctatcacatattcaaccgtaagaatctccaagagtgtttcgttgatcttcaagaagcaatatccactttcaaaaactgtccgtatgaagacgtccgacgaactttgaaacatttgcataaatcagcccactatgtcgtcaagatctacgtatccatcgtgttcatccaagccagtgtctatggagtactagttcccgctgctcttatcacttaccagtattgtacgtccgatgagatgatccaattaccatcagcggtgatggacgcagactatgtactgttcgaccataccgtcaactactggaattggatactggtgacgttcgtgtcggttatcgtacaatatctgatgttaggatctgtatcagctcaagagtgtctcttctggaatctactacatcacgtatcgtgcctgttcaaaattgttcgcttggaaatagcccgactggaccaatacacagatcctaaccagttcacagaacgattggcaagcattgtgtccacacatgaggtctgtttcaagtgcgcacgttgcttggaaaatgtactaaaccctctgctggcattatggtattgtacctgcatagttcaaacgtgttatttgctgtttgtcgtcagcatgatcgatgacatggtcgtaatcgcatcgatgatattcgttctgcagtataccatatttctcatattttcgttctcaatgttgggagctgaactcatggaagagagcgctcgggtgtccgatgccgtctacaattcgaattggtacatgcgaatgcctgccgaaagacgtttgctgtggttcatgaagctgagatcggatcgaccggtgggcataactgctgtaaaattcttctacgtcaataggtctacttttgcggaggccatgaaaacggcgttttcacttttcactattatgcggcggttctacggagaagagtag

SEQ ID NO: 206 - DNA, 1336 bp, Aedes aegypti
cgtaaatcgtctcgtctctcgtctcgcatagtcgttgtcgttttcgtgcggttggctggctcgttatcctcgctatctggcttctggcagcagcagattgcctttttacaaccaggcagacagccctctgctcttcgtgtgtctcgccccgaatttggccttttcttatcagtagttcggccgttatcagtgtcgcttcgcttgtcgagagagccatcatcattttccgaaaacaaagctagaccggttccatctctaatttatcccccgctgttcctccatcgactttggctggccaattttcttgttttgttgtttgaacagtgtgcattatctttgagggagcagctaatgagtgaaagataaaccctctgccgcgatcaaagagggaagtagctggaagcaggcagccagcatgtcagaaagttagtagagttcagcctggcaggaaggattgctatttgatatcgacctctttttttctctccatcaatctacaatcaagacatcaagtatgaagtggacatgaagatggaaccgtccagtccatcggagaaggatcgcagcatgtactcgcgttgttcgagcgcgggcagtgtccatacgccaacctcatcggcacataactcagaggacgaagaggattccggtgataacaagagtagcacccagagctacaaggaacgtcgccgcgaagcccatacccaggcggaacagaaacgtcgcgatgccatcaagaagggatacgactcgctgcaggaactggtgcccacttgccagcaaaccgatgcctccggatacaaactgagtaaggcttcggtgctccaaaagtccatcgactacatcgggtttcttcatcagcacaagaagaagcaggaggaggaccgtgcgtcgctcaacaaggaagtgatagccctgcgtattatacagaagaactacgagcaaatgctgcaacagcagcagcagtctcctgggaggaccgaagcgcgcctgacggatgaagccaagttccaggtgctccgggccataatggacgaaatgttcgttacgttcgaccagctgccgatgaacgactttgccgagctgacttccggggtcattccgtggctggaggagcactgcaagccgcacctgttgcgcgatgtggtcaatcgcaccctcggtggaatcacctcccaatatgtggcgcagtccagcagcaaaggacacgatgttaagcgcgaataagggaatttggtgagttttatataattgcaatttgactgtagtgacgtctaattgtgtaatagaaaattggatattttaataaaggaaataccaagctacgcacagaata

SEQ ID NO: 207 - DNA, 1905 bp, Aedes aegypti
atggattccggcaccgagttccgctcgctggacgatgcattgaagaacctggaaccgatggtgaatcccgtccgacagtatcgtaatcggaagcaacaacaacagaagaagaagaagtggaaggaaaattacaatggcggagctacagaggaacaagtagatcacggaggggacacaaaactggccgatgtcctgagcaagataaccagtgtgagtagcagcgaaaaggtcgaccgaaccaagctgatccggacttacaacgtaaaactgcgcctcaagaaaccctgcctgtacaaatgcttcgattgtgacgtttgtttcacgaatgccgactttttggaactgcacgaaaagtcccacggcggaattacggcggacacgtcttccggtggatcgtcccggaacgaaatcgatctgcagcaggagcaatcgttggacgagtcggaaatgatcgtaaaacagaacgcttggttcgtcggggaagattttgacgaaagcgatgaacaaaatggcgatgatgatgaggaggaggaaggaacgatccaattggattgcaccgttgaggaacgggaggacaacttcgacatcacgttcgatcggaccaagtgcgagaaaacctacacggtcgtgaagtacaaggtccggaaggatccggtcgggaaatgcgaactgtgcgagcggttgttctacacggtggaaacgctccagcagcatcggttggaacacgaacggttcctgaactttgaggccatcgagccacagattgacatcgactcgccgagcatcgaagaaagcacgctggtgctggacgagagcttctatcgagccgaaacggaggacagtgatataatggagacgagtgacagtgctctggaggtcgctggcagggtggaatcaatccgacaaggtggattgcgtaacggtgagtggaaaccggcgactcgtccaggctcgccaccatatcggattcctccccgggaagaagtagcaaccatcgaagggcggttccagtgtgaaatctgttcgaggcgctttcgtttccgtccggcttacaacgtgcacctgcgaacccacagcaacagccggccgtttcagtgtgtcgagtgcagccggaggtttatttccaggacgaaactgtttctgcattcgtacggacacagccggatccgaagggcagcgttgcggtgcgatgcctgcggggccacgtttggtcgaccgcgtcaattgttggaacatctgcagcagagacacgagatgccagtttagaaatcagggggtgagtcatttttagccgttgttagtttaatttaaatccgatatcaagagtattgtaagcttagggaaaggctctttaaaagagctgattttttttagttttagtagagaaacacagcaatttaggagaaggtgtacacaatacaccaaagtcccgtggatggaatgttgattgcattgcgcttactcttatccactgttagtggaatttctgattgtaaatcatagcatcttagatgatcgcttgttgttaaaacaaaactacaaaactgccagtcgatatacccagctgtccgaatattaaactttatgtaagtaagtagttacgaaattgaactgggtagtaataacgagctgtgctattctgttttgttttttatgttatatttgccttctaaatatgaacatcaaacccatgtatgatagttattctaattctaatctactggtagtaaactggaattgtattaaattaacgttaatcaatgtgccatacgaaaataattcaatcatgatgtgatgagaacgcgcattcgttttccttcaattccaccaacttctgctccacttagaatttggtctaataaaattagtgaattctccaggagaagaaaaaacgtacacgtaatg

SEQ ID NO: 208 - DNA, 500 bp, Aedes aegypti
ttcgtgggttttagaggatgtaaaatgcaagtgttttattgattaaagcgaggaaaagctactaggatgctacattattcttctatgactagtgaaattaaaagccgaacgaaacgagatggagtgtggttgtgaaaaatatttagaggctcagcagccggccgatagcgatccggcttcgacgggaccaagtttcgaacagctggtggaacaacgagtggcctctacattgcaggtggtaaatgtcctcgttgccaaatcgagtgctcctcaagcggtgaaggatgccgtagtagctaacgcccaacaagagattggtgcctgtgcggcacaagccttggttgacagacttcccggaccgttcttcgcttgcagtggcctcgtgattagtaacgccagtaatacgctgaatgctgctgcctcatctggtgctgcgtcggtaaactgaacctatgtttgaaagcacagtaaattgaaacttgtgatatatacactgaatc

SEQ ID NO: 209 - DNA, 1353 bp, Aedes aegypti
ctcaccgcaaacgggattcccatccaaaatctggttccagctgtttggcgagggcaatggtcacgcgaatccctgtgtcgatcgtttattgattagcgcgttttgaattcgagtgccaatgaaacctcggtcaggaaacaggaatgcacaaaataggcgactaccagcggatcgagaagattggcgagggaacttacggagtggtgtataaggccaaagatgtgaacacgcagcgtgaaacggagggcgttccgtcgactgccatccgggagatttcgctgctcaaggatctccagcaccactcgattgtggaactgttcgacgtagccgtaatggattccagcatctacatgatcttcgagtatttggacatggacctaaagaagcttctggaccggcacaaatcctccttcacgccgaagcttgtgaaaagctacatgcaccagatgttggatgcaatcgcattttgtcacatgcaccgaattctgcaccgtgatctcaagccccagaatctgctggtggatcgtgaggggcacctgaagctggccgatttcggcttggctcgatcgtttaacgttccgatgcggacttacactcacgaagtggtcaccctttggtaccgggcgccagagattctcctggggaccaagttctacgcgaccggggtggacatctggagcttagggtgcatattcgccgagatgatactgcgaaggccactctttccgggggacagcgaaatcgaccaactgtaccggatattccggacgcggggaactccggacgaaagcaactggccaggggtgtcccagctgccggactacaagagaagtttcccccgctgggacgggcagtcggttcccgaggagatcgccctgcaccaggcgaaagaccttttcgagctgcttatggtttacgacccgacgaaacggatttccgcccggaacgccatgcagcagccgtacttcgacgatgtggaactggtgccaccggagattggacccttgaatggaaaaactaacggacagtaggataagagaagagtactggcacggggatgtaagtaacgtgatcgatttttgttgcatcttatcaactcaattcatagtggaaaaatcaatcacgtttctttcgtccttattctggcacacgttcgatatatgaatcacgttaggaattttaagggaagtcagtgaattttatgaaaaaggcttatcgtaggtaattcagggaacactcgaccacaaaagatcgtaaaactcctcattagcatagggtagaagcactagatttcgcccccctaaaccatgtaatcgcaggaataataaatttctgactctattaatcaatatc

SEQ ID NO: 210 - DNA, 1329 bp, Aedes aegypti
atgcacaaaataggcgactaccagcggatcgagaagattggcgagggaacttacggagtggtgtataaggccaaggatgtgaacacgcagcggtatgtggccctcaagcggatacggttggacagtgaaacggagggcgttccgtcgactgccatccgggagatttcgctgctcaaggatcttcagcaccactcgattgtggaactgttcgacgtagccgtaatggattccagcatctatatgatcttcgagtatttggacatggacctgaagaagcttctggaccgacacaaatcctccttcacgccgaagcttgtgaaaagctacatgcaccagatgttggatgcaatcgcattttgtcacatgcaccgaattctgcaccgtgatctcaagccccagaatctgctggtggatcgtgaggggcacctgaagctggccgatttcggcttggctcgatcgtttaacgttccgatgcggacttacactcacgaagtggtcaccctttggtaccgggcgccagagattctcctggggaccaagttctacgcgaccggggtggacatctggagcttagggtgcatattcgccgagatgatactgcgaaggccactctttccgggggacagcgaaatcgaccaactgtaccggatattccggacgcggggaactccggacgaaagcaactggccaggggtgtcccagctgccggactacaagagaagtttcccccgctgggacgggcagtcggttcccgaggagatcgccctgcaccaggcgaaagaccttttcgagctgcttatggtttacgacccgacgaaacggatttccgcccggaacgccatgcagcagccgtacttcgacgatgtggaactggtgccaccggagattggacccttgaatggaaaaactaacggacagtaggataagagaagagtactggcacggggatgtaagtaacgtgatcgatttttgttgcatcttatcaactcaattcatagtggaaaaatcaatcacgtttctttcgtccttattctggcacacgttcgatatatgaatcacgttaggaattttaagggaagtcagtgaattttatgaaaaaggcttatcgtaggtaattcagggaacactcgaccacaaaagatcgtaaaactcctcattagcatattacattattttaagcataggttagtggaattaaatggtacagtaaactgtgtcaattttacaaaaaaccgaaatcggcaatgtgcctctagtaaattatgctgccgtgaatcgcaagtcagtcgcatttgcattttcatcaaaataaagttgagttcatttttc

SEQ ID NO: 211 - DNA, 993 bp, Aedes aegypti
tgttcctcacaatactgggctgtttgaaattagcatcatttgtgcgctgtcctgcattttaacctgttcaaaattgtcataaagtaagaatctgcaaacatcatcaatggacaaaagcaaataccgtaaggagaacggtaattttatccgtcgcgttggaccgatggagctggaatcctacgctctgcacataatcaacaaggaaggccaaatgcagcggatcattaatccaccggaagacgtcatcggaatactgctgaacgaaaacgcagatgaccaagccaaccccaaggtcgagtttgtctactcgatcaaaaagttggcgcgtaagcatggaaagcccacgggaaaatcttcggcaaaatcgcacggaaaattcgggctgcatgactttgcccagctttttgccaattccgagaagccagctccgcgaagaggttttcccacgattaatcaactggccgccggtagagcggaagtgcagcttccaaaaaattggaagcaagatctgaacaagactatggatggactgctggatcaagaggcgcgcagaagatgggaagaactgtcgacgaatttatgtccgtgcaagaaaaaggagatcctcgagcaaatcaggcaggaacgcgaactaatcgagatgcaacgtattgtcttgcaagtcttgatcacaggttatgattcatacataaatatgcttctggagcaattggagcgtaacgatttggtgttggctttgaacttgggagaagggaaacgaggtgtatggtccttggagaagagaaatactcgtctgcttgggacgaagctgatctccgggaagaaagaattttggagaagttcgcctcaagattgagcattattgtataattctacatctatacaaccgggattttaatcactgacaagaaaatcaattgagttttacgatatatttttgtaagttcattagcattagtgcaataaagtggcgtcaataagtttcgtagactt

SEQ ID NO: 212 - DNA, 2051 bp, Aedes aegypti
agtatttaagtagccgcgttccggcgaaggtcagtagttgccgaacgcctcgacgaaaggagacaaaggattctggtggacttcgctgccgtcacctccaaacgatcaggattcgtagacagtcctttagcgcgtaaaagtccaggagccatggatcgttaatcaacgaggatcgcgtgtcgttcgtgtagtctaataacatagcgtagtcgcaaatctaagtcaaattgtatacttactagtgaacaacgaaatttagcatttgcgaaagtaacgcgaccttcacgagagcaatgaataaccagtggagattggtgctaagtgggcttttgtgtgtcctaatctgtgatattggaggagtgatcggcgcggcgtttcgatcgcccaacagtgatgatgccctcttctggcggcagcaggccgaatcctacctgaagcggatcctccagtacgaaccgaaccggaagagcggagcaggcgttgcgcggaacgtgatcatcttcgtcggcgatggaatgggcattgcgtcgctcagcaccgggcgaatctacaagggacaactggcggggcgatcgggggaggaggaggttctcagtttcgatcattttgagaactcgggcttttcgaagacgtacaacacggaccggcaggtaccggattcagctggtacggccacagccatgtttaccggggtgaagacgaagtacggatacatcggggtggactactcggcaacggctacgaacgaagtggcggcgagcgtttcaaatatcatggaatgggcgcaggccgtggggaagcgtactgggttcgtaacaaccaccagggttacgcatgcgactccggcggctacctttgcccattcgttcaataggaattgggagtgtgaggctacaattccggctaatgtgagaaacaaaaccaaggatattgctcgacagttggttgaaaatgctccgggaaataagatgaacgtgattcttggaggaggacgggctgcctttggagcgtcgattccggatcacttgaagacagcattcaagttcaatgggtctatggagaagaactgcgtcagagaggacggtcgtaacttggtgaaagattggttggtcagtaaaaatggatcggcggcgacctacgtatggaacacggccgagttgatgaacgccgaggtagatgacttagactacctcatgggactgttcgccgatacgcacatgtcatacgaacgccttcgggatacgagtgaagcaggagagccttcactagccgatatgactgagaaggccatcagggtgcttaaacgaaagcattcaaatggattcgtgttgatggttgaaggtggaagaatcgatcatgctcatcatcaaaatcatgctcatctggcgctgagggaggtcgttgaactggatcgcgctgtagagcgggcgttgggaatggtggacttggacgacacgctcatcatggttacggctgatcattcgcattctatgacgttcaatggatatccagatagaggcaatgacattctcggttacgctaatcgaccggataagctgccgtacgaaaccatcacgtacgcaaacggtccaggattccaaacgcatcgtatcaacgacagttcggacgatccgtcccacctaggcacctggattccggtcgaaaccatgaaccgctccgccatagactaccggcacctatcggccttctacttgggtgatgaaactcacggaggagaagacgtggctgtatttgccaccgggccgggatctagtctagtccggggaacgttcgaacagaactacatagcctatgtgatgagctatgccgggtgcatgggaccggccaagcggtttaacgaagcatgctccttcaaacctcgggcaccttcgagtggtgcggaatctgttgggaatgcgtcctcccagctgttgatcagtattgtatttttagcggtagcaaaaatgtgctaccacttttaattcgaacgttagccaaattagttgtaagtttcaaaatctgtaaatatgtcgggaaattgttgaaaattg

SEQ ID NO: 213 - DNA, 1644 bp, Aedes aegypti
attgcagtgtgtaacgtggatcgttaactacagtttctcgtgacgattatagaattaagcaattgtgtaaaacttataaataagagccaacattttaatcgatgcccatgggtgaatttctgcgcattccgtcgatggaacagaccaaggaaattgctaaacattggctagacgataaaatcaatactgatgagctgtttgcatgtgccatctgccataatgcaataagcgtggaacaccccatccattgtccccagtgctccaacttgttctgtgccacctgcatagatcagtggttcaacaccggaggcccgcggccttccaccgtatcaagcgtgaaacgttgcccatgctgccaggcgaaggtcacaatgaatcaattcacctattgtcgcgtctaccaggaggtacgcgagatgatcgacagcctcaacaatagtatggaagaattgattctgcaactaagaaaacccgttgttttctgtgaaaaacataacaaagaactgatattgttctgccaggagtgccacaagtgtatctgcgtaaaatgtgtcttggtggatcggcaccgtgggcatatcgatcaggtgctagaattggacgacgctcgagaaaagctgaaaattgcgatcctgagggagaacaacttcttggtcaaccggctagctgtgttgaataaggtgaacgctcgactattgacacgtgaaaacgatatgcaccggtcctgtgacgcagtcgttaacgagatgaactttgcggtagacgctatcatcgaaaagatccacgaagacaaagatgaaaggatacaaaaggagatagcaccggtgaaggaagcaacaaaacgacaacaggaagaagtggagtcgatcatccagcagtctttcgagttggctaatgaggaaactagtcccgatgtattggtaaaaacctatcagatgatccaagccatcaagaaaatgcactacgaaccgtttcctgtggagcaaccccaagatataaaatttacgaacccgataaccccgcccccactggaagtgcgtttttccgttccctgcttctcgcagcgaatcctccggtcctgtacggtattctccgttccgcaaagcttcgacggttttatgcttcagctcaagggctaccacgattcggacgaggacgtaatcaaactttcgctccgcattctcgagggctacgacataaacgacatcaaagtagtctgctatccgatgcgggaaggggaacccttggtccggtgtatggacttgaaaaagggcgaagacaacacggtgctggagttttccaactttactgagatgggcggcttcctggataccatgctcgacgagttgatcatagagatgaagttgagcctgtggggcacctattacgctaaatgtgctcacaaggactggtgcatcaagaagctcagtggactcaaagaagtcatggaagatattcaaaaaagttcatgaatggggatacacattgtaagatcgcgctggacgtgacccgttggttataagcatatctatttatgatgacgttaactttttagcattgtatgaaattttgttaataaatattgtgcgataattgtcgatcagcataagaagaatcaataatcaatcatattttagtaaacgt

SEQ ID NO: 214 - DNA, 5946 bp, Aedes aegypti
atggatcacgcggttcacgctgcccgaggaagaccatggaacaagctgcgcttcgagaacaacgagctggaatgcctgtaccagcggtacaccctcaagctgcaacggttctccgtgaccggagtcgttgccctggtcgtggtcctctgtggcgtcatggccgggctcagcctcggttacaaccaggcgccgacgttacataacgtcttcaactcgttcatgtgtctgatgtttgccgtcattctggcgctgctgcagttccggtttatccgggactcgcacctgccgtatctgtgctacgggatcctgttcttcacggcggccttctgcttcatctcgatgcccaccgtggggattgtgttccccctcgatacccgggaggtgatggccgaaggcgtctggcagattgtgttcgtggtgttcttggcgtacgccatgatgccgctgcagatctgggaggcggtgctgttcgggatcattctgccgtcgattcacatcgggctgaccgggtacaatatctacaatgagaattttcagtatttggcgtatcaacagctcgcggccaacatcgtcatcttcgtgggcgtcaacgtggccggactggtcgtcaacgtcatgatggagcgggcccagcgacgggcgttcctggatactcgcaattgcatcgcagctcgactcgagatggaagatgaaaacgagaagctggagcggctgctgctatcggtcctgccgcagcacgtggccatggagatgaagaacgacatcctgtcgccggtggagggccaatttcacaagatctacatccagaagcacgagaacgtcagtattctgtttgcggatatcgttgggttcacggtgctggcttcgcagtgcagtgctcaggagttggtacggctgttgaacgagctttttgggaggtttgaccagctggcgcacgataatcactgtttgcggataaagattctgggggattgctactattgtgtgtcggggattccggatccgagggcggatcacgcgaggtgtgccgtggagatgggactggacatgatcgatgcgatcgcgtcggtcgttgaacagacggatgtgatactcaacatgagggtagggattcattccggtagggtcctatgtggagttctgggtcttcggaagtggcagtttgacgtgtggtctaacgacgtgacgatggcgaaccacatggagagtggaggcgaggcaggtcgggtccatgtgacccgggctacgctggatgccctcggaggagagtacgaagttgaggcaggtcacggtgatacgagagattcgtatctccgcgatcaccagatcgatacgtacttcatcgtaccgccggctcatcgcagaaagcccctgatgttgaacaccttgggggttcgttcggctctgggggccgccaaccggagaaagctctcgttccggaacgtgtccaatgtggtggtccagctgctccacacgatcaagtactccgttccggttccgttctcgcacatggccaccggtgggtcaccttatcccggtggcggcggcggaagcagtggcggtccagccggtggccccggcggtggaatgttcctcgataagaacgcccgaaagattgctttcgtagcaagtttctcgaacaatagcaagcgagtgctccacttgcaacgtatgctccacgccagtccctaccaggcgcacatagctgccactgctgcagcagtaggcggcgccaccggagaaagcaccggtctgatggccgggacgcgtggaggcgacgccggcgattcttcccatcttcgtttgcgcagtagtagttgtagcatatctgtagctttcactcaaaatcgaagcttttaccccgaggcaactgtaaactcacgcgccaacaaggtcaccgacaagttcaagcggccgttcaagaagcgccactccagcgtttaccatcagccgtcgaaccgggtcaacaagttcctctcgcaggccatcgaagcgcgcagcgtcgatcgcgagaagtcggtccacgtcaaacggatctcgttgcagttccgggagaaggacaaggaacgccagtaccaccaggacttcgatctgggcttcaccacggccatgggctgcagcctgctgctgctgatcctcagcgctggattgcagatttcagcgttacctcgtaccttgatattgctgctgctatttctgacggcgttcatctggatcagttcgatcctgatgctgctgttggccgtaagactgaagtggatcttctgggatctgtcgcagagtttctcgctgcgcctggcgatcaccgttttcacgatcgtgctgctctactcggtcggacaggtcaatgtgtttacctgcctctcggaccacccttgtactactaacttcactacaaaagccgtggatcctttccaacactgtgcactaccgcagtacatctccctgtcagcggccttttccttcctgaccgtgtcgatattcctgaggttaccgatcatggtgaaaacgttcctgatcatgctgatgggcatcatgtactgtctgttcatcgagctgtcccacacgaacatcttcgactgttacgatcagcgggtggagtcggccatcccactgcacacgatctcgctggcgaggatcatcatcttcatgatcgcgatcttggcccacgggcggcaggtcgagtggacggcccggttggacttcctgtggcagctgcaggcttcgcaggagaagaaggagatgtcggttctgcagcagtccaaccggcggatcctgtacaacctgctgccgtcgcacgtggcttcgcacttcctggacaaccacttcagccggaacaacatggtgagtagttggcggcgtgctgcgtgtttgtttgatttgtatcatcagagctacagcaagttttatacggagttggacgggtccaatcagggcgttgagtgtctgcggctgttgaacgagatcatcgcggactttgacgagttgttgtgtgaggagcgattccagtcgatcgacaagatcaagacggtgggcagtacgtatatggctgcggtggggttgattccggagttcaagatgcttccgagcgatcaaggttcgacgcggaagctgatgacggctttgatagattttgtgaaggcaatgcgagtcacgttgaagaatatcaacgagaattcttataataatttcatgctgagggttggggtgaatgttggaccggtggtggctggagttatcggggccaggaagccgcagtacgatatttggggaaacacggtgaacgtagcgagcagaatggactcgacgggtattccggggtacacgcaggtaactcaagaggtgatcgacagtcttcagggcagccacttcgagttccggtgtaggggacagattaaagttaaaggtaaaggtgatatggtgacgtattttttgtgtgagcagaatgagaatatgctgaatgggggaggagcgatgggagggatgaacgggacgcgggatcgtcagacgccagcctcgaacattatctccaactaccaaacggacagttttcatcacatgaacattggaagtcaacaggggtgttaccaaacgcaggcgccggtcctgcagcctcaaagttactatatgaagcgatcggacatggatagcgggagtgtgaagaataccaagtggcagatgggcaacgacagcttctcgaagaaagagagctacaattttctggaaagcccgaacttacttcatcaacaaactcccatcgcttacaagcacaacaacataaacaataatcacattagcgcaggataccatggcaaccatcacagtcaaccgacgaatcacatgaacaacaacaataacaacaactacggcaaacgcaatgactatcttcatggcaatggctcggtgggaggtcagcaccagccaagttacaacattcgggaaaacttcaacatcatcgaaaacccgaacgtaaaagaagctgacgagaacaacttcaacaagctaaaccacagtggccataaagtacgaaacaacaaaaaccatcatcatcatcatcaccatcgacacgaccccggtgcgggtagcaccagccataatcccagcaatcgatacgtaacggcttcggagaacgaacctctgcttggctcgggcatgatcggcaacgccatcatcaagcctatccagcagatccaacagatacccaaatacgaacctccccgctatgccacgggaagtgctgccttccctcatcaaccgatgaacaacaacgccagctataatttccccgcagcccctagttatcaccaacagcaagtgccgcctccgcacgttctccgacagcaccagctctaccaacagcagcaccaacaacaacagcaacaactgctgaagcagtacatcaaaccccttccgaagctcccccacgaatacgacgaatcccgggaaatgtcctccacggatgatctcagctctcgaccgcgctccccttcggtttcctcctccgacgagagctactccaaaaccaccgaaggcgaagagctggatggtcactctccgctccccgcccggacttcctatcccaacaacttcaacaacccgctccaatacctctacccgggcgacatccaggtagatccaacctccccgcccaagctcagcccgatcgacttcgccaacatgaaagatttcgaggtgaccacgacggcggaaaccaaatcctcggcgaaccccaacaagggcgagtcgtgcaatagcttcgagttccatgacaagccttccgccgcaatgggcgccactcaaccacttcaaccttcaacgaacttccccaagtcgcctttcgaacgggaactgcaacgaaggcttgcagagtcgcaatcgcgaccgatgctggcctccgcagccggcaacggcaacaacaacctcgatcaccaatcggagctgccgtcggtgcggcgggactccgccgagaagatcaagaacgtgaacaacttgttgctggcgaagcaccccggaacgctggaggcgatcaaggaagccaccaggaataagaatccgtcagagtcgagtcatatgcaaacgtcggacacggaatcgtgcgagatcatccacgactaccggtcgtccccttcaggcggtggaccgggatcgatggaccgtcggcaccaacatcaccaccaccggcagcaccatcaccatgcactgtcgcaacaatcgccccgaatgcaccctcgaaacctccaccgcaagtacaatgcggcgaccaagaagtcctccaacgagacgtcctccaacatcgaagcggacgaagacctgcggctgtcgaacgaagcgatctaccggggtcgaggacgggactcggacgacctgctcgacgatgacgagccggacgaggaggacgtggaagaggaggagtcggaagacgacgacgatgacgaagaagatctagacgagcgggaaccacgtcggaacgcaatgcgaaggggactgggcgccaacggcggcgagcgatcgcgaaccggaagctgtgatgcgacgaggaactacatctcggacgaactgaagtacggtgcgggacactcgcgggaacgggatctcagccatcacaacaacagccatagctcgcaccacaaccaccagtcgctggactcgaacccggtggaaagccaatccgagtggagcgacgacgaatgccgggaggaggcgaccggcggcgccgaaagcaccggctacatcacggacgaacccggcctcgagaacatctcgctgctgaacgaggccggtctcaccgacgcggagggcgccctgtcggacgtgaactccctgtacaacgcgccggacgtggacgacacgtcgatttcgtcccgggccagcagccggctactgagcctggactcgctgagcggcctgtacgactgtgatttagactcgaagcacgagatggccatc

SEQ ID NO: 215 - DNA, 1842 bp, Aedes aegypti
tatctgtgctctcgtttttgacattcaaaccgcaaacctatcaacatgactacctacttcaactacccacccaaggatgtccaggaagagctggcccgcattgccaaggctatcgttgcccccggcaagggaatcctggccgctgacgagtcgaccgccacctgcggcaagcgttttgctgacatcggcgtcgagaacaacgaggacaaccgtcgccagtaccgtcagctgctgttcaccgccgacgatcgtctccaggagaacatctccggtgtgattctgttccacgaaacgctgtaccagaaggccgatgacggtaccccactggccgccatgctgaagaagaagggcatcctggccggtatcaaggtcgacaagggtgtcgtcgatctgatgggatccgagggcgagtgcaccacccagggcttggacgacctgggtgcccgctgcgctcagtacaagaaggacggctgcgactttgccaagtggcgttgcgtgctgaagatcggcaagaacacccccagctaccaggccatcctggagaacgccaacgtgctggcccgctacgcttcggtgtgccagtcgcagcgtatcgtgccgatcgtcgagcccgagatcctccccgacggtgaccacgatctggaacgttgccagaaggtcaccgagacggtgctggccgcggtgtacaaggccctcaatgaccaccacgtcttcctggagggaactctgttgaagccgaacatggtcaccgccggacagagctgcgccaagaagccgtccgcccaggagatcgccctggccaccgtgttggccctgcgccgtactgtgccagctgccgtgcccggagtcactttcctgtccggtggacagtccgaggaggaagcctccgtcaatctgaacgccatcaaccaggtcccgctgctgagaccatgggccctgaccttctcgtatggacgtgccctgcaggcttcggtactgcgcgcctggggaggcaagaaggagaacctcaaggccgctcaggatgagctcatcaagcgcgccaaggctaacggattggcatgccaagcaaaatacgtcgctggttcgattccctcgtatgccgccaacgccagtttgtttgtgaaatcgcacgcttactaaacaaaagaacaaacaaaaaaagaactctcacacacaaacacacaaatctggtcacactgcactttgcacgaattacaacgccccgattggtttagatgattagacccgcccgatgcacgaattgtcaatagaaccacacaaacacacacgaagagacgacgaagaaaaactcaccactaccaagcggaggcggcaacatcaacgaaacgaatcggaatgcaattggttgtagtcgaaaaaagtgcggtggaaagaggcattcctattgtttccaatatttcccatccggcgaacttctctaacagtttcaaactacctcttcttaaatcgacacacaatagacaagacagagattaatgtacttatggtagcacacagtggaagcaatttagagcaggaatcaactataggacacgagtcgaaccgcgcgatggatgtttctgacgaattgtgtttattttatttccctattagaatagaatgtatctaacctcgaaaagttttctgttcgtactagacgttttttttagatatgtgtttgtgtttttaattatgattttccaactactgataactgttgcttgttttagagctagatgaaagtcggacacgattatgtttatagttatgcttggttatgtcaatcgaaagaagaaaaataatatggtttttgtaaaacaaatacacaattggcacaaaaat

SEQ ID NO: 216 - DNA, 968 bp, Aedes aegypti
gaaaagcctgctgctatacagcagataattctttacgacgcattcaataactcaatttgtgtagctggtgtacaaaacctattgtgttctcgataagcgttttattgtgagttttgtccagaatttgttgcaagtctgcccgtgcattgattggcgtcacagttgaattgcttttaaaatattaccccaagaagtgaagaccacagaaggttcaatttaaatccacaatcgttgagagcggttggtcagtttaaaaaactccggagaagtgtgcagttcagttcagtggatctcagccgggccgtttaaaaatgtgtgcaccaattccattaaaggagcttctaaaccaattacggaaggaggttataatggtcagattgcagcagatcaaagagcggatgtcccaacaagagggctcacgcccttctcaacatcgaattcgccaagtatatcaaattctcgatgtgactgttgacagacgagatctaccagcggacttttttcagcgaattccaagaattcctgcgaatcgaccaatcaaaaagcgccatggttctcatcgatcgtcctcggcgccgccaagaagtagtcctttgacatcaaactttcgtgtacatccagcgtttcgccggtttaacgatcaacgcccggtaatagacaggagaagtgcacccaccagcacgccacgggatacagtagttttgagggttcaagtgacacggttatatttgatgccaaatcaaggctctcacggtgaactgaacacaaatgtgcctaagaacgatcacacaaatggtgatcgacaactgtgataaaagctgaatgcttttatttgattacccgatatctgtattactcgaccaggcgttcagaagaagtgcgaatttagtttaaaatttgtagtacataaatttgaaatgtgtattatttcacctaaataaagatatttttcatataaccggtacact

SEQ ID NO: 217 - DNA, 1050 bp, Aedes aegypti
atggaaaaccgcttgtgccgtttgtgtttgactttgaacagcggccggattccgctcttcgacgagatgaccatgaagccgaatgtcctcctgatccaaaaggtagtcgaatgcacttctataaggataacagctgaggacgattatccgtcgtcgatttgcggggaatgcgagcgaaagctgaacgaattgtccgcgtttaaaatccagtgcatcgtgaataacgatttctaccgagagaagcaagcggaactacggaaggaacaggtgtcctgcagtcaacagcccacggaagtggtttgcctggacgatgacgacgaagaggaggtgtattatgcggaagagtcccaaaaggaatcggaggatcaaagccatgaaccggttcagaagagggcccgaatcgagcaggtcatcatcgaggatgacgatgacgaggagcaggaggaacagaacgaacggctaaactacgaaagcgagcaaacggaatacgaagagttcaacctggacgacttcgaactagtggaaggccaagaagtggatcagtactaccagccggaggaaccgctcatcgacaacagcgccatcctgacgtcgattctgctggacgacgaagaggacgacggtggtaacaacgcgctactcatggaccaaggccactacgaaaaagtctacccgtacgagtgcgaattctgccggagacgttactcgtccctcacgaagctggaatcgcacgtgaagtcccactcgcagaaccggatgaagtgcttcatctgtggcaagctggtcgtggtccacctgctgcggcatctccgttcgcaacaccccgggatgtcgtttcccgagccggtgcgctgttggcactccaagtgctccgatttggaccaagtgttcctggacgtgaatcaactgttggcgcacatggacgccaagaggacgaggagacggtaggataccgtggctagaatagtgcgtaaatcaagtgcctttttactattaatatattatttaaggttgatgagactgtacatatataaatttttgcgctcaaac

SEQ ID NO: 218 - DNA, 1381 bp, Aedes aegypti
gcggtgtattggtgcagcggagataacggtattgttgtgcatagctaactgtggtagataacggaacatttggagcgaaacaatggctcacaatgtggatctggtgtgcaaggagatcatctacgacgaagtggatagtcagtttgccgaaccggacccgacgatgatcgcggatgttcgggtcattcagaacttgattgggctggaacggttgacgattccgtcgtgcaactacttcggctcggtacagcaagatatcaagccgaacatgcgcaagatcgtcaccacttggatgctggaggtatgcgacgagcagaagtgcgaggagcagactttcccactggcggtaaacttcttcgatcgattcctctgcgcatgcccgatcgatcgctaccacctgcaactgttgggatgttgcgctctcctgttggcctcgaagatccgccaatgtcatcctctgacggtggacgttctcagtgcgtacaccgaccatgccgtctcgccagatcagatcaggagttgggagctactgatgatcagcaaactggagtggaacatcacggccgtaacggcgttcgactacgtcgatcagattctggaacgcgtcaaatggggatcggacgactcgcggctacgggagcacgcgcacaccttgatccacgtctgcagcaccgaaaccatcttcatgcagttggaaccctcgctgctagcggcggcttgcatcgcctccgcaagccgtggcctcaacgtgtccaccaagatggccaccgggttcgatctgtgccggttgacgttccacgacattgccaaaatcgatttcatcgtcaaaatcatcgaagaaatcgtcgccaaggaaatcgccgacaagcaattgcaacagcagcagcaacagatgggcgccaatggggccgctgggggcagctgcaaggaacagtaccagcaagcaccgcaaaaagttggtggcgccaccgtcgagcagacgacgtcacaacagcagcccgaaacgcccaccgatgtgcagtttatctacttttaactgtaaacgggggacgctgcgtagtttaggaatttttccgggcgttcgtcgctgcttttcgcagtgaacgatcgcctggggaagctgtatctattttttctctctattgttttgagatatttatctgccaaaatttacgcatgttgttaagaaagcgaaagttatattttcgatgaaatgggaatgtaggcgctattcgtcatttgccgacccctccgagcaggggtgggttgattgaaatgtcactcggttgactgaaccaaaatttcatattgtataatatttacactgaaaacaaaaagcggaaaccagaatctttgaaaacttagttaattttctacaaac

SEQ ID NO: 219 - DNA, 853 bp, Aedes aegypti
gaatgattggcatcatcagcagaaactgcttttaccgccaaaacgatctagttgctatcgttagaaagtgcggatttttgggcgtatcaagttctaagttaataaatagttctcccaatatgtctataattcaaaaaagaggagccctaatagttttggaaggctgcgaccgtgcgggaaaaactacgcaatgcaaaaggatcgcgccggacacaaagccaaattcatgaatttcccggacaggtcaacgcagtttggtgccttgattaattcctatctgaccagcaaggacaattttaccgatgaagcaatccatctgctgttcacactgaaccgatgggaggccaaaaacgaaatggaacgcctgctgcggagtggcgtcacgttgatcgtagatcgatactcctattccggagtggcattcagtgcggccaagggattgaacatggactggtgcaaagcgccggaaaccggtctgccaaagccggatcttgttctgctactcacgttgacggcggaagcgatggccaaacgcggaggatttggccaagagcgatacgaagttccagaactgcagaaaaaggtgatggagaaatttcacaccctgaaagacgatagctactggaaggtggtggatgcggataaaaaagaggacgcgctatctttggagctttgcgagatggttttggactcgatggaatcgtgcagcgataaaccattgggaaagctttggtaacattggttaactagttcaatttaaatctctaccatgatgaatatgattccggtatttacctacattaaggatagataagttaaaacaagaaagaatatattttgacatacattttct

SEQ ID NO: 220 - DNA, 2052 bp, Aedes aegypti
cggcagatgtgattgttcggtgaaattccggcgttgttccagacggaagtcgttccatcctacgacggatttgattccggaacgaccaggcgactcaaaaacgacaaaaaatccggtataaaatggagtagtgtttttcaaacggtaaaaagtgtcatgtcaaagaaggtgctctcgagagtttgccaaattttgcgtcgccatttgacctacaatcagccgaagcgcttatcagacgatcttgcagcagcctagtgcgaataaagtaactgagcactccggttatcgaaatctgacaacatggcgttgcttcctccggatccggtctattgcctcaaatcgtctgacctcggcgcatttcattcgctgtgtttccacacatcggaacggctgtatgccggtaatgtccgtggaacggtgcagctttgggatttgcagacgaatcgctcaacgtatcagctgtcggtgggcaagagtcccatcatcggcttggcccacaccgaagatgccttgataactcaggaaaaggagggcaccgtaaagttgtgggagctgaccaactcggcgtacgtcctccggcacgaatccgccaccgaccacgtcggtttctgtcgtttcgtgtaccataacgatgctgtgataatgccccgcggggaagctaacattgccgtcctctgtgggcggacattcaccgagcggcaactgctcaatccgactaaagccgatcccaaacttccgcccctgggaacggtcatgtgtatcctgccggtggagataaaggacaaggcttaccttttggccgcctacgaggcgggaatgctagtgctttgggacctgaccagctcgaaaccgatcagccatctgcaggtgtgtcaggacgaatgcctgatggccatggattacgatccgtttactaatcgtggcgtttgcggcggaacttcggacaagatctttgtcttttcggtggaccggccgacgatggaactacgcaaaaagtctgaaatagcaatcaagaacgccgggattagccgggtgaagatccgcaaagacctgaaggtgtttgtcagtgccggacgggacggcaggattcgcattttctcgtggaaaagtctgaggccgttggccgtgttgaccgagcaccggggagaactgttggacgtgatctactcggacgagaaggtatcgatgtggaaggctgtcatcatggccgcggccggatcagacggacagatttccctgtgggatctgtacaactgacgatccggtgccccggtggatgaatgaaaaggcagataagtacttctgtttgacgatggatttacttttttgaacgttgactttcactacttgcgttctaaggaattaaatcttattcggatgaaccttcaaaagcttttatatacaactcacatttacacaactggcaaattataagaatcgccatgttacggttccttagctgttccttatcgttcttttttaaaccttaatttattatgttacacgtatacttattaacttacactgttgttggtaatcactcattcgcgaacacattttatgctactaagtctctacttaaacgaaagtttagttaaatcccggatcgtgtttgttgaatttacaatttgtaacaactatgaatctactacgactagaacgaattatgaaaatgtaagaataaataattttttgctacatgttttacaacaatataataatatatacatcaaatcgcaacgattggttggttttgcttgaatgccgaaatccgtgttaatggtgttaccctgggaatatgtatactaacctgtgttattcaaatgtacgacaagatatccatgacataatcgcctgaaaaactgatccgaggttcgattttccatagtagggtcagtgttcccttagtggacagtcccctatagtcgcactagtggattttaacggccgttttttgacatgaaggtcaggagctatttatctaagtaccattgatacacagcttgattttgtttaaaaaatgatcgaaataattagttttgcttaaaattt

SEQ ID NO: 221 - DNA, 2041 bp, Aedes aegypti
gtgttgtgttaaaggatttcggccgtgaccagaaaaactttcgaactcaattatcggagctggaattctatatttgagagtttttttttcctcgagaatggacccgccgtcatcagtggctgcgttgacgtcgtcatcgcgatcgcctgcagacgatcaacaacttgtagacaacactggtgaacagcgatcgatcgaccacgctaccgtggatgaaatgctcaatatcaacgcgttcacggtaccacgtgttcccagtgcctgtaatgatggcgcagtggaaaagtacaaactaaccggtaaaagacttggccgtggagtcgctgagtctggcttgacgcatgaatgcggtgtattcggagcgattgcaacgggtgaatggcccacacagatcgacatttcgcaggttatctgcctggggttggtagccctgcagcatcgagggcaagaatcggctggtatcgttaccagtgaaggcaaatgtgctaagaacttcaacgtccacaagggaatgggtatgatcaacaatatcttcactgacgattcaatgaagaaattaaagggtaatctgggtatcggtcatacgaggtactcgacctcagcggcttcagaagaagtcaactgccaaccattcgtagtccacacggctcatggagtgttggcggtagcacacaacggcgaactgctaaactgtgaaagcttgcgaaaggatgttctatcccgaggtgttggcctatcgactcacagcgattccgagctgatcacgcaagctctctgtctgaatccgccggacggagaagacgacggccctgattggcccgcacgcatcaagcacctcatgcagttggctcctctttcatactccctggttatcatgttaaaagacaaaatctacggagtgcgagatccctacggaaatcgacctttgtgcatcggaaagatcgtcccgctgagcattggttcttacagacaagaaaaagtagacaaactggccgccgagggatgggtcatctctagcgagagctgcggattcctatccatcggagcacgctacgtcagggaagttcaaccgggtgaaatcgtagagctgacccgcgaaggaatcaaaacgatcgacatcgtcgagtgtccggagaaccgacgccacgccttctgcatcttcgagtacgtctacttcgctcggtcggattccatcttcgagggtcagatggtttactcggtgcggttgcagtgcggcaggcagctagctcgcgaagcgtacgtagacgcggacatcgtgagctcggtcccggaatcgggaacggctgctgcgcacggttacgccagagagactggccttcactttgctgaagtgctctgcaagaatcgctacgtcggacgtaccttcatccagccttcgactcggctccggcagctcggtgtggcgaagaagttcggtgctctttcggagaatgtttccggtaagcggctggtcctcatcgatgactccatcgtacgtggcaacaccattggaccaatcatcaagctacttcgggacgcgggagcacaggaggtgcacatccgtatcgccagcccaccgttgctgtatccgtgctacatgggtatcaacattccgacgcgagaggaactgatcggcaacaagctgaacccggaggaactggccaagtatgtcggtgcggacagtttggcctacctcagtgtggaaggactgcagaaggctgttcagctgaacatgcggaagaacaacccggaaaaggtgggccactgtacggcctgcctgaccggagactaccctggtggactgcccgaagacttggattggtgaagcgggagaaggatttttctttccagtttacttttttatgttatttaaagtttcgtcatgaaaactatgtcatgacataattgattcgctatcggtcatgggatagagacgtattgcctacatttaggaacataaagtgaaaaagtccgatctgagatctataatgactattttatagaaagactatatgaataaaggctagaatttactaaacat

SEQ ID NO: 222 - DNA, 1593 bp, Aedes aegypti
ctcaagcaacctcccggttgctcctgctggcagctattgccctattaccagcagccctcggtggatcaccatttatgcactctcgccctagaaccatcacacgaactgttagttccaacatcactctcgatgaaccgaccctcgcaaatccatacctggccccgggcggaaaggaagcccttggcacgaaacaagtgtcggattttagccttagccaaggcaagaacgttttcgatgtaatctaccagtggaagattatcgatttcttgtacccgagcctgcaggctcgcaacgatgccattcgtactaaacaattcatcccggagaacaacctcccgctgggcgttgatcgcttccgcaaccgcatcttcatcaccacccctcgctggaacccaggtgtaccggctaccctgtcgtacctgcccctttcccgttcaggacccaagtctacctctgatcccctatccagactggagtttccatacgtccccccaaaaccccgactgtagtcgtctcgtatccgtgtatcgtatctacgtggatgagtgcgatcgcctttgggtcctcgacgccggagttatcgacacccttaccaacctccaacagatctgtccgccaaagatcctagcattcaaccttcacacagacgaactgctgttcagctacactctcccagcggatcaggtcaaacaggactcgttgcacaccaacatcgttgtcgatatccgagacgctcagtgccaggatgcgttcgcctacgttgccgatgtgtggcgctacggaatcaccgtgttcagcttgcgggaattcaagagctggcgcaccaccaactacctctacaacccgaatcccttcgccagtgactacaactacaaggagctgaacttccagtggtctgatggagtgttcggaatgtctctttcgcctgtccatagaaatggcgatcgcatgctgttctaccacccgatgtccagctacacggagttccaagtaccgacctcggtcctgcagaacgaaaccatctggcagaacttcggtctggccaaggcattccaaccggtgggcagtcgcggtaaggccggtcaatcgtccacctccggagtcgcccacaacaacgtgcagttcttcacccttgtgcagcagagtggagttggctgttgggatctggccaaaccgtacaaccgcaataacttaggtgtggtcgagaaggacatggacaagctgacgttcccgaatgatttgaaggtggatcgcgagccgaagcaatcgctttgggtgatcagcaacaagctgccggtgtttttgtactcgcgactggactacagcgaggtgaacttccgagtgctgaacgccggagtgcaggaagcgattaagaacaccgtgtgtgatccacggatgcctccgagcttggcctacgaaaaggagccggagtgcgatgtgtagagatttgatttcttttatgtattttgatgtgtaagttttactactgttgataagagttgtctagagtaaggtttaagttttgattcagccgtgctgatatgataatagtaaatccatgctcgaccagtgaaaataaatgattcaaagaac

SEQ ID NO: 223 - DNA, 1394 bp, Aedes aegypti
tgcggttctctcctcacacaagtctagccgaggaacaggaacggttcttcactgtgcaaatttatctcccctcggaaaagtagtcaccggatagaccgaaaaaaaatgtcagaaccaagcaaggacgaactacgcaaggaaattgccgccatcctgaaggatgccaacctggaggaaacagccgccaaaaaggttcgtctccagctggaggccaacctgaagtgtgacctgtccgcccgcaagaaggaagtggacgacctcgtcatggagtacgttaacgcacaggacgaatccggtgaggaagaggaagaggacgaggaggaggaagaggaagcccccaaaaagaagcaatcgaagaagaagaagcaggaaagcgaagacgaggaggaggaagaggatgaggaagattccgaagacgataagaagaagaagggcaagcggggtgctccggccaagcgaggcccggccaaaaagaagaagcgcggatcggacagcgaggaagaatccgaaggatccgacgggggttcggacgatgactacaagccgaacaagggtcccaaagccggagccaagaaggctggtcgcaagaagaagggttcggattccgattcggacgaagactggaagcgatcgaagccggccaaggccaagaaggcccccggagccaagaagggcaagggaacgggcttcactcgtccctacaacctatcgccggaattggcagctatttgcggagctgatgctctgccgaggcacgaagtggtcaagaaggtttggaccatcatcaaggagcgcaatctgtatgacccgaagaacaagcagtacgccatctgcgactccgagctgcagaaagtcatcggcgtcaaacggttccgcacattcggtatgctcaagtatttgaaaccgcatttcctagattaggatgggaaatctacatgatcctttcctgcttcgcgtaattgtaaaattgggggacttcttccaaatcaacctaataactgtgcaaaaattcacacgggatggaaatcctccttactctgtaggttttaagcgaaggacgtgtaagctgatgacaagatatgccgttcgttaggatcaattgatcctaagcagggcagaatcctacgaacctgggtatagaagatatatcctaattcaaagtatatttttaacattttcaataaccaatatcagacgattaataaacaaaaaagaaaacggataagtaagcaagatggcagaaaatcgatagatgataaattagagtgttaattttaagtgtggaagtttgaacgaccatataacgacgcaactatttcgtttaactgtgtaatgggaaaccgtggtaatcgcgaatttctctgagtaacaaaaataaagtatgaacaaaccgg

SEQ ID NO: 224 - DNA, 1630 bp, Aedes aegypti
agttgaaaaacgtcgttctaaaatcaagtgactagttacagtaatcgaccttattagaaagttaagccctataaagatgcctctatgtaatcataaaaatatgtccggcaatgccaagctgttgcacgagaacctctgggagtcggacccggagctgatggacctgatccggaaggagaagaaacgccaggtgcacgggctggagatgatcgccagtgagaacttcacctcgctctcggtgctgcagtgcctgggatcctgcctgcacaacaagtactccgagggattgcccggacagagatactacggtggcaacgaattcatcgacgagatcgaattgctggcgcagaaacgtgccctcgaagcataccgcctcaacccggatgaatggggctgcaacgtgcagccgtactccggttcgccggccaactttgccgtctacaccggactgatcgaaccgcacggtcgcatcatgggcctggacctgcctgatggtggccacttgacgcacggattcatgaccgccaccaagaaaatctccgccacgtcgatcttcttcgagagcatgccctacaaggtggatccggtgacgggcctgatcgactacgacaaactggaggagagcgccaagaacttcaagcccaagatcatcatcgccggaatctcgtgctattcccggtgcttagactacaaacgcttccgccagattgccgacgccaacggtgcattcctgtttgccgatatggctcacatctctggattggtcgctgccggtgtcatcccatcgccttttgaatacgccgatgtggtcagcacaaccacacacaaatcgctgcggggaccccgcgccggagtgatcttcttccgcaagggcgttcgcagcgtcaagcccaacggcgacaaggtgatgtacgatctggaggcaaaaatcaatcaggctgtgttccccggaatccagggaggaccacacaaccacgccattgccggtattgccacgtgcatgctgcaggcccggacgcccgagttcaaagactaccagacacagatcatccgtaacgcacaagccctgtgcaagggtctgctcgagcggggctactccatttcgaccgggggaaccgatgttcatctggtgttggtggaccttcgcccggctggcatcaccggagcccgtgcggagtacgtcctggaggagatttccattgcctgcaacaagaataccgttcccggagacaagagtgcactgaacccgtccggaatccggttgggtacgccggcgttgacgacccgaggtttggtggagtctgatatgacccatgtggtggacttcatcgatcggggactgaaactgtcgaaggagattacggccgtctcgggtccgaagctggtggacttcaagcgagtgctgcacgaggatccgacgctgaacgctaaggtgcaagctctaaaggaggaagttcaggcgtacagcgcgaagttccccatgccaggctatgaggagttctagaggtttgttgggaggtttttagatctgtaaggactgtgtccgctgctatgaccaatactattgaatatattcatcacttttttcttggcatacgaaaggtgctattgtatgctacatacctatgaa

SEQ ID NO: 225 - DNA, 1859 bp, Aedes aegypti
  misc_feature (1333)..(1858): n is a, c, g, or t
gaagaagaagttaatccagcgtaaattgctattcgggcggatttggaactgcaattttgcagtaatatctggattttatgttaaagtactgctattttccatcatgagtggcacttgagtagtaattgatttaatgataatcgataatagtttaaaaagttcaaaaaaacgaccatatcatcactcaaagtggttgtacccgagtgctgtatcgcccaaatcgaaagtcgctcttggtttccgaaaaagcgttggaaactttccaagcaaacctcgcgggaaaaaaagcgaagtgcggagtgaagagagtacaaaaagctgcaagcgaaagccggtgcataaaaccgtttgttaaaggattcctgcctgtggcctgagaaatagcgtgtgttgtggaaaatgtctcagttcaattatctcaatgagctgaacaatataatcacaatggacggcgaactgacaaaaggacccgctcctcggtggcaaaaaaagatggatctttcggcagcatcatcgagtttcaacgcaagctcaatgaacacatctcgccagaagctgtcggtttcgttcaacggccagcaaacggttccgcccgggacgcttagcgggaagaccccgagtaaaaaacccggaggtggatctagcaccaagaaggaaggtaaatcccaaacgccaagtcaaaagcaaccttccggcggggacagattcatcccgaaccggacgactacggatttcgacctgggtcactacatggtgaaacagaacgaagccaggaaggaaaccgaaggcgacggaagcggcgaagatgggcagcagcagcagaacggaacgaatccgagccccaagaatgccgagcgcatcaagattctatcagaagcagtcaagggatgtgatataagcaacaaacggattttgtcctaccagacaaaagcaccggcagccccggaaggacacatgaaccccctcaaagtggtctactcggtgaagacgcccatgtccacgaaaagtggttcccgcttcattccgaatgcaccggagcggattctggacgcgccggacatcatcaacgattattacttgaacctgatggactggagcggggacaatgtggtggccgtggctctcggatcgtcggtgtacctgtggaatgcggccagtggcaatatcgaagtgctgtacgagaatgaaggcggtgatcatgcgtgcgcactgagctggattcaggaaggacacatactggccgtcggaacgtctacgggcacagtggagctgtgggattgcgaacagatgaagcggcttcgaatcatggatggccattccggccgggtgggannnnnnnnnnnnnnnnnnnnnnnnnnnnnnnnnnnnnnnnnnnnnnnnnnnnnnnnnnnnnnnnnnnnnnnnnnnnnnnnnnnnnnnnnnnnnnnnnnnnnnnnnnnnnnnnnnnnnnnnnnnnnnnnnnnnnnnnnnnnnnnnnnnnnnnnnnnnnnnnnnnnnnnnnnnnnnnnnnnnnnnnnnnnnnnnnnnnnnnnnnnnnnnnnnnnnnnnnnnnnnnnnnnnnnnnnnnnnnnnnnnnnnnnnnnnnnnnnnnnnnnnnnnnnnnnnnnnnnnnnnnnnnnnnnnnnnnnnnnnnnnnnnnnnnnnnnnnnnnnnnnnnnnnnnnnnnnnnnnnnnnnnnnnnnnnnnnnnnnnnnnnnnnnnnnnnnnnnnnnnnnnnnnnnnnnnnnnnnnnnnnnnnnnnnnnnnnnnnnnnnnnnnnnnnnnnnnnnnnnnnnnnnnnnnnnnnnnnnnnnnnnnnnnnnnnnnnnnnnnnnnnnnnnnnnnnnnnnnnnnnnnnnnnnnnnnnnnnnnnnnnnnnt

SEQ ID NO: 226 - DNA, 1659 bp, Aedes aegypti
cttgcagacacctcaggagagcttaactttctcacccccaactcggccaaggacatccagcgcgagttcaccgccggtatcaaggaacgttgcaaaatcccggtgatcaactgccaggcagtgacgaccgtgttggatcccgtgacaggaaacatcagtaccgttctcacgacgacgtccccacaggcagaaacggccaccacggcggtcgccagcaagaagcccagctacctgaatctggcctgctgtgtgaatggctactcgaatctgacgacgtatgattcgaagctgaggcaggacatcaacaagtcccgagaagtctcgccgaatcggccgatcattgccacgctgcactacaatcggtcggagggtggcaatttccagctgaccgcacccacgcttagctacattagtatgaacaatactatcaataacaacgttagcaacgggggcaaattcggcggaatggtgaacggagcaggacggtttgtgggtagcggcgggggagctgctaccggacaggatgtgacggataatgccatgttcaatgggaatggatttggtggcggggggctgaggaccagagtgatttcttcgcagtcccaaattagcagtgtgaaggaaaccgaaagagtgattaagaagagcttcattcagcagcgtgtcgaaaagctgtatggtaacgcggaaggtgtagtgattaataagcaaatctacaacagcaatgagaggaaatatttaaacaacattgccaacgaaaatgtgagcaaaaactacaccaatgcgctgcatctgaatgggaacggaaatgtggccaccaatggagatatggaagcgctgccggtgttgcggcatttgaggcctgagttccgagcgcagctgcaaatcttttcgcccaaaaaagttcccaagacatcgccgagccgcagctctactacagtgacatccaccaaaaccaaaaccatcaaagcggcttgcattgaatctcagtccgaaccgtcactatcagtggtcaagacgacagaatctgtgacgtccggtatcagcagtgatgcaacaattgctccccttcacgataatagaaatggaaaccactttctgcaggtgctcaaaaacgaacagaatcggctactcacaatggcagccaacattgagagggacgtcgaacagtcgaaggccgatggtgtggagatcagcgaggaagtcgccggttacgtgctggtagctgcaggcaaggcacggctgctatgttcccagaaaatgaaacagttcgaaggtctgtgctacagcaatctgaaccaatcgcccgatgaaaagttccaaacgacgtgcgaggatttgcgtggtttctgggatatggtgatgttgcaggtcaatgatgtggatgcgtccttcagtgagatcgattctttccggagaaatggctggaagaaaccgacacccaaaagtcccaccccacaagtacgcagcactgcgcgaagtaccaagcttacgaaacggcccttcaagtcccctgccacgacgtcgaccaacggaaccggtaactcggcggacggttcagcagccgatacgaaaaaagctgctgctgctgcggccgccgccaaacgcgaagcccagcggaaacagctgatggagctaaagcggaaacagaaactcgcc

SEQ ID NO: 227 - DNA, 606 bp, Aedes aegypti
atgttgttgcaacattaccaccaccactcgtcatcgaatcgattcaacaacacgaacgcacgcgcccatcgttcttcttcccctggccatcgacatccagtccgcagcctgtgtgatacaccggaccgagaggaatcagtctttgtccacgaccagcacccgtcacatcactcgcctcccacaatgttctccgccctgatggacgccgcgcgcaattcgcccttcaaggcccccttcagtcgggcccagtgcgatgccagtgagaaatcgctggtgccctcgggtgaccgtaccatccaggccgcctccaccaaggaggtcgagttcggatccaacgaattcttcggactgtgcgccctcggaggtatcctgtcgtgcggtttgacccataccgctgttgtgccgctggatttggtcaagtgccgtctgcaggtcgatgccgccaagtacaagaatctgttccacggcttcaaggtcaccgtcgccgaggagggcgcccgcggtctggccaagggatgggctccgaccttcttcggatactcggcacaggtgagtgcagtttttgagcacgtgattatttatacccgagcaaggaaagaaagctaa

SEQ ID NO: 228 - DNA, 2530 bp, Aedes aegypti
atggagtctgaaaatgtggcggacgtttccatcgagaaaaagtcggcttctcgggaagtgagtcctagcggaagtggcgccggatctccgaggaagtcgcgttcgcggtctcgttccgtatcacaggcgggaagtcgttccggtggcagtcgcagtccaagtgccgaaaaggaagccaagtcccggtcgaggtcccgttccaagagcaaggaaacatcccgtagtcccagtccagccaggtctcggaagtcccgatcacgcagcggaagtgccgacgtagtgaacgaaagtgcagattcgggacggagatcgaaaacaccggaagagagtccggttaagaatggtgaccggtcccggagtggttcgccggtggcggaaaggaaaagccgcagtcgcagcgtaggttccaatcgctcgaagcgatcgcgttcgaagagcgcggagaaagatgcggccaaatcaaagtccagatccagatcgcggtccaaatccggatcgcgctcgaaaagccgctcccgttcaaagtccggcagtcggtccaagtccagatcgaagtcccccgcgcgggctaagtccggatcgcgatcgaagtcacgatcccgatccgggtccagatccaagtcccatcgcgttcgcgatccaagtctggatcccgatcgagatcgaggtcacgctcgagatccggttcccggtcgaagtcacgctcgcgaagtcgaagccgttcgggaagccgcagtcgtagccgaagccgaagcggttccgctagatcacgttcccgctccaggtccagatctaagtccggaagccgtagtcgcagtcgctccagaagtcgcagctcgcgtcgtagtcgcagccggagtcgaaagtccggttccagatcccgttcccgatcgcgttccagatcgcgatcgaaatccggttccagatcgaggtcccgctcgagaagtcgcagtcgctccggaagccgtgcaagttcggccaaacgcagtcgaagccgcagtcgcagctcaggaaagtcacgcagccgatcccgacgatgatggcgttgagaaaacgcccaagaagcgagccaagatcaccgattccgatcacgaaggggaagatctggaggaggaggagcaggtcccagaggaagctaaagctgacgagggtcaagaagagccacaaaccagtacgatcgtggacgcgggagattcggaagatgaaggaatccgcgaggacggaggcggtggcgacttcgttaatgacttcgagttgatgttggcccgtaaaaaggaagaaaagggcaaacgtcgcaagcggaacgacatcgacctgatcaacgataacgacgatctgatcgcacaactgctgcagcaaatgcgtcacgccgccgaggaagatcggcagctgaacaaggagaacaaaccggccaccaagaagattgcaatcctcaaacacgccatgtcgcagctcatcaaaaaggacctccagttggcgttcctggagcacaacgtactcaacgtgctgaccgattggttggccccgttgccgaacaaatcgctaccctgtctgcagattcgggaatcgattctgaagcttctctcggatttcccctgcatcgagaagtcctacctgaagcagtcgggcatcggcaaagctgtgatgtatctctataagcacccccgcgagaccaagtggaaccgcgagcgggccggccggctgatttcggagtgggcccgacccatcttcaatctgagcacggacttcaaggcgatgactcgcgaggaacgccgagagcgagagatgaagcagatgcccaaaaagcgcaaagccgcaccggaacagtccggtcagagcagttccacctccaagaagggattgccgttcaccgaggcggataagggtgctcttcgaccgggagacaaaggctgggtgcaacgggctcgtgtccccatgccgtctgataaggaatactttgtgcggccacagtcgactagcgatgtcgatatgagtcggatcaccaagaaaaagatgaaccgctacgagcagcatctgaagaagtttatcgacgccaaacggctgaagcaaagtcggcgagccgtggagatatccatcgagggtcggaagatggcactctaagttcctccagttcctcgaatcgtgtctccattaagtgtgtaggtaatttttgtaatgatcaatcatgagtacgactggtcagccagcaggtacgtatgatcttcgtttgaaaaatccttttttcattacacatcatagatatttaactaagaatgctaaatagaaacatcaccaaaaccaccttgaatgcgactaagatccacagaacttgacggtggcgctggtggtgtcctagtaattaccggtaatttaattcccttccatctggttgttaatttcgctgatttgagttgacgcatagatacaatgaagaagacttgattttatgtttccaaactagacaacaaaaagaagccaggataatgcaaataaatgcactgaactacatccaattgtatgtatcttgaac

SEQ ID NO: 229 - DNA, 4633 bp, Aedes aegypti
atgtcctccagctggaaaggatttattttcgcttcggtgctgctgctgggagttctcaaattggcactagcgcaaagcacgacgcaagcggcggacaccggaggtggtggcactagaggttcacctttatcacccacaagggacggaggaggaggaggacagtgcatttggtatggggtgtgcaacaacgaaacggcactcacctcccagtactgcagctacgatggtcctgcaaagccagccagcactcaaaccaaggacctgctgaaggtctggtgtaagcatctgctggccgacgaggacggaaatggagccgtcgatacgtgctgtgatgccgaacaggttcaaatccttaacaacaatgtcaaactggcggcgaatttcctcgcccgatgtccctcgtgtatggccaacctggtgcgacacatgtgcgattttacgtgcaatccgaagcattcctctttcatcgaggtgaaagcaaccgagcagaatgataacaccaagaaagaatacatcaccgaaatcgatctgcacatcatggagcagtacatgaacgggacgtacagctcgtgcagtcaggtgtcggttccctcgaccggtcagctggcgctggatctcatgtgcggcgagtggggtgcctctcgctgtagcgctagaaaatggttcaactacatgggcaccaaggaaggcaactactacgtacccttccaaattaactacatcgcccatcagagcagcaatgacagtgcgtttaccccgctgaagccccgggtcgtgccgtgcagcgagaagctggatgacaaaacacctgcctgttcgtgcattgactgcgaagcatcctgtccgcgaccaccggccccagcgcccccaccacagcccttcgtgatctatggcttcgacgggtacgccgtggttatgttctttgtgtttctggtctgcagtggacttttcgtgatcggcgcatgcctctgccagtccgggagcaacaacggagccgaactactggtgcctggagacacattgcactcggacctgcgctcaaccgtgggtcgccgtttggctggtggactgtctaacagtggcgatttgggtaccgatcgcgaagattcgcccttacaatcgaaaagatcgagtgccacatgggatggcgagcaggagctccgaccgcacccgaacaccatcaacggcgatgacgacgccgaatccggatactttgagcggctaggcgccaaaacggaaaccgctctggagaagttctttaccgcctggggtacaacctgtgccaaacatccgtggatcgtgctgctgtgcggtcttctgttcatcgtggccatgggattcggaatcaaattcctgcacatcaccaccaacccggtcgagctgtgggcatcacccaactcgcggtcccgtatcgagcgggaatactttgactcgcactttgaaccattctaccgaatcgaacagctcatcatcaaagcggagaacctgtcgaacgttgtgcacaacacttccaacggggtcatcgagtttggtccggtgttcaacaagcagtttttgctggacatattcgagctgcaggagtcgatcaagaagattgaagcaactacggcagacaacaggaccatcggattgcaggatatttgctatgcaccacttactgcggagtacagaggacctactcagacggaagactgcgtggtgcaatcgctgtggggttacttccaagacgatatcgacacttttgatgccgaagatgaagatccacagggattcccggtgacttatcttgataagttgatgcaatgcttcggcaatccttacaatccggaatgtttagctccctacggtggtccggtagatcccgccattgctctcggtggcattcctcaacctgcctcagcggaagtgaaaccaaagtatgaaaatgcaaatgccgttatattgacgttcctggtaaagaactaccatgacaagagtaagctctcggctgcactgacctgggaggagagttatgtggccttcatgaagaattggactaaggctaacatgagcatagcattcacctcggagcgatccattgaagacgagttgcgacgagaatctcagtcagacgtttcgactattctagtctcgtatatcatcatgtttgcttacatcgctgtttcgttgggacacgtgaatcagtggagtcgagcgcttatcgattctaagattacgcttggtcttggtggtgttataattgtgctggcttccgtcgtagcctccgtaggcatattcggttacatcggacttccagcaacgttgatcatcgttgaagtcattccgttcttggtactcgccgtcggtgtagataatatatttatcctggttcagactcatcagagggacaccaaaaagccaacggagacccacgctgaacatatcggacgaattctcggccgagtaggaccatcgattctgctgacagcggtcagtgagagctgttgcttctttttgggtggcctttctgatatgcctgctgttcgtgccttcgctttgtacgccggtatggccttactgattgactttttcctgcaaatcacctgcttcgtgagtctgctggcgttggacactgctagacaagctgacaatcgttacgacgtgctgttcttcttgcggggatcgaagaaggacgtccctgtgaatgccaacaaggaaggcctgctgtacaagttcttcaagagcatctacgtgcctttcatcatgcagaagcctattcgggtgggagttatggtcgtattctttgggtggctttgctggagcatttccgtggcgcctcacatcgacatcggattggatcaggaactctcgatgccgggagacagctttgtgctgaagtacttccgatatctaggaaagtatctcagtattggacccccgatgtactttgtcgtgaagagtggactgaattattcgcaaccgtacgatcagaacttgatatgtggcgggcaaaactgcaatctggacagcttgtccacacaggtttacattgccagcaagcggcctacggagacttacatcgctaggcccgccgcttcgtggctggatgattatatggactggtcagctgcgtcagattcttgctgcagacagtttggcaacggatcattctgccctcatgatatgacttgtgacaagtgttcgataaacctaacatcctggaaccgtccgaccgagcccagcttccgaagatacgtgtccttcttcctgcaagataatcccgaccccagttgtgctaaagccggtcatgcagcctatggcaatggagtaaatctcaaacagcaactggccagtacgtacaacgatgtcggggcttcgtactttatggcatatcacactatcctgaagacgtcctccgactacttcgaggcgttgcgatcggctcgaaaggtttccgccaatattaccagcacgattcatgcaaagttgcggctcgaaggacgcagcgagtcggaaatccagcaggttgaagtgttcccctattcggtgttttacgtgttttatgaacagtatttgaccatgtggccggacacgctcaagagtatgggcatttcggtgctggctatcttcatcgtgacattcctgctaatgggcttcgacatccattcatcggtggtcgtcgtgataacaattacgatgatcgtgatcaacatcggtggactgatgtaccactggaacatctctctgaatgccgtgtcactggtgaaccttgtgatggccgtcggtatcagcgtggagttctgttctcatctggtgcacagtttctctgtttcgctggaggaaacgcgggaaaagcgagcagccgatgcactgaccaaaatgggcagctcggtgttctccggcatcacgttgaccaaattcggtggaattctggtgttaggcttcgcccagagccagatcttccaagtgttctactttaggatgtatctgggcatcgtgctgtacggtgccgcccatggtctcgtgttcctgccggtactgctgagctatatcggcgcccccatcaacaaggtgaagctggccaaccatcgacggcaggcactgcaggacacacaggaaacctctctctcaaccgtaagcaaaccgctccgtactagttctagttgtttttgctatgattgttgcactagaaccattatccatccgacgacggacccattgcttaagcgcaccaactcggtactagaatgcacggccactgttagcgataatattggtatgaagagcatctgtttggcacgttcccccaaaagtggcactcaaccgtccgacggtcatcggcggtactacttcggaacgttgtctgtacatagtgatggcacaagcaatcatttatcgggtagtactaggaggaacggtaaaactcggatcgggttggtgaacttctggcaacgagtagtgcgtttatggagcggcaacactttccatccggccagcaacaacacaaactactcgaatccggattactacttgggggcgacgctaaagctttaattgtgcactctgattagtgtgtagtgtagtactagagtagagtcattattcaaccgtggtaatcattatcattttcatttaaatgtgtattaacaggatc

SEQ ID NO: 230 - DNA, 901 bp, Aedes aegypti
attttccaaccacaacgaacgagacgctgttagcaatcgggaacaatacaaacaattcggaaaccgtattttaccggtgaaaaactagtggaaaatagtcaactggaaaccaaaacgatgtcggcctccactggcaaggttgtgatcccggtggaatccccagcagaacaggaggagcatctgaggaacgcacggaagctgctgaaggacgtacagaacgtgccagccatgaacaaggagaacgttggaaagctgaacaagcttccgatgtatttgtcgcaggctcacaaggaactggccaagaaatcgctgttctcagatgcactggagtcaatcgagctcaaacggaagaagacgacaacggttcagtcccagtccagtcagacatcgccggagaagaaacccgccacggtaacgaagccaacaatcaccgctgaagacctcacatccctggagggacccagtgagcagtactgggaagtgttggccgaaagacgacgactggccctggaagaatctctggcggagaatcaggagctgtacgagaaggtcagctcgctggaagaggagctgaacctgtcgaaggagatgctccaggaggctcgcaatctggtggaggtgctgacggagcttctgcaggagggcgaagcggaaaaggaagaggcggctgctgccggtagtagtaaggagggggtcaagcaggtagacgacagtggcgtcgctccggagcccgaactacccagcgacgacgaagatctgtttccactgtttcgttgccaccggagcggttagtcgccgtgaataatctaacagaagtatatttgtattaattataactgtacgcgaaatgtggaaaagttataaaacaagaaataaatattaattaagcgacctctttttc

SEQ ID NO: 231 - DNA, 2290 bp, Aedes aegypti
ggctaagtgttggtgtctgaagcggcttctaagtgctttgttacctttagtagcgtaataatttgaaacggattaattttgttatggtgaataattagtgcaaaatgccgaacgaattcgatgcaagcatggataaccgactgcggctagaaggagatgaagtacccgatgcatacgattacgggtacagtgggaaccattcgtaccaccaacagcacccaccgcccgatggcagcaacggaagctcctgtggtggggacgctgtgatgatcaaaatcgatgtcccttcgccggcgcccagtgaaccgcgctttccgaaagaaatttggaaaacgttcatagctcttctcatgctaggcttcaatttcgttttggccacagtttcacttgccatggttcacgatcgggtaccgaatcgcgaaacctatggacccctgccggatgtagtgctggacaacatccgccctttggaatgggcgctcgacgtcagcgaggtcctaatcatggtggtggtgaattcttgcgtccttctgatcactttccacaagcatcggttcatagttatgaggagggttttcctgctgatgtcgttgctctactttatgcgatcgatcaccatgtacgtgacagtactgccaatttccagtacctcgtactactgcagcccgaagtcgaacgcaacgacgacgttggagatcatgaaacgtgccttccatctcatttccggtttcgggttgtcgatcaatggcaagcacacctactgcggcgactacatttacagtggccacacggtgacgctggtgatgggctatctgatcattgctgaatactcaccaaagaagttttggattatccactggcttgcgtggtgtgccagtttgacgggcgtatcgatggtgttgcttgcccacggtcactacaccgtcgacgtgttgattgcatactacgtgacgacaagactgttctggacgtaccacactctggcgaacaatagtcttctgcttaagcaaaacggccacaactatatcggccgcgagtggtggttcttcatcttccggtacttcgagaagaacgtacgcggaccggtaccgctgcagtatgactgtccattaccgattccatggacgaaaagagcgctcaaactgccaaaccgggacagctgatcatgaactgccaccacagaagctttgctagcagacacaagcgaagacatcacagcacacttcagaaggacaacgtggctcagtggaagccaaagcaatagatagtaggtagtgaaccaccgtgtttagctgtttgtagtttaaaatgaaaaaaaaaacctatatactaatacacagtagatggtagcgaaacgaaaagtgtaatgtatgaccatcgaaaaacggaagcagcaaatccaaaacgcataagacttgattatgatcctatttttttaggagttatcgtaagtgtaccaatttgttttaagttgtaaaagtatttagccaattgtcgttccaatcaatgaatgaataactcgtgttgatatttcttttatgtagaaacagtttgtaaataacgaaccatattggaaaaaaataaagtttaccgatttttggtgtagttttaaattgttgtaagttaacattgcttgaataaaaaaaaactgaaacgcaaaatgggattcctgacctctgaaaccaaaactggcagccgaagtcttacttctagtcagttgcccatgaaaatgatagagtcatacaagatgccaatctagtactaacagtacaacaacagtaaggccgaatgcgaatgggcattttacacctaaagtacatcaatagaaaagaaaaatatataaaaaagaaattctaagctgccttcttaccatttagggaaccccgttttaaagagaattatgtatcgaacaccatgtgataatcagtagagacaattaaattttactgtagttgctaggataattacaaaagacacacatataaactcctgtaacaaacaaacagaatcattgatatcgggtagcatatccacttatttattttttgaaaatagggagaattaccgagaggaatttaaatgagaatagcattgatcttgaacagaacatgttactaactactttcaagttgttctgcgaataaacaatcagtgcatgtatcaatactaaccggaacaatcgaaattggcaagtcgtctttgctggtccattctagtttcatgtaagtgtgccttgaactaatcaattcggagcgaatttggaagtgaataaattcgaatatgtacaaag

SEQ ID NO: 232 - DNA, 654 bp, Aedes aegypti
atgcgaaccttttcgacaaaagcgagaaaattcccttgcccatgggatgggtgtgggaaatcgtatacaaaatcctcgcatgtaaccgcccacatgagagtccataccggggaattgcctttcgtatgcacttgggaaggatgtgatggacgcttttcgcgagcggaaactctcaccagacatttccggaaacactccggggagcgagatttcagttgtcccgtgtgcaaggcatccttccttagaaaagatcacttacgaggccatatgaaacgacacaacatagatcgttttctttctgccatagcctcaaaacagggtaacaaagcgaaacggaaacggaaaccttcgattccggcagccaattcgacgcgaaaccatgtctgtagccatccaggatgtgacaaaagctacactcgagctagtcatttgaaagcacacgaaattttacacggagaagttttgccctttcggtgtccctgggaagactgtggccggtccttcgctcggtcattcgaactgtcgcgacatcggaggcaacacacgggcgagaagaagttcgtttgccatatttgccagcaggcgttcatgcggagcgatcacttgtccatgcacgttaaaaggcacatatttcgagcggtcagtatattttaa

SEQ ID NO: 233 - DNA, 1479 bp, Aedes aegypti
atgtccgatgacgaatcgttcatagtgctcggctcgacgccgaccccatccttggagcaatacgtgtccggcaacgtccaacgtcaggaatcgctgccgggtaagacgatggccacttccgccgctcaaaccatctcgaacaatttcagtctgattcgaggggatgagtcactgaaatcattatctccgaaatctgttcaatcggttcaggggtccccaagtggtgtagccagcatgaacggaagcaacccactggcggccagtgtcatcatgggcgaaaccaagtccagcttgttccaaactttcccgagtctgatgaattcctcgatgcctctggacgaaattcaaatgcttcagcacctgatgaacgaacacggtcagatgaaggaaaacctccagatggccaatgtggccatgcggaagaacttcaccagcatccagaagtggcaggaagaggtcaaagccaaatacgcccatcaggttcgactgaacgacgaacaaaatgcgatcatcactcagcttaaggaagataacgataaactgaagcaacttgtcctcgccggagagactcgagtcgcagaacaggacaaacgtgccgccgagctgaagatttccctcgagaaagccctggacgaagtccagaaccagagccaagctgaacgggccgccgcccaggccgaactggacgagctgaaaaaagccctttcggaaaaggaatccatcgtgcggaatatggcccgggaaatcgaacggttggagctggagaagcaggaatttgtgctggttaaaccgaacaaaccggaagcggctgagaaagaggtgcaattcatcaccaaagaggaacacgaccgccagatcaaggtgctgcagcgggagatgtccgtcatcgtggcgaagaatttggagttcgaggacatgaaaaaggtttacatcgatgagctgaactgcctgcgagttaatctgaccgctgcggaggaagtttttggcaaaaatcgcgcccaactggatcgccaggccagagaaatcgaaaccaaagacgtctcgctggcggaaaacatccgtgaactgaacaccctggccgagcaggtggatgtcctcacggcgcagctggacatctataagaacgatttcgaagccgaacgcacggcacgggccgagttggccagcgaaaaggatcgcgtccttaccgacctgaagcttctccagaggcgtaaccaacaattgattgaagaagtgcagaacggaagagtggccgaggagaggacaactcgtgcggccaacgaatccctagaccgacgcgaaccaacgccacctcgagccagctcaagtgccgagggtgccactggtggtggtggtggcgctgctcgggaggaacaaacctacgatcgaccggtcctgtattgtcccctgtgcaaccagggctacagagatttggtcaccctgcaacaccacgtcgaagactgcgtcggcatcaattga

SEQ ID NO: 234 - DNA, 1598 bp, Aedes aegypti
cacaaatcaattttgaaccccattttcgaatcctacccctcgttcgttatttctccttttcccgaactctgacagttccgcttcgcacacgaaagcaaaaaagccgactctcgtggaaggaagaagacagtgcactgaaagacggcagacgtaaacatcgggtttacttgtgtaataccgttttataattttatatccaagtttttcttcgtaaaatagtgtagaaatgcgagaataaatcataaattcttttcaaaagttcagaacaaacataaaccgaaacgatggcacttcgattgcttatccattgccgggaaatcccagcgtttgtgcgatcgactccggtaaacttctgccagcggccgttgctgaacccgtcccagttcgctcaccggtccagcctgctccgatacagccgccaaatgcgcaacaacacccggggagaatcctttgccccgaagcagaccattgttccgacgggacttcagggcgctgccatcgaatccggaggttacattgacccgtcccggctgtggaagtcgtttgtctttacggtggcgtttagtgcggggagctttgtcggcgttacgatatgggagtacgaaacggttcgatcacgggcaatggatgccctgagggctaagttgaatctaaattggttccgggagcgcatgaaggacaaacggcgggaagtggaacagtggcggaaggatgttaacgggtggtggagtaagctgagcccgggagagcggatattcgcgccaatttgtgcgctgaacgtggtggtctttggattgtggaggattccgcagttgcagccgatgatgttgaggcttttcgcgtccaatccggcggcaaaagccgtctgctggccaatgttcctgtcgactttcagccactactcgctgttccacatagcggccaacatgtacgtgctacacagtttctgccacggtgcggtggccaccctgggccgggaacaattcctagggctgtacctgagtgcgggagtgatcgcctcgttcgccagccacgtgttcaaaacggtgatgcgccagccgggcctatcgctgggagcttccggagcgatcatgggcatcttggcgtacgtctgcagccagtatccggacacccagctgagcatcgtgttcctgccgatgttcaccttctcggcgggggctgccatcaaagttataatgggaatcgatctggccggagtgctgctcggctggaagttgtttgaccatgcagctcacttgggaggggcgctgttcgggatgttctgggcgtattacggcagtcggaatgtgtggccactgcgggagcacttcattggatactggcacgagtggagggggcctccgaaaaaataatccgtatgacggggtagataaagtaggtatttgacaatagggacggctcggaatggatcgccttcaatttaacgaagtataaaaatttcgagtgcgttccaactgcttgacaaaaacctaatttgttgagttgtgtgggccatgatttaattttattgatcagtttgaaactgtttgacacgtggcaataaaaaaaatcttgttttgttggccaattacttcgac

SEQ ID NO: 235 - DNA, 920 bp, Aedes aegypti
ttcaggggttgaaggaatccaaacaaccatcgcctgttttggaaggaaaaacaacaccggcagtgcattaaatagagttcgcgtgctttcgacgccgccaacaataacagtgacgacaagagcggcgacgtccaacacaatgcgagaatggctgaaaatctcgctgatgctgtgtacgtttggattctttcgggagatgcgtccctcggaaccgttcgttacggagtttctgtcgggcgaatggcgtgacattgaaccggagcaattgaaccgcgatgtgtaccccatcggcacgtacagctatttgggcctgctggtggtggtctttctcgtgacggatattttgcgctacaaatcgataatcatattttctgcctgcgtcggaatcgtgatatggtcattgctgctgtggaccagcacattggctgcactgcagtgcaaccgtggccaaatatctgcaggaggacagttttggattaattttcggcataaatacgttcgtggcgttggccttccagtccatcctgactgtggtggtcatttccgagtcgggcctgatgctgacgccacgtggccagttcaaagtttacggcggctacttcctggccctggctgcggtatatctcgtgccggcaactgtcagcagcgtgaggcactgtagcagggggaggaggtcaccggagggcgatagtggcattggcgatgaaagtggaaaagttgatccccaaatgatggcaacgcaaagcaaccggcagcagcagcgggtggaactcgaggggagcactcatttttaatcgctttgtaggtaattgttttgaaaaatgaaaaaagcttgttggtgcgatagcaattaggttaatgaagtgttacaatttgaacaaactgtaataaatcgtgatgtgcgcttgtgtttttagttt

SEQ ID NO: 236 - DNA, 1695 bp, Aedes aegypti
atgtttgtggaagatttgcggaaggatttctacgagcggctgatcggcaaacgggttctggtgattgtgaactacgacgtcgatgccatctgcaccagcaagatcctgcaggccctgttcaagtatgacaacatggtgtactccattgtgcccatcatgggttgcagcggtttggtgcgggcctataatgagaacaaagacgacgtgaagtttgtgctgtttgtcaactgtgccggatgtatcgatattctggagctgttgcaaccggacgaggacatgaccttcttcatctgcgactcgcaccggccgtatgacatatgcaatgtgtacagtgaatcacaggtccagatactaggtgcgccgaagagagaagaaggcatcccagaatacgaacagatttatcaggaaacggacgatgaagatgacgacgaaggcgatgacgacgacgaggtggacaacagcgatgaagaggaacggggctctcgagaaatgaaccggattcaacgcatcgagcagcagctgctgaaacgccgaaaaaggcgcgaatgggaagagaaacggaaccagctcatgtttgagtacacccagttcaactattatgggagaagttcggcgttgaccattttcgagctggcttggcgtttgtccaaggactccattgatctcctctggtgggccatcgttgggctgacggaacagctgctgatgggaaagatcgaaagcgctacttacacattggctacggaaagtgtccaatcgcatgtatctcgtctcaccaacaaggccagcgatcagacgatccaaacgtccgttaagattcactacgaaaacgatctccacttggcactgtataggcattggagcgttttggattcgttgaagtactccatctacccggcgtgcaaaatgaaactgtggacctacaagggcgagaaggtcatgcatgagttgctggtcgacatgggacttcctctggtgcaagccaagcagacattcaacgccatggagctggagctgcgcaaagaattctacgacaaattggaaaagttcgccgaaaagtatcacatgccggacataatctacggttcgttcatccttcagtacggctaccggaacaagtactccgccgcagattacgtctactcaatgctagccattctggaatctatcaagaaagaccgcacccctgaaacgtgcttccttgaatcgatggatgccctttcccggaacaacaaggacatcctcgacaatgggatcgatatgtgcaaaaccctgctggcggccatcttcaaacaggtccaaagctccctcgagatgcacgccgtctattcggccggaccgttcctttatttcatcctgcaggaggaggtttcgtttttcacctgtccgtacggtttgctgatgttggctcggttcttgctgaacggacatgtggccgtttcgcgaaatcgtcgagcgcgggaactacctctaattgcggtggcaccaatcgacgtgagtcgtggttattcgctgctggtcggtgttccacctgtatgcgaggacagcaagatctttttcggtagggctttcgaacaggcggctctcaaaagtggggccaccatttcgcaggactttttcgaaccgaccgtcatacagatacgacaggccgactgcactaagttcctcgatgcactgacggttttgctaggttag

SEQ ID NO: 237 - DNA, 897 bp, Aedes aegypti
ccgctacgtggcttgccgttctccactgaagtgctcaaaactcaacaaatcctcaaccagtgtgcattgaaaaaacgttcctaccacaaaatgaacccgaaagccgtgcttgtgttcgccctggtggccgtttccgcttccctctgccgggccagttcctgcagcaacccggaggtcaagtccagcttcttttccacttccgatgccaccatcgtcagccagattgccttcgtgacggaattcaccctgaagtgctccaatgccggagccgagaagctgcccctgtttgccgaagtcggtggaaagttggccccggttgtccgcgttggcgacagcaagtaccaggtcagctggaatgaggagatcaagaaggccagcagcggcaaatacaccatccggctgttcgacgaggaatcatttgccgctgtccgcaaggctcaacgcgccggagaggacatccagtcggtgaaggccctgaccagcgtggtcgtgagcttccccggtgcctacaagggaccgtggatcaactcggaaatcctggccaccggagttgtcggattcgtggcgtacgttgccttctcgacccgcagcaaactgttggcgtaaggaggatcattgcagtgcgcaagggaagagatttgagttttagatttatacgttcaccatcatcgtcgattgagcgttttttttcttttcgatttttttcatcgtgagcattttttgttgttttctcatacaagtagggaacttaatttaatttataaaaaaaataatttgtttgcatgaggaattagcagaaaccgatttattgctaacaccggacacatgttctagatgtgatccaaaaaggcttctcaagactggagtaaaagcgtgcgaataaaatgctaaatgacg

SEQ ID NO: 238 - DNA, 2594 bp, Aedes aegypti
atattgaagtcgtcgcagaggtgatatattaacgttgatcgctagtcgttatacagttgccttcagcctgttcttgggagttgaaatccccagtgaacaaccgtggttcaggaataactgagcagatgtgagagtctctgcaatgcaattcttagaaaaacattttcaaattcacggagaggatgctggaataccacgtctttcgaatggtgggtgcaaaattgatggtcattttgtttcagtcagtaatggtttcagacacaccgtgtatgggattaacttggcatgggcattgcgttacacacgttgttcattccttcgtccgttcggtcggtcggttcggttcggttcagctcgcgctctccctttcactccactttattggtggtgttgttacaacaaccattcaaccgcatagtcgcgcattcatgaatctcccgtccgtcgacgagagatccattaatgcgaatgagtctgtgcgtaggcagtctcattcaggcctttgatgggtccacctcatctgttgtatagggcttgtttttttttgctgctctcggtcgtcgggttgtattgtcgcggatgcaagattgtggaagcagtctttcgagtgtctcagaagtgatcggtccgaaattgtgattggttgaaaacctggaaccaagagagaagttcccatgagtgcagttttggacacctcaggagagcttaactttctcacccccaactcggccaaggacatccagcgcgagttcaccgccggtatcaaggaacgttgcaaaatcccggtgatcaactgccaggcagtgacgaccgtgttggatcccgtgacaggaaacatcagtaccgttctcacgacgacgtccccccaggcagaaacggccaccacggcggtcgccagcaagaagcccagctacctgaatctggcctgctgtgtgaatggctactcgaatctgacgacgtatgattcgaagctgaggcaggacatcaacaagtcccgggaagtctcgccgaatcggccgatcattgccacgctgcactacaatcggtcggagggtggcaatttccagctgaccgcacccacgcttagctacattagtatgaacaatactatcaataacaacgttagcaacgggggcaaattcgtcggaatggtgaatggagcgggacggtttgtgggtagcggcggtggtgctgctaccggacaggatgtgacggataatgccatgttcaatgggaatggatttggtggtggggggctgcggaccagagtgatttcttcgcagtcccaaattagcagtgtgaaggaaaccgaaagagtggttaagaagagcttcattcagcagcgtgtcgaaaagctgtatggtaacgcggaaggtgtagtgattaataagcaaatctacaatagcaatgagaggaaatatttgaacaacattgccaacgaaaatgtgagcaaaaactacaccaatgtgctgcatctgaatgggaacggaaatgtggccaccaatggaagtagtcacggcactgttgtcggcactggaggcggtggtgtgggttttggcggtggaacaaaagagaatctcgatgaaaacaataaggaaatagccgatgatccagatatggaagcgctgccggtgttgcggcatttgaggcccgagttccgagcgcagctgcaaatcttttcgcccaaaaaagttcccaagacatcgccgagccggtctgttacgacgacggctgggagcggcgctgtcagtctcaatggcaccaacaacaatcacatcattcccaacggggatctaagaaagaatggccatcactcgacgacggtggacgaggacaaggagaacgtcaacggcgctggtctggtgttggatgttgcaccagccaagacccaactcaaagatggaaaccactttctgcaggtgctcaaaaacgaacagaatcggctactcacaatggcagccaacatcgagagggacgttgaacagtcgaaggccgatggtgtggagatcagcgaggaagtcgccggttacgtgctggtagctgcaggcaaggcacggctgctatgttcccagaaaatgaaacagttcgaaggtctgtgctacagcaatctgaaccaatcgcccgatgaaaagttccaaacgacgtgcgaggatttgcgtggtttctgggatatggtgatgttgcaggtcaatgatgtggatgcgtccttcagtgaaatcgattctttccggagaaatggctggaagaaaccgacacccaaaagtcccaccccacaagtacgcagcactgcgcgaagtaccaagcttacgaaacggcccttcaagtcccctgccacgacgtcgaccaacggaaccggtaactcggcggacggctcagcagccgatacgaaaaaagctgctgctgctgcggccgccgccaaacgcgaagcccagcggaaacagctgatggagcttaagcggaaacagaaactcgccaacagccaacagaatgtggagatattcgttccgggggcagcagccaccaatggaacgacaccggttgcaactgctgatacgaatggtgcctcgtcaccgcccctagtggatgcgagttga

SEQ ID NO: 239 - DNA, 5596 bp, Aedes aegypti
atttgcgtctgtcatcagtaaagtgagaagaaaacgttcgcatgattttttttcttcactgtcgtcgtctgtcgaacccgcagagcagcagccagaagagtggaaatttgcagtcgtcgtcgcgttcgttgtccgtgtgcgaaaattattaaacttggtagaaagcttcggcgtttagtggctggctggcaagtaaatcgttccaaagtgatccagattccaatttccgccgggatcaatcgcgtccggagtgagtgactagtttcgccatcgagattggtaaaaaaatcgaacaacgacggaagaaaggaaaagaaaaatgtctggcgattgattcacgcctcggctcagccctccgcggtcagaagaaggcaaggcctgctgctgctggttgcgcctactactgctgctgcttgctgcaaatggttttttgaagtttcaaattttcgcttcgcgtgtgagtgtgtataaaatgcgaaaatccaagaatatgtagtgatttttattttcactttatgtaggcccaatgatatttaatttgtacgcatcctagtgttggaagagtgtgtgttgtaatctgctgttttcagtggaagaaaagtaaaacgaagggaaatattctatggacagcgttccaaagaaataaaaaggacttgcccaagagtccgtcagggaagaatcaatccttcggtggggttccgcaatcacgtctctgtcggccaccgtgagtttccttcagctcactccttttgttgctgccttgtgtgaacagccagcactgtgtgaagtggtgtgtatttggtatatattttttgtgtgcaatcgccattttgtgctccgacggacgacggaacgaagtgaaccaatcaaaacgaaagggaagaaagtctccagtgagggccccgtggccagaactgccatatccttcggatcgtctgcttccggccagagcagtgattggccacacgaaatcatccgcgacagggatcgttcagtgagacttgtgtacgtgaagttctacaagtagatatcgtggtgtccaacaaaacgtcatctcgttgggaggcgctccccaaaatatgctgccctagcttgggattttttcttatcggataacacaacgctcttgttcatcgagtattcgcaggatattacctaagacgatggactcttccgcagatctgacaggaacctaaaaaccccacaaactaatcggaccgatccggatccccagtttgacacagaagctgcatcattcacccacagtgaaaatgtgcagaaggtggacaagatctgatcaagttagtcatcctcccaatagtgacaatgcggtgcagtgttcagacgacgagttagtgttagagcaaaaatagcccagtcggcaccgagtggtctaatcaattagcaaacacatgacaataatcggaagagtggagtgtggaaaaagggtggcgtacaattcatcatcgccatcgtttgttttaacgccaaagtgcaagcaccagtaaagcaagaacataaacatcaacgctgctgtggctgatggtaccacagggtaccgaattcagattggaagaaggtgaataaatcgaagcaaagtgtgatccttggtagggaggaaaaaaagtgacgtgagtgaagaaagtgtctgtgtgcagaagcgaaacgcattattactcctaaagctgagtcttcttgcttccccgctgcagtactacttccgatagtagtatgcctataatgaggccgggaagcctgaaggatcccgagatagccgagctgttcaacaaacatgacccggagaagatattcgaagatctgcgcgaaattggccatggttcgttcggtgcggtctattacgcaaaatgcaatctcacgcgcgagattgtcgcgatcaagaagatgtcctacatgggcaaacagagcatggaaaagtggcaggatatcctgaaggaaattcgtttcctgcggcagctgaaccatcctaatacgatcgagtacaagggatgctacctgcacgagaacacggcatggctcgtgatggagtactgcgtgggatcggcttccgatataatcgaggtgcacaaacggcccttgaaggaagaggaaatatcggccatctgtgacggagtgctacgaggattgagttatctgcacagccttggcaggattcatcgagacatcaaagcgggaaacatcctactaaccgagcaaggtatagtcaaactggctgatttcggcagcgctgccatcaaatgtcccgccaacagttttgtggggacgccgtactggatggcaccggaggtgattctggcgatggatgaaggccagtacgacggcaaggtggacgtgtggtcgctcggcattacctgcattgaacttgcggaaaggaaacctccctacttcaatatgaatgcgatgtctgcgctgtaccatattgcgcaaaacgaggctccttcgttacaggctccagactggtccgatatttttcggagttttgtggatttctgcttgaagaaatccccaaatgagaggccaaattccagtaaactgttaacccattcgttcatgacgaggatacgatcgccaaatgtactgattgatttaatagcgagaactaaagctgccgttagggaattggacaatctaaactataggaagatgaagaagatcctaatggtggattcttgtgaaaccgaaagtaatgtcggggacgcggaagacacgccggatgagcagattggcggtgatagcagcaagagtaatagtataacctcggaacattcgttacattcggtggatcatcatggaggtgtgttacggaatgcatctaggcatcgaatgccgggcccaggcctgcccccgatgcacaacaatagtatgaacaattcgggcggtcgcgatgggctaatggtaggcgacggtctgaaccgaatgagtctgggtgtgagcggaggaagcggaggcagtggaatgggcagtgggggactcggaggaagtggctccggatccggcagtatgggtgctagtattgggtatcaaaattcgtcatctagtcccgttgtacctcatcatcatccgcatcataatcatgtgtcgcaggcggcagcgaatgcggttgccgagcatggtgccaacaattttgctactattaggacgaccagtattgtgacgaaacagcagaaggagcacatgcaggaggaaatgcacgaacaaatgtccggctataaacgaatgcgacgggaacatcaggcagccttagtgaagctggaagaacggtgcaaggttgagatggaacagcataaaggagcgttggacaaagaatatgatctgctattacatagtttcactagggatctagataaactttcgggaaagcatcagcaagaaatcgaccgaaggataaagcagaacaacgttgccgagaagaaattgtacaaagagatatcgacacggcaagaaggcgaccgcaaagcgttcgaattgcataaaaagaaggaatacaaagcaaacaaagaacgatggaagcgagagctatcgatggacgattcgactccgaagcggcaacgagatgctacacttcaatcccagaaagataatctgaagcaagcggaggctcaagaagagcagcgaatgctgcgagtacagaagaactacatcgatctggagatgcgaaagttccggaggaaaaagatgattcttctgcacgatctcgaaaaccaactgctgagagatgaactgagtaaaaagcaacagcagctggaacaagcccatggcatgcttataaaacaccatgaaaagactcaggacttagaataccgacaacagaagagtgttcacgctctccgagaagagcagatatcaaaacaacatgaaagtgagctgcgtaaccaaaaggagtacatggatagggcggaacgggagctgttgaggaggcatgcgctagaactcaagcagcaaccgaaaagtctgaagcaaaaagagctccaaatacgcaaacagttccgggaaacgtgtaaaacccagacgcgtcagtacaaggcactgaaagctcaaatcctgcagacaacgcccaaggaggaacaaaaagctgtgataaagaaactaaaagaagaacaacatcgtaagttaacgttattgggtgatcagtatgaacaaagtattgctgacatgctgcagaagcagagtttgcggctagacgaaagtcaggaagtcgaatgccatcagctgaaggatcgcttgcagtacgagctggagatcctgacggcgtaccagagcaagaatcggatgcaagcgcaggcgcaacgggaccgcgagcggaaggagctcgaagaccgcgtcagcgtgcggcgtgctctgctggaaagtaagatggagaccgagttgcaacagttcaaccaggaacgagcggagcggattcgtatcctccgggagcgacacgaaaagcaactggaggcgttcgacgaggaatcggcacggatgggcttcagtgcactggcgttagccgaagcttctaaagaaacctacccggacgaagagggcagtctgtccgggtcaatgcttagcttggcccatagtagcagttctactagttttccggcaggttcgctatagcataaatcccgctgtacgctacataccctatcgagtcacaattcaatgtagttgatggtggacggcggtctcgaataatgttagaatcgagcgcatggttgggcagtgttaaggaagcagcattcctggctgcgtttgtgtagtgttacttgtcccgtgggttgcacggttcggtgagagtggcgacgtggggagtccccaattggggatgttcagaatgatgttgttacatttttgatcgtgtttctataagaacttagtgctgcttaacagtagcactcttgtcgagcaactttgatgtttttttttacctattattttaacaagcttttttgtactgtttataactagaaaataatactttacgtttgataaggtcaatcatttcttctgaattctagtcaattggatccgatcgattgaggaagtgtagtaggtggagttcgaagacggttagaataaggaacgcgctagaatgactgtgagcccagctttagataatactcatgattgaattcaaaagattcctatttgctatggcgttatttaggttcatttgagcgagtgaaagcgtttgcgggcgctcaattccatctgtaaataatcctaacacattcgcttgtagtatcaaatgccgcaaattgctttctataaatataccggggcctacgtttttttacgccaatctagcaattattttcaacgaacgaacgaacactgaatacactttctctgtaggatattcctaatttatcttactgctgccgatttcttgtatatttgacgcttcttatttagtatttttctcatttatgcgctgccaacgagacatttttacgcaaaacgataatttttgacacttatccactactactactactactacttattattattatctttattatcgagactttcagcctgtggctggttcgtcttcatcattgtgtaagagagggcttcgcgtttagaggcccccctg

SEQ ID NO: 240 - DNA, 1696 bp, Aedes aegypti
cagagttggtagcaggtctcttttcagaggagactttgtcagtattgtaatgcaggtctctgaaaagtctctgattttaatggaagttgttcagatccgagatcttgatatgtcttgatatgtcccacgtaacggttcgggaaacgtcaactaatgtgtgccttactttgtttgtcgttttcccgtcaggattcgcacggaaacatgggcctaacgttggaagggaacaaacgcttaccggtcgaggtggtaccaggcctcaaatcggtggacatcgcatccggtggagaccacttggtggtcctgagcgaaaacggccacgtgtacacagttggttgcgccgaacagggtcaactaggacgtatttccactcgggccgcatctggcgaatctcgacgtggtaaaaccgatctgcttcaaccgggagttgtcacactgcgaggtaaaaaagtcttagcagatgcaatctgggcatctacctattgcactttcttcagggatcgcaacacggccaagatctttgccttcgggttgaacaactattgtcaactcggcatcccgaatccgagcgaaaatgtcgttaaaccggtattcgtacctgaacagactagtttcaccgatgtgaaatctatcgccggaggacaacatcacacgttggttttgaaaaccgacaacaaagtgcacgtcattggccgcaaagaatacggtcgcctcggcctaggcaatgtgacggaagacgctaaagttgtgaccccagttgaagctctagcagacaagaatgtggtagagatctgctgtggcgaaagtgcgtcctttgccgtgacagacaagggtgaagtctacgcttggggaatgggctcgaatcaacagctaggaactggaaacgaggacgatgaaaccacaccagttcaaatcaacagcaaacaagtacaaggcaagcgaattctcaaggtttccagcggcggtcagcatagcttattcctggtggaagagaaaccagctaaggaacctactcctgtgcctgaagctaagcctaccactaaagctaacaaaaaagccaaggaagtcgagcctgtcgagaaatcagcgccggaagtagaagataaaccaaaaacgaatggtgcttctacttcagccgcgaaggtgaccgccgattccaatggtggtactaagacggaagaaaacgaggaagacgagaaagagaagccacaaatggaaagtagtgagactgacgcggctgcggaacccgagaagaagccagctggccggggacgcaagcgaaaactgtgaacgcaccgtataatcgggactagttaaacctgttcagtactagcgattttataggtttagttagaaacaattacgtaatgatagaaactaagtgtttagttttgtgaaataatcatttttatcatctcatggtaccgcgcctcattcgacgttattcgttctgtattacatttcttaccttacatctgttgatttatttccgtttctacatgccagtgttttcgttctactctatttacgtagtcatactattgttcggtaacgcagattaaaaagacaatctgattgaaagagaacaaatattgacctacattgattatgcgttggaaaaaaagaaaaaacttaaaattaatttattaaaatcattactactcaaaccataagaataaaaacttgtaaaacatga

SEQ ID NO: 241 - DNA, 1600 bp, Aedes aegypti
cgtctcaacatggattcgattccacggaaaagcatcccggagacattcgccggggcagatgtgttcataaccggtggttccggattcatgggcaaggtgctgatcgagaagctactacgatcttgtcctcagattggaaacgtgtttgtactgctgaggccacgaagaggaaaattggccaaggaacgagtcgcggatttggttcaagtgccgttgttcaacaagttacgcgaagaacgacctgatacgttccaaaaaatcgtcccaatagatggagattgtgctcagctgagactgggattggaagatgagagtatcaggcgaatggccggtgttcagttcgtgtttcacgcagctgccagtgtacgattcgacgatcccctggacaaggctttattgttgaatacccgaggaacacacgaaatcttacgatgggctaaaactttgagtaacctgaaggccatagtgcacatttctaccacatactctaacccggaggttcctcatgttgcggagcggatatatccagcaaaaatggattggagaaaggctatagaaatggtggaaaaggtcgatcctgaagcgctaaacgcgttagccgagaaattatcaggttttgctcctaatacctacacgttcacgaaaggtcttgcggaacagatctgctacgattatcaccatgaacttcctctggtaatctttcggccgtcgattgtgatcaacaccgagacggaaccaatgccaggctggatagaaaactacaacggacctgccggcatcctttcagctcacgcggccggtattctacggactttattcgtcagcatggattgccatatgaattgcatcccagcagatgtcagtataaaggcgattattgtagctgcatggaagaagtccttcagcgccaagaatgacctagtgatctacaacagtgctgctgaacccgacaaggcaatgggatataaatttctgtacgaagaatctgactacttctctcatcgaattccgatgttgaagatgatgtgggctcctaccggacaagccacaaccaatagtacgttgttctatttgttgttctttttgtaccaggtcattccggcattttttgtcgatatagtgcttaggctttgcaatatgaaaccattcctcctgaaactgcagcgttcgatcttccatgcccaaaactctctgatgtacttcaccacgcatgactgggtgttcgataccgacaatttccgcagcctatccaaggatcttggcgagatggacaaaattcatttcaacattgcctacattacgcagggtctgctggagtactgcagtctgtgtatgctgggcgggcgccggtacctgttcaaagaaagcgacgactccatcatggttgctttcaagagattgaagcgattcgaactggccgacaaactgctgaaattggctatgttcgttggattcgcatacgtgctacggagttatctgcctgatagctggctgcaacgcgaagcggttgatggtagattaaacgaaattttatcagattgacaaatgtcagctttcatctgaagcaaaagattgaatgaaaaaatcaaaagtttttacg

SEQ ID NO: 242 - DNA, 2010 bp, Aedes aegypti
atggatatcctcatcgagccagactgttacaaggtctgccgcatctgcatggagaactgcgaggaggactttgtgtgcgtgtacgatgagtttgaggataacatcctgatggacgtgatcgctgagtgtgcccgcgttgagataaggaaagacgatgtactgccacggaatgtctgtcggaactgcgccgagtatatgatcgtggcctaccacatcatccagaagtgtcgcgaatcggatcaaacgttgaggtcaatcttcaagcatgagatcgatatacacagccgcaaggacgaggagaagccattctgtgcgactgatctgcaggaagaggacctcaatccggaggaatatgagtttctactgtcggaggcatacgacaacatgatattggacaatgtggaagatttgataggtgaacaggtagacgagctgccaagtgactttccagatttgggtcatgtcgacgatgagaatacacctccactgctgagcaccgtcaaagttgaacaggttcagttggggaatacccaagttgatcaacaactcgtacaagtagaacagccacctgttgacacacacgaaacaaagaggtgctgtggttgtaagcaagagttcgaaacggagaccgaactggtgcaccacagcaatgcagtgcacttcaacgagcgtggcaatatcaatgatcccaccaggcccttccgatgccacatatgttacaaatcgtttgtaacgcttcagcatctgaaggagcaccaacgaatcgccgtccgtaaatacttctgtcgacagtgtggaaaaggtttcatgacccaatcgaatctggagaatcaccacaaatgccactacacatccgcagagacgaagaaatgctgcggatgccgcagtgaatttgaaactgaagaagctctcacagctcattctatccaggttcacaaacccgagcaaatggttgacccaagaagaccgttcgaatgtgcagtttgctaccgtcgttatccaactcgcaaatctttggtcagccacaagcgcttgaaccagcagcatcgttgtgcgcattgcggagaaatcttcgccaaaagaatcttccttaccatccacgaacgtaactaccacccggatgcccctaaggaagaagaccccaagagacgttgctgcggatgttaccttgaatttcccaacatggatgaactgcagctgcacgcctcggccacccacaaactccagcgcaatcagattgccgatgaaacgaaaccttacgagtgcgacatctgctgcaagcggttcatctccatgttcagcttgcaccaccatcagaagaaggccaatcagggcagacgttacgtgtgcgaagtgtgcggtcgttcgttcaaccgcgccttcgacaaagccaaccacgccacaacccattccaacgagatgccattctcgtgcgaaatttgcggccggcggttcaagaacaagctctacctcaaaaaccatcacaagctgcacaccaccggtgaaacgaaggaattcgcctgccccgaatgtggcaagtgtttccgcaccaaggatctcctcaaaacccattccattacgcacagcgaagaacgtcggttcgtgtgcagtctctgttccgccacgttcaagcggatgcagtgccttagaattcatctcaagatacacaacaaggaaaaaccgtacggatgtactctctgcgaacgtcgctacacccagtcgtcggatctgaagcggcacatgctgacgcacagcaccggcgacgaggcgcggccctatcagtgccaatactgtctgaagcgctatccacgcaaggattacctcaagattcacgtcaggaagcagcacctcgagaaggcggatctgacgctgatcgaggagatggcctttgagctgcgggaccacggagacgatagcgactttttgctcatttaaaattttatcttcggggagatgggtttagagaaatcgatgaataatatggcaataaaaagcagaatttttagtacg

SEQ ID NO: 243 - DNA, 2842 bp, Aedes aegypti
gttcaaatgtcactaagctaggcaacacacggaataagagcaggtcccgatactcagtggttcattttaccgaatatttccaaggtgctattaaagtcatagtcatgcaacgttgcgcattttgtattatcgttagacaaatataactcattaaataccgaatttgagttcgtacacaacggatgttttaacagcaaatttgaacatagtgttcagctttatttcccccgacaagctgtgcatgtaacatcagactaccatcgtagtcactcacctcgccacgcgttatcagacttgttgggctcactctctctctagcggatcacacgaccgaatttctccacaaacccatcggtcggatttgagagacctacatcgcttctataggcacgtaggtatatgaacccaccgaggggaccgatactatcaaagaagcaagaagagagctttgtgttgtgtcattaaccaggcctgggccaggcaggctttagctacccgaaaaccaaaacaattacttgtattggaggaagaaagaggcattcaatgccatccagtcaatagtgtatagctatctgcgctccgtacttggcggatgtccctccatattcaaatctgcacttttagcgtcgagtcgaggccgagcattgcatactggtgaattttataacatggtgatggtgtacatcgagcattttgaattcttcgctgaaggatttttatgatgagctgttatagttaaactagactgcatttgagccatattctgatcggggggaagtagaggaaggagaagagatggatatcctcatcgagccagactgttacaaggtctgccgcatctgcatggagaactgcgaggaggactttgtgtgcgtgtacgatgagtttgaggataacatcctgatggacgtgatcgctgagtgtgcccgcgttgagataaggaaagacgatgtactgccacggaatgtctgtcggaactgcgccgagtatatgatcgtggcctaccacatcatccagaagtgtcgcgaatcggatcaaacgttgaggtcaatcttcaagcatgagatcgatatacacagccgaaaggacgaggagaagccattctgtgcgactgatctgcaggaagaggacctcaatccggaggaatatgagtttctactgtcggaggcatacgacaacatgatattggacaatgtggaagatttgataggtgaacaggtagacgagctgccaaatgactttccagatttgggtcatgtcgacgatgagaatacacctccactgctgagcaccgtcaaagttgaacaggttcagttggggaatccccaagttgatcaacaactcgtacaagtagaacagccacctgttgacacacacgaaacaaagaggtgctgtggttgtaagcaagagttcgaaacggagaccgaactgatgcaccacagcaatgcagtgcacttcaacgagcgtggcaatatcaatgatcccaccaggcccttccgatgccacatatgttacaaatcgtttgtaacgcttcagcatctaaaggagcaccaacgaatcgccgtccgtaaatacttctgtcgacagtgtggaaaaggtttcatgacccaatcgaatctggagaatcaccacaaatgccactacacatccgcagagacgaagaaatgctgcggatgccgcagtgaatttgaaactgaagaagctctcacagctcattctatccagattcacaaacccgagcaaatggttgacccaagaagaccgttcgaatgtgcagtttgctaccgtcgttatccaactcgcaaatctttggttagtcacaagcgcttgaaccagcagcatcgttgtgcgcattgcggggaaatctttgccaaaagaatcttccttaccatccacgaacgtaactaccacccggatgcccctaaggaagaagaccccaaaagacgttgctgcggatgttaccttgaatttcccaacatggatgaactgcagctgcacgcctcggccacccacaaactccagcgcaatcagattgccgatgaaacgaaaccttacgagtgcgacatctgctgcaagcggttcatctccatgttcagcttgcaccaccatcagaagaaggccaatcagggcagacgttacgtgtgcgaagtgtgcggtcgttcgttcaaccgcgccttcgacaaagccaaccacgccacaacccattccaacgagatgcccttctcgtgcgaaatctgcggccggcggttcaagaataagctctacctcaaaaaccatcacaagctgcacaccaccggcgaaacgaaggaattcgcctgccccgaatgtggcaagtgtttccgcaccaaggatctcctcaaaacccattccattacgcacagcgaagaacgtcggttcgtgtgcagtctctgttccgccacgttcaagcggatgcagtgccttagaattcatctcaagatacacaacaaggaaaaaccgtacggatgtactctctgcgaacgtcgctacacccagtcgtcggatctgaagcggcacatgctgacgcacagcaccggcgacgaggcgcggccctatcagtgccaatactgtctgaagcgctatccacgcaaggattacctcaagattcacgtcaggaagcagcacctcgagaaggcggatctgacgctgatcgaggagatggcctttgagctgcgggaccacggagacgatagcgactttttgctcatttaaaattttatcttcggggagatgggtttagagaaatcgatgaataatatggcaataaaaagcagaatttttagtacgttttttgagtagcacgtgctgttgactagagaaacca

SEQ ID NO: 244 - DNA, 3247 bp, Aedes aegypti
atgaacgctgaactaaatttgtttgctttactgtttccaattttagaaatctccgaggagaatttgtacgatcacttccaagattgtggcactattgcattcctgcagattcgtactgacgattttgcctacgtgaccttcgaggacaagtcgtcggtgaagaacgccatgagcaagaacaaccaacccctcaaaggttcgagtcttaagatccaacttctcacccgtaacctggatattatgattgtcagtttggacacgctgccgtcgcgtatgcccgatctgtaccggatgctgatcatgccactggagcctcgggcttcttccggtgaacagcagcaacaacaacagcctgctgtccaatctcaacctcctgttgaaaaggccaacgcccttgctggaaaacagcagcagcagcaacaacagcaaaaacaagctgtaccagaacagcccaagccaattccaaaacctcaggaagtaccgaagaaacagcaagaagttgatcccgttcccgcggcgtcatcctctcaatccgacaccgatgacgtccagatcgttgagattgtggagactcagcaaatcatcgaagatgacgacgacgatgatgaggaagtccagattgtggaaaaacctacggtggaaccgatcccgtcggactacgtggcgaaaccggacgacgtgatgcgcccggtcaaggcatccgagctggtgctgaaagatgttccgaagctgaaaagcgaagacgatcgtcgttccgtgtgggtcaacaacatccaaccggagacgcgtcgccttgatctagtcctgtacatggagcagtttggcgacgtgatgcactgcaagatcggcaactcgaacaactgtgcgttcacccggtgggccaagatcatgttcaccaccgaggatggggccgccagggcagcggagtatttcctgcacccgttccagggccgctacttgttcgttctgcaatgctccaagtatgtcgttgaggagccgggcaaggtctttgtaattgattatctgtcgaagtacgtggtttacgaagatgtggttaaggctttcaaacacatcggagaggtgttctacttggttcggttgtacgacaacaattacaaggttcgaattttcttcctcaatcaagtggatgagaaagctgttctggccgtggattcaatcgatggccgtccagctaaactggagctatacatcgagaacatggtattgagattgcccaaaacgttagctaaggagctcaaagaggcacgagaaatcaaggatccggagaaagaagcacgcatggctaggatcactgaaatctacaaagaggaagcgctcgaccgttacgccactcgagagtacaccaatccggatccgaaaaccagtcctgtcgaggttgttatctacaacgtccctgtgggcacaaccgatcagcagatcaaacggttcttcaaatccatcggagaaccaacggcgatccgccgcgtaccgattgaaaccgaaacgcacactgtgcgggacgccgagtgcgtgtatgtcggcttccggacgctatcgatggccctgcaggctgccgagatttctccggagcggacgctcaactcgttcaatccgttcatctttactgcctggtcgcaagccgccatgaccgaccggaacacgattcggttgttcttcaacaaatatatttcaatgcaggacatctacaacgggcttattcactgcggtcagatcaaatacatcgagaagcagagggccaaacgggcgctggtcgtgttcggcaatggcgagaacggagtgctgaatgccaagaggatgaactttatcggtgataccaaaatcacctgcaaaggcgcattcgttgcaaccaggctagatctgcatgccgagaagaaaaagaaacaggcggaggccaagcaaccacctgcagctgcaatcgttatcgaggacgaggacgaggtggtcgttgtgccgtcggagaattcaccggacaagaaccagaatcagaagggccaaaaccagaaacagggtccatcacccaataagcaacagagacaacagcagcaaaggtccggaggcaatcgaaatcgtaactccaattccttcggtgacgatggtcctccgcatcgccatcagcagcagcgtaaccagatgaacccttggcagaacaacaaccaaggcccaatctggaacgatcaattccagcggcgcgatcaattcccgcacaacgatgagttcaacttccaacgaaaccaaaatccgttcatgcagggcgatcgcttcaatccagatggtggtccgttcgatcgcttcggcaatcagggtccaaacaggaacatgaatatgaacgagttcgagcagatgatgatggcgcagcaattcgacaatttcaacctgaacagcaacaatggcttcaaccgtggcaatccgatggattccgatgaccctccgttggggcgtccctggggccaaaaccaacagaattttgatcgcttcagtccaccaggacgacgttcgccgtttaaccgtgaattccccgatgaccacgatcaagatttcgacagggattcacccggtatcccatcaaacattccggaagaagacatcgatgagtacatcttgcgcaagcaggaagccatcaagcgtcggctggagcagctggataggcagttgatcacctcagtggaaacttcccgtcagcgcgactttcaacgtgcggcccggcatcgccagggaaccgtcttcagcgataatggcgatgtgcattacgttccgaatccagcggcagttgcccggaaccgtggtcgtggtggccgcggtggcaatttcggcggtggtcggagaggcggcggcaaaggtggggatgctgccgaaggaccctccagaggtcggggacgccgtgaccgcaatgaactgatgaaaaatcgagccagagatccatttgccgatgtggacatcgtacctatcatccggatatcggaggaccgatcgccatcgccgaagcgaagccgtgaggatgagtttgacgcagcacagttcaacgctgcatggaactaggttagaagagggcactcatctcggacggtactcgaaagggacgagtaccgctttaattacaatgtgtgttttaccattatggacattgcaatgatggtattgactttaaagtacgattgaaattcgatatgtattatttaactcggtggtaaacatccatacttacatatgaagaaaaacctagtaaatt

SEQ ID NO: 245 - DNA, 1721 bp, Aedes aegypti
aaactcgtcgcaggtacttacaacaaaagaaaggaaaaaaacatccagtgcgtacatttactgcggaattaaatgcgaaaatctccggaaaaagtggctgccgtttgtgtttgcttcgttttcgtcccagtttgatcctgttcggttccgcttccggtagctgtttctcgttttctgcagaagaaggaaaaatccatccagagccacaacaaccatgtcggaagaatatgattatctcttcaaatttctcatcatcggtcgggctggaagtggaaagtcgtgcctgctgcatcactttatcgaaaacaaattcaaagaggacagctcgcacacaatcggtgtcgagttcggatcccgcatagtcaacgtcggtggaaagtccatcaaactgcagatctgggacacggctggccaagagcgattccgttcggttacgcggtcctactacagaggagctgccggtgccctgctggtttacgacacaacctcccgagacagcttcaatgtcctctcgaactggctgaacgatgcccgaacgcttgcctcacagaacatctgtatcctgctggtgggaaacaagaaggacatggaggaagaacgcgaagtaaccttcctggaggcgagcaactttgcccaggagaatgagctgatctttttggaaacgagcgccaaaacaggcgagaacgttgaggaagcattccttaagtgctcgaagacgatcctagccaagattgaaaccggagaactggacccggaaaggattggcagcggtatacagtttggggacacttcgaaacgaagtggagcgggccagtccggaagtcgacagcagagtagcggccgacgccggacaccggattgcgctggaggatgccgcacctaaatggcaaaaacccagtgtcgaaatatatagctttttttccgatatctttcgtctatggcagagacattttaaaggtaccaaaaaccgtgtagaaattggatagattctagtgcgcctctttttaacgcaacagagtcaaacttgtggtgattgggtttcgcaaatcttaacgaactataaaccaaccacctttttcacgttttaggttaacatcaattaggcaacgatttgtacgagattcgcgaaagtgacacatttatgcattatttttttattttttaaacctgaatcaaaaactttccaattatctgtatttatttacacaccaatttagaaatataaggatcatctaaaatctcactttgtgatctttgatttacaattaaacttatacttattcctactttaaaacaaatcaaaaatagtatatttttatcaatcaaatttaatccccttagttacgaaagttcattcccagcagcaaatttctaccagcagcttgcgccataagtcagagtgcagtgatagcgaatggcgaaaaacacacacccacacaaacagcattagcactgatttgttgaacgtttggtgtgaattgcaagaaaaaattaccgaaaaacaaaacaaaaattaacaaacttcacccggctacgtagaaatagcgtgcggggatttgttcaatacaagtgctgtaaaataaagaagcggatttatcaaccagtatcgatcagttgttcgagattgaacgacgcgtcggtcgattaattcatagtgataataatgaaaaacaaaaacttatgtatcgaaaaataaaattgattgtcttgtagaccaaaat

SEQ ID NO: 246 - DNA, 2206 bp, Aedes aegypti
tgtaaatctgtcaggcgtcgtgcgcgtgcttgcgtgtgtttgtgaggtcccgaaaaaagcgaacgtcgaaagaagaaacgctgcgaaaatatcagaggcaaaaagaatcgtaagaaaaatacattttgaacactacttttttgctttgcggatggccgcccaatagtttcgagtgcaaatcgggtgtttttcgataggaattggtgaccgattccggggtggagtgaaggcagtgtaaatgaaggagacgccatcctccggtggaacaacgatgataagccaggtaacagtggaggcgcttcattcggccacctacgtggaaaactatttggactcagtggaaaacctgccggacgatgtccagcggcatctgtcccggatccgggagatcgatgtgctgtaccggaaccatctgagggacgtaagcgtttactacgaacagtggagcaatagcaccaacaatggaatggcaaatggtggagcagggggaagtggtggaggcggtgggggagggagtgattcgtcctcgacgacgccagccacggaaccggtcaataataatgccaccaaacgggccattgcgcggatccagcaggggctgattgccgcccaggagttgggcgacgagaagctgcagattgtgcaacagttgcaggacatgattgaccacaagacgcgccagctggatcaggacttcaagaacctggggagcgatttcttctcgaggttggattacaatcgagaggagaaggtgactgaaggccaacagaaagaaatacgttccaatagccccggaaatgcatgttcgccaaataacgtcaattcagcgccggcggtttacgcttcagcaaccggcaacggacagagtaccagtggagtcgggtcaaacggtggaaatggttcttcggcaaatgcaacaggaggaaactattcctctaacagtggcagtaataattccggaaacggaaatggatccggaagttccagcagtggtaatggaggcggaggtgcaggaggagctggagcaggaggcagtagtggaagtggagctgcggctgaacgtggatcgaaaagggcgcggcgaacgcgtactgaacagaacagtggcagtgcaaatggttcaagtacaccgaattccacatccggaatgccgatggacatagatcccatcgatacgagcaatatcaagcaggaggtgggaatcggtggaagtgggcaagcttccacaagtggtgccagcggaagtggaaccggaggcaaaaaccactccggacaggcgaacaacagcggccaaggcaagaagggtaatgcgggatcgggtaagaagaagaaacggaagactggtcgagggcaggcccgggaagcacgagaggacactcccccacccgaggaaaccatcgatccggatgagccgacgtattgcttgtgtgatcagatctccttcggcgagatgatcctgtgtgataacgatctgtgcccgatcgagtggttccacttcagctgcgtggcgctcatgtccaaaccgaagggcaagtggttctgtccgaactgccggggcgaccgaccgaacgtgatgaaaccgaaagcccaattcctgaaggagctcgaacgctacaacaaagagaaggaggagaaaacctaaggatattcgcggagagagctttggcggataattttacttttatgtaatttattgtattttttcctttttatcttttttgctacattcttataaggactaaaatagtcaatccaagaatctttattggatttatgtatagatcgattttctctggaaaaatgtcatgtaagttcaatccctttacattttgctaaacatttgagcagatcattaggaataaggaatgttccgatttattttttgtttattttttattagatgacttttcacctcggacgtatacataattaagatttcttcattataatgagaattttatttccaggggttgcagatatttcatttcatcatagaggcaacccccaagcggtttaattgtatgattgcccattcagttgataatcattgtagaaaatttcatttttcatttggaagaaataaatgaaaagaaacgaaacacatctgacagtacataagagggagaaatgaacaacaaaaaacttacacttatggaacatattgtattgcgaaattataagaaaaaataaaaccgatttgacttta

SEQ ID NO: 247 - DNA, 2470 bp, Aedes aegypti
ttttttcgctgaaattgtcaaaatagcacgcaaacagcagtcaaaaactggcgcacgaaaaaatatcaagtttttaatcaaatttgtttaacaaaagtagaatttcttcatctcttgacctttagtaacagtaattctccatcggtaagatattttctttgaccccgacaacgaaaccgcagccgttgtaaacaatcataggaaaagtatccagagatcacggaaaatgtcctcgtcggatgagaaagacgataccggcggcggggagcaatcgtccggcgagtcggaagtcaaaatcaaggatgaacccgatgacgatgagcacgatggaaccaccaactccatgatggacattgacggatcccctccgccagcgtttggccccgctgcactgggtctgcaccccgtggggacaaagttcccggagaaaacgaccccgacgcaaccgattcaggcgttgaatgctcgcggaatgcccgcccggatacgcaagaagaacaaactcttcttcgacgatgatctgctgatcaacgatcggatcccccctaagggaagccctcgtaagggtggaacgcctgggggaacggggtcagctaactcgtccccacagaaagggctcgtcacaccagggaagaatttgacccgttccgggcagaagaagaaggtcctttcgcggtacgtcaagatgaaggacagcttgaagaagcgcaaggaagatccggacgaagaagaagccacgggaacaactgcgcagggcacactgcgggttatcaatccggtcgccctgctggacaagaaagccagccagcggatcgggctgcgactgaggaatctgctgaaactgccgaaggcgcacaagttcgtcagctacgagtggttctacagcaatatcgatcgggcgctgttcgagggcgaaaacgacttccagatgtgcctgcgagagatgtatccggacctgaagacgcggcatttgacgagagccgagtggaatcgcattcgaaggaccatgggaaaaccgagacgttgctcggcggcatttttggaggaagaacgtcgcgagctggagcggaagcggcgtaagattcgtctgctacagaccaagcgatccggggatgtttcttttgtccgggatctacccaaggagattccccagcagctaaccgttggcacaaaggtgactgcgaggttgagagcccctcaggatggcttgttcaccggaaccgtggaggcaatcgatgtgatgtctagctcgtatcgagtgtgcttcgatcggccaggattgggctcccatacgatcccggacttcgaagtcgtggctaacgataatcccgagaagattgccctgaacacgatcaccaaggacttccggccgaaatatcagaatgcttcgttctacgttgcatcgcctgcggttaaaaatcctatcaccggcataaaaggagatccattgctcggaggagacagctatccgaagatccccggcatgccagacagcaaaatgctcttcccgaaggacaacattggcggatttccggtgaagctgctagagctcatcgttcgaacgagaaagacactgtcggccaagcagatgaaattgcttcggttgcagaacatgaactcggaggcggagatctacaagtcgtacggggatccattcccggaggaattccagaagcgctacgcctcgctcgtcgtagcaatggaaaagctcaaccgcgatatccatcagcagctgaaccaactgcaggtcagttgtaagaacctggcgcaggatccggccgtcgtggccatgatttcgccgagtcatctgcgagagcaatgccgcgatcaggcggaggaaacgttcgacaagaacaacaacggtcagttgacgaacgatgcgatgatcaagctgatcaaggatctcaccacgatcatgtacgtggcttccaatctgggcaagaacggggaccaaacggaacactgcctgcaggtgttgaagggctgcatggaggagaccaagggccggttagacttcgacaatatggtctcgtttcagcgaggggtggtacagcatatgaagcacattcaggcgggcttcgaggcagctcacaggcagaaggtggccgaagaacaacagcggcaacagttgctagaccagcggcaatccgaagtggaagcagcagcggcggcggctgcggaagcagaagcagattctcccgagaactgagcgtgaggcaggagggtgtgtgcatttctatatcttcttttgtattaacttttcaagtagttagttttagttcagagttttttcttcttcaagatgtccaatgaattacggtataagcaatttatttgggacgagcttgtacatgtggtttagataaatacaatctaatctggaaaaactggcgtaacgcagacgcaattatgcatgtttctacaagacttagtcatctttgcgtaaaatgggtttattctacgactggcg

SEQ ID NO: 248 - DNA, 899 bp, Aedes aegypti
gactagctatggataaacaagtattgacgaacatttcagtttctgcactgaaccattcatttttatgagaatttattgtaaataaattgagtcctccgcgtaagaaaacgatgacatcgcgtagtttttaggtgcaaaaaagcaattataatgttaagcaacgattgtggattgagaacgctaatttaatcgagtccgtatgtgtagtgaatgccgagataaaactccctttaaatggtgcatcatggatgatgaccttcaaccgctgaggagcgacgaatgccttgagcagaacaacaataacgacgacagcgagggagcagttggcggatctgtggaaaacgttgatccgcaaccagaatccgagcacgatgaaattgtatggagcgaggaagagttcgaccgtgatccacatagggcgtacttttatgatgcatatcgttcggaggcaggatccccggaattggacgattcgacggagaacgcgggagcgacgaccccggaacgaaaaccgctggccctgatggacgactgggatctctgggactacatggacgaggagacgttgaaacagcgactgaaatatcaccccgaactgttggaacaaatcacacggaagagaaagcggaaagccggacttgaggaaagcgacgatgacgatctctgtgcagtgatggagaggcatgctaaagtgacgaagtttaacgaacatacaaaagtgtactgaacgtggaatggtttagttttgatgttcatgggttatgttttacaaactatctatagcgaagtccaatttagcatgtgtaatattgatagaaatctttcaattttagctgtgtactataatctattattgtaaatatatttttttatcgattgcttcaaattctttcagcatt

SEQ ID NO: 249 - DNA, 2011 bp, Aedes aegypti
tcattatgcccctaatccccctaagtagatcatattgtataaaaaaaactcaaagcacactgaatctcagctgatatgtataaacatcttcaacgatgcaaattgctcgtctctgctgaagccatgtaaaagccgaacatcttcaattacctcccctacacgcataaatgatttatactttgtgtccacacatctatcgcgcataagacatcgatggcagcaggacgcccctggttggagtctcaaacattccactgcatacaagcgcaccgaagaatcacgttttcaaacgatacgcgccttccgaagcgtgtgctggtgagttcgccggtacacgctggagaggctctctcctatggcacacaccctaaagcctgcggccgcttgtataaatgatcgcgagcgggaagtggccagattaattggacttcactagtgcgcgttagtgtgccaccagagccagactacttcggacggacttttctgttttttttttgtaagatacagagaatcggctatagtgaagcacgttgtggtttatctaccgaagttatagttgagttgtgtaaactaggttcaattgagtgcaatcagtggattctaagatggctgcggtcacggaagtcggtggaatcaagctgggtaagctgttgatcgagggtaagaccaagcaggtatacgacgtgccttcgctgccgggtcactcgatcttgctgaacaaggatcgtattacggcgcacaatggcgttcgggcgcatgacctcgaaggaaaggcccagatctccaaccagaccaacgccaaggtgttcgggctgttgaaccaggtcggcctgaagacggctttcgttcggatggtttcggacaatgctttcttggcgcgcaagtgcgagatggtgccgattgaatgggtcaccagaagactggccaccggatcgtatctgaaaagaaaccccggcgtaaaggaaggattccgattctcgccaccgaagcaggaaactttctacaaggacgatgccaacgatgacccgcagtggagcgaagagcagattgtctccgccggtttcaaggtcaatggagtgttgatcggtcaagacgaggtggacatcatgcgccagacaaccattctggtgttcgaagtcctcgaacgtgcctgggccacccgtaactgcgccctgatcgacatgaagatcgagtttggagtggacgccgacggccaactgctggtggcggacgtcatcgattccgactcgtggcgtctgtggccatcgggcgacaagcgcctgatggttgacaaacaggtctaccgcaacctggcttcggttaccgcctccgatctggacaccgtcaagcgtaacttcctgtgggtcagcgagcagttggataacctgcagccgaagaacgaccatctcgtggtggtgctgatgggcagcccctcggacaaggatcactgcgagaagatcgccaagcattgccgcgagctgggattgaacgtggagttgcgggtgacctcggcgcacaagggaaccaagacgacactgcacatcgtgaacgagtacgagagcgtcctgagcaacctggtgttcatcacggtggccggtcgctccaacggccttggaccggtcctgtccggtaacaccaactatccggtgatcaactgcccaccggtgaagcccgagaacgtcagcttggatgtgtggtccagcttgaacctgccgtcgggactgggatgtgccacggtactgtacccggaagcggcagccttgaacgcggcgcagattctcgggctgaacaacttcctgatctggtccaagctgcgcgtcaagcagctggccaacttcaccagtctgatctacgccgacaagggcttccgcggggtcaggaaggagtagagttgtatgacagttgtgtaaggatgttattttgtaaggtttcgatttgattaagctataagacatttatatatttgttagcagatgaagagtacaataaaatctttttttataacaatttg

SEQ ID NO: 250 - DNA, 1977 bp, Aedes aegypti
atgtccaacaataaagaaacgcccgagcatctccaggctcagaacataatcgtcatccacccgggttccctttacctgcggatgggtcgcgcctcggatgtcaacccctgtcgcctattgcacgccattggccgccgtcgcaagccgggcggtcgggcctatcgggaccgggttctctcggttccgattgccaagcccaaggaatcgctttcggagttcgaggaatgtcggctgcaggtttcccacacgttgcaatcttgtgtccagtcggatggccggagacggtacgctactccgccgcagcagatctccgcgtttaatcggagatctggagcggaaactgttcaggcgtctcgagtggactggaaggacgatctgccgggcgataaggtctttggagaggaagttctgtggttgaatccggccggggagttcaatgttcactatcctattaggaggggcgagttgaacctgcacaaggatgtgggaggttcgatgtccggggttatgtgcgacctgcaggatatttgggagtacgtgctgaggcatcggttgaggatcgatttgaaacagctgaagcagtacaaggcggttctggtgatttcagacatttacaaccgagcacacttgaaggaactcacgtcgctgttgttgaacaagatcgggttcgggtgctgctttctggtgcaggatcacgtctcggccacgttcggagcaggactgggctatgcttgcgttgtggatgtgggtgaccagaagacttccatttcctgcgtggaggatggcatttcccacccgaacacgagggttcgattaccctatggaggggcggacataacgcagacattccattggatgcttcagaagtgcagcttcccctacaaggaatgtgaccaaagccgccctcaggatgcgttcctactgaaacaactcaaagaagacatttgccacgttaatctggacgtttgtggagcccaggagaagacctttgccgtccaccagccccaacaagaaaagcgtcgtttcactctgcaaatcggagacgaagccatcgtggccccgctagggctcttccacacggagctgttgtccgtcacgggggtcaacaaatccacccccatgacccagaaaccgtcccgagcgcagccccatccggaggattgttttgatgcggagtatctgcgggaaacaggccggcgagggaaggaaaatctggaacagaccgccaacgaaagcggaatggccaatgcggagaatgccgacgaggacatggtcgtggaggggctggagcaggacagggaaggcaaggtgaacgagaaggatttcatactgcccgggggacagatgatcggaattgaccaggccgtgctgcagagcatcgaacgatgtccaaacgacgaactgaagcgtaaaatgtacggctgcattctagtggtcggtggcggaatgaagttcaccggcatcagcaattggttgcagaaccgcgtggcgctgaagattccgctgatgtatcgttcggagcacaacattgtgaccagctcgaaggacatcgacgcggagattaccgcctggaagggagcggccatcatgtcctgtctggaaagtgccgccgaactgtggctaaccgaggcagaatggacccgctacggacttcggatactgcgggagaaagcagtgttcatgtggtagtcttcttcgacacgtggtttatcaatgtaagtaggtttgaactatggatttctatacataataagtaattaaaactcctagaacgtttttcgtggaagaacgacagcgagagtcgatggactcctatacataattcataattctaaattcaggacattattgctgttcatgaaaattgagcggatctgcaatctgtaaatcgattcctaatctcttgctccagtgaacgttgagctatttcgaactaaatcctatgagttctttaaaaaaacgataaaggtactgtct

SEQ ID NO: 251 - DNA, 2833 bp, Aedes aegypti
attttgtgacggaaggtcgcattttacccgtacgtctgtgaagtttgaaggtcgattgagttattaatttgtaaagtgagtgaaagcaagtgattgaaaacagcgctgcgaggctggttctttgcgaaaccgaagaagtttaaaacctattagttattgttggagaatttttcgaggcgaactgggcgacacaaagaaaaccgaaaggatagggctcgactacgtttggaatacgttagaccctaaggcgataattttaccgagttggggggccaaaactctcaactcattgattggtgaagcttaagcttttaaaatttctataaaactcaacggagaacttatttctctatcgaaatggcacaggcaactggactcgaaagcgaatcccgctcctggcgagaatccctgccctgcaacaacgttgaccgaccagtttcagcagtaccagtaccaactaccaagcctcgacctagaagagcaatccctgtggctggaggacccgaacagcttctgcaactccagctggatcagtccgatctggaatcagccgccactgacgccgccagccagtactttgacaccccccacgaccagtggtgcgttcggaagggttgggtctacaccgacgcagacggtcgagaacatgtcgccgtctcctccaacgcccctcccgtggtcatcctgcagtatgttcatggtcgctacggaccactggacgaatggccccagcaacccaatcgatacaacaggtgaacagcaactcaacacaccggagccggtagatatccgtggatttgaatacgaaggaagtgtgggaggacttgatccagccgacaatcctagaaacgctattagtaagaatcacatcacaaacagcagcatcaccacgatgaacggagaagaacgcagcaactacagtgtcggcaggcacggtaacaagggggaacaaccattcgaattcaagcttattccggcaacgtcgccgacgtccccttggggcacaacagacttcaacacttcctggcagttcgagcgctgccccgaagaaacagtccttagccccgagatgagctacctttcgccacaccagagtccctctggtgtggcatccccggacaccaattcgggggtcagctcagaagcagacgaattcgaaacttgtgtcgatttcaacaagatccaaccgaacattgaggtgttcagagtcagcgaagccaacgaatacagcacttcgctaaccgacgaaatcgaacaactttcggagtcattctactgcaaagcagaggacctcatctccatacaaaaccccaccctcgacggaaccgttgccgtaccgcccttcttcctgaaagtccttcaggaagaagagtcgaatacttctgacggcaccccactatccccgtccgtgtcgaatggtaacgtgtatgacacacgtcccccaattgttaccaaattcctaagtgatgctgacaagaatgatggagattttgaacaagagatggcagaagacgacgtagcagaagctactgcaataacaccggcaacactgcaaagcgtctccaacgacgctctagatttgaaaacacaaacccagctagaacataactatacgattaagctaccccttcttgaagccggcaaccccggttaccttgtaacaacaaataataccctggtgaaggaacattctttgaaaccaagagacaccactgtaatcctaccgccagtgcagcaaccgcctaagcgtacacaaccgtcggccatcaaacggcagctcttccaaacaaagatgaaatccgaaatggccaccggtaacaaactgaagctcaaaatgccaaccaccagcgcaccactcgtcgctccggtaggcatcctgaacactccagaccttaccaaccaagtcctcgaactagaagccgaagcggaaatcctcagcgccgaagaccaattcgatcttatcacgtacctctcttccggaacggactacgatgtcgtgccactctccccggtcgaggagaagcccaccgtacccaaagaggaaccggtccagcctgagtcgaccatctgccccgaagccctcagccagctgctggccaacccggccaaacggaagctcccgatgatcaccttggacaacctggaagagctgacggggcccctgacgccgaagaaattccgcagtgcgacctcgtctacagcgtcgtccgtctgcggagattccgtctcggaggtgtcgtcctccaacaagaagcgccgcggacgccccccgaagcagtccagcctggtgtccgatcggaccgagtatcagcacctgagcgaggaagaccagcgctaccgtgaacagcgggacaagaacaacgaagcgtcacgcaagtcgcgcatcaaccgacgggatcgggaactgaagctggagcacgaggcgaacgccctgaaccagcagtaccaggagctggaaaacgaagagcgcacactgatacgggactgtgcccgatggcgccgagcggtcatgcgattggcactgctgtaaacgcaggaaacggtgtctctcttggttagatttgtcaaactagtatgaagtacaattttatttcctagcctgtgtagcaggaatgttataatttgataaattaacgtagtttaacatgaaatcaaaaactaaaaaaaagtttaaaaaatacaaaacgagaaaaaataatcaagccattggttccagctgatataaagcaacaaaggaaacataaaaccttgcatggataataaatgtatgattccgttgatgtatttgtactctttactttaatcatcaataaaacaaaacttcaaatcaaaa

SEQ ID NO: 252 - DNA, 4104 bp, Aedes aegypti
aatttttttcttgtctacccgcggcgtagtaaagccaagctcttcgctcgactccgagtcattgttcgccatcttttcacgcagttaacatcgtcggagtgctgctctctgccggatcaacttgtgaagaaaaatcttaattcctaaatccaaaaaattctcttaaattagagaatttacagtgctagaatcagttgtattattcgattagtggagttttaactacttttaaactatcaaaatgtctgaaaccgagaagaaagcagaacaatctaccggaggagaaaccgagaccgacggcccaaagcctgatgctgagcatcaacgcaagatcaatgtcgctaacttgccgtgggacgtaactgagcagcagttgcgcgatttgttcagcggtcatgaggtcgagaaggtggagatctaccattaccgcaagtacacgctggccttggtcctgttcaaggacaaggacaccgctgccgcggctctagccgaaaaggagaactctatgttccgcgatcgccgtcttcgtatgcacatggaattcacctcaatccgccatatcaagcgtgaagtcattgttaccgtcgttgaagatgagaacatgaccgaagagcagctgtgggataaggttaaggcagctggcgtggaaccgacttcggtgttgatcttctatccattgggctatgttactttggagaaggaatgcgacaaggctcctattcttgagaaactgaaggccgctggattcaatgcgcatgacttgaaccaacgtgaccagaaccagcatttggacatctggcgtgcggccaaactgttcttccgtaaccgcaaccgcgtccagctgttgaacattcccaacaagtggattgaagataaggaagagatgaagaaacaatgcgctgaaggaggtaccattaccgaagctgtttcgaacaatgttacccaaaatccccagatggcttccaactatgcccgaatcttctacgaaactgaagagcaggccgtcaaggctgcaaaggctctgaatggacgcgttgttgatggcaagcgtatccatgctctgcatctgggatccgcattgatgcccaactacaagacctcggtctacgttacgtctttggacaagggtgttactgaagagcaagtttatgatcatttcaagcagtttggcgaaattgagttcaccaaccgtcgcaactgtggagatgctgctatcatctgctacaagaacgctgcttccgctgagaaagcgcttgcatgcaccaccttcccggcgcctaccgaagagaacaaggatgctaccaaggaggttgttgtcaagaaatacgacggaccattggtccttcgtccggttgccctgaagcgtaaattgaaggccggagaagaagagaaggatcaggccgaaaagaccaaggagcaacaaagtgtgctcggaaagctgaaggcttaccacccgatctttgtcggcaacgtgccactgaattgcccacctttggaattgaagcactactttgcgcagcacggaccaatcaagttcatgttctcgccgcaaatcttggcttaccgcaacagcgcgcctcaccccgtgaagacgttcatcatctactacatgaaccgtccgagccagcagaatgccgttcgcttcttcgaccacaagttcttcggcggtcaccgtctgcatgtgctgccactgcgcggaacacaaaacatggatgtcaagaagaccatcaagatgaccaagattccattcatgtccgaggatgcgttgttcaagaagatcaagccattcgttggcaagatcaaccgcatcgtgaagaagtcgcgattgatagcttacattgagctggaagacagcgccgacgtcgagaaaatgatgaacgttgaaacccctgaccatcctctgccaaagggtaagatggaacagctcaagaccccaatcagcgctcgtctgtacaatgaggacgatgttcgtgtattgaacggcatcgccaagattgtcgccaagaacccggatatgctgaagaagaacattcagccacccaacaagcgtccacgcatggagttcggtggtccaggttttaatcaaggccctggaggcttcgttcccaataacaatatgaacaatccaaatgctatccaagatttgttgcgtcttgcgttcatgtccggcaagaacgttggcgagagtctggcttctaaccagagctcgttcggacccgacccaccagtcgccaattccaacaactttggtgacggtggtttcggtaaccgtaaccgcaataaccaaggtggtaatcaaggcaacttccgtggtcaaggaagaatgaacatgaaccagaatcagaaccgtggcaacaatgccaacaatttcggtggcaacacaaatgccggtggtaacaacttccaagcttcccccggaaatcaaaaccgtggtggacaaaacatgaatcgtggtaatcaacagaaccagaaccgtgctggtggtaacatgaaccaaggcaacaacatgaatcaggccggcggcggaaatgttaatcgccctcagcaaaataagccaatgaacatgaataccggtaaccaaaatcaaaatagaaacaaccaggttggtggcggcggcaatatgaaccgcaaccaaaaccaaaataaccgcaacaacttcgacaatgacaattcctttggcggaggaaacaactttggcaacaaccgcaacaacaatttttccaatgacagttttggtagcaacgataataactttggtggtaacaatagtggtagtaacaacttctcgaatgacaacaacttcggtggtaataaccgtggtaacaacttcggtggtaacaagcgcaaccagaacgataactttaataactcgttcggtagcggaaacaacagcggtggaaacaatcgcttcaataacgatggaaacaatttcaatagcaattttaacaaccgcaaccaaaacaatcgttttgacaacgacaacgataacaattttactggtaataagggtggtaacaatttcggcaaccgtcaaaacaagcccttcaatcagggaaacaatcagggtggcaaccagggaggcggtatgtcctttggtgaatttaacaactccaattcctccaaccgtagtggtggaaacttcggtggaaacaattccggtttcaattctggcaacgccggaggaaacaagtggaacaacaattcccagcaatccaatactggcagccgcctcgctggtagcatttttagccgacgcttctaaacagctaaaaccaagaaaagttaatttttacaagcaatttgtgtcttgtatataaaatcattagcttcccttaatcccaccgttaacagggatgacggaaatctgtctgggaagcgtactctttctaggtttaggcagaacaaactaatgtaacttaattttaagtaaaccacaaacttcttaaaccagaaataaacttataacagtgagacgaatgaaaataaccattttgccgttctttttacaacatttgactacttgattaatgaaaagacacaaattataatctcacatccagcaaaatatccaattcttgaaatgaaaaattcaatgttcaataaaagaaaaaggtagatctatagcagtaccattaaaataaagtttgccaggcctgatggaaccctgacatccacagaagtatttattattttattttaacattaaacaaaaagcttaggaaccatcgtaagctgcgaagtattgttctattcgttattggaaaggaaaaagtttgatagcagcattcaacatgaaagaacaagtttaaatttcattcaagaaataaacatttgaaaacgatgtaactccacactcacacaaagtagcgcagtgttaattgttgtattggcagcagttatgcaacaactgaaaaagtactcagaaacgctgacgaacacatcttactgcggttaggcatcctatccccccatatattcacttagatgaataatgctaatatgtagatctcctcgcgtttctgtgcgatggacatgtaactgtaagaatatgattttagtgtaaaactgaaataaaatgtgcaacactgaagtaaaatgaatttt

SEQ ID NO: 253 - DNA, 997 bp, Aedes aegypti
atgccgattgggaatctgatatcaatgatcctgtacgccgtcgtgggcctaattggactatttggaaacacacttgttatctacgtggtgctgcgcttctccaagatgcaaacggttaccaacatgtacatcctaaatctggccattgcggaccagtgtttcctaattggaataccgtttctcatcatcacgatgcatctgggcgaatggaccttcggcaatactatgtgcaaagcgtacatggtgtctacctcgattacacagttcacctcatcgatattcctcttcatcatgtctgcagaccgttacatagctgtgtgccatcccatctcatcgccacggtttcgaacgcctctggtatcgaagatagtttctttttttgcatggacaacctctgctctgataatgctaccggtgatgctatacgccaacacggttcatcgagacaagggcaaaatatcctgcaacattgtttggccatcggaaaatgctagcaactccggcacaaccttcaccctgtactccctcatactgggctttgctgttcccctttcgcttatactaatgttttactatctggtgatccgcaaactgcgcacagtgggtcccaagagcaagtccaaggaaaagaagcgctcccaccgcaaggttaccaaactagtgctcacagtcatcacggtatacgttctctgctggctgccctattggatctcccaggtggcattaattaattccccaccggatatttgcaaatcccgtctggagattaccgtttttgtcctagtgagctgccttggctattccaattcggccatgaacccaatcttgtacgcttttctatcggataatttcaagaaaagctttctcaaagcgtgcacttgcaccaagggcaaggatatcaacgcccagttacaaatcgagaacagcttcttccctcgcttcgcacgcaacaggggctcggaaaggggcaattcaacgaaaatcctccatcccggac

SEQ ID NO: 254 - DNA, 1382 bp, Aedes aegypti
atgtccctaaacgaaggcgaggtgaagctttcgcaccgcaccaggaaacgcgtccgggaagtcaagcgaaaggctcgtccagaactggccgacaagagcgcctgggtgcagctggagtaccacaggaagttcgacaagttccgggagttcgaggacaatgtggagcggatccacgtaaaggacgtttcgccgcgggagttcatcgagcggttcgagtcgatctacaagccggtggtgatcgagggcattaccgagggctggaaggcggagtacaagtggacgttggagcggctggccaagaagtaccggaatcagaagttcaagtgcggcgaggacaatgacgggtatagcgtcaagatgaagatgaagtactacattgagtacatgaggaacacgacggacgatagcccgctgtatatctttgatagcagcttcggagagcaccatcgccggaaaaagctcctggaggattacgacataccgttgtacttccgagatgatctgtttaaacatgccggagaggaacgtcgaccgccctatcggtggtttgtgatgggaccggcccgttccgggacgggcatccacatcgatccgctggggaccagtgcgtggaatgcgctggtcagcggtcacaaacggtggtgcctgttccccacgcataccccgaaggaacttctgaaggttaccggagcgatcggaggcaaacagcgggacgaggccattacgtggttcaatctgatctatccgaagacgaagcagctggactggccaagcgattgtaaaccgttggagatcctccagaaaccgggcgaaacggtattcgttcccggaggatggtggcacgtcgtgctgaatatggacgacacgatagccgtgacccagaacttctgcagcaaaaccaacttccccgtggtgtggcacaaaaccgtccgggggagaccgaaactgtccaagaagtggctgaaggttctgcaggaagtggagccggagctggccaaagtggcggccgagatcgatgtcggccagagcaccggtgtggcgtcggatagctcgagcaactccagctcctcgtcttccagctcgagcagcgacgaaagcgacagcagcaacaccgacagtggccaggaatcgctgtctgcccacaagaccaagaagcgccggaaaaccggtggcggaatgatggcctgattaatactgtgaagttgggacgtgaagttgaattgcgactttctttttaaatgaaatgccttgtttctctgactgcggggaaaaaccacgaccctgagtattaccctgaaactgaagcaaaagaaatttgttaggtttacaaactaatttatattgaaaataataaactagaacaatgtgaattgataacaagc

SEQ ID NO: 255 - DNA, 2924 bp, Aedes aegypti
ccactcaacgtttgtcgtgatcggtcgtgcgtgttggttgctccgcttgtgaaaaaacagcagtgagaaaaaagagtcattgtgaaattgcagcaaggaaaagcaacggaagccgattgccagtggaaaaaatcatgtctgatacggtggaaaagaggaagctctcggagctgcgtgtagtggacttgaagcaggaactggaaaaacgcggcaaggacggaaacggagtgaaaaatgtgctgctcgagcgattgactcaggcgttgaaagacgaaaagttggatccggaaacgcacgagttcgaagtcgtcgccacgggaaaaactccggccaaaaagggaaagcctaccaaggcagaagaagagaccgcagaagcagatggtgccgctacctcggaaggcgacttgaacatggacgatatggtgattcaggatgagtgcaatgaagacgaaccggccgcagtcgaagaggccaagaagccggaggaggccaaaaaggaggaaaagaaggaagaaccaaagaaagtggaaaaggtagaggttgcaaatggtgaagcagccaaggctactgaaactgataagagcagcagcaaggaggaaaccaaggacgcggacaatgaagattcgctcaatttgacgattggcgaagaagacgagaagctgcttcacgacgacagtagtaacatcgagagcgagaagaaaggtgctgaatccggaaagagctcggatgccaaaaaagtcgatgcctcggaggaaagcaagaaggctgagaagaccgactcttccagcgagaaaacggcgggcaccgcaaaggacgagaaagagagcgctggaaagtcctcgtcaacgtcagccaagtcgggctcatccagcgactccaagacaaagtcgtcacccagttcgagtgacaagacggctaccgtgtcccggaacctgtgggtttccggtctatcgtcgctcactcgggcaacggatttgaagctgatcttctccaagtacggcaaagtgattggcgcaaaggtggtgaccaatactcgtacaccgggaactcgttgctatggctatgtgacgatggcatcggccaaggacgcaacggagtgcatcacccatttgcaccgaaccgaattgcacggacgaatgatttcagtggagagagcaaaatctgatctaggtccagcgaagcctacaaccgcaaacagcaccagcactgataaaaagacggaatcggccaagacgaccggagcggaaggtggtggggatagtggcaaagataaagacaacaaagacaagaccgagaagaaggatgataacgataaccgatcccgtaacagcaaagaacgtgccaggtcggtcaacaggagtcggtcccagcaccgcagccgttctcaataccgaggcagatccgcggaaaaagatgccaagccgaaggacgacaagaagaaagatgacacccaaaagggagctgaagtcaaagagggtgcagcagctgtggcgcgcaaggacggagatcgtcgcgacaatcggaacaacgatcgcagagataaccgcaaccgggatcgtgaggtcctatcgctacagaagattcgcgaagagcgcgagcgccagcggctacgcgagaaggaacgtcaactacgggaagaggaacgacgccgccgggagatgcgccagcgccaacgggaggaggaacaactgctgcgacgtgagcgggagaagctggccatcgaacgggctcgtattgagaaggaaaaggccgaactgttgcgcatcgaacgcgaacgccagaagctggagcgggagaagatcgaactggaacgtctggagctgaagcgtcagcaaaggaaaattgaagaggcgaaacggaacttgaaacgcccggccacaacggatcactacgacgatgaccgaaaacgtgcagccggatcggaccgtcgtttcgaagcacctccaccaccgtcgatctcctccgcaggtcgcggttcctacggatcgtcggacaagaaacgtatagatgactacaagtcacgtgacgattacaagtcgcgcccggttgatgattaccggcgaggagacacctataagcgcaacggaggtggagttatggatcgcgatatggatcggccatcgatgacaaccatggatagccgttaccctgacagtcgctccggtggcggcggcggtggtgactaccgtggaagtggcaatccccgggatgatcgcgatcgcaacggatcggcacccaagtctcggtatatggatccaattgaccaacgctatcaggatcggtctagcagcagcggcggcggcggtggcaacagtggtccttggaatgcagggccaccacagatgaccctgatcccagccgggatgagcagcagcgaatggcggatggataacaaccaggatcggtacgatcgaacctacaacgagcgcaaagctccacagatgagtgccagccccttcatggatccctcgaggcagaatcagttcatgggaggtagtggcagcggaggacgtccacaggaccgttatggagctcccgtttccaatcggttcgacaatggacggtactaggacgggataagtagcgatacaccgctctttggtgtatattggaattcctagcattacatattcaagtatgaatgacatcgttgaagcacagttcaagataggcttatgtaaaagatacacataaagcattggttagtggagttgcactaatctcagctacatatataggcatagctgtaacgagacaaatcccgatgtgtaccttccttgattccttatccgtgcatcccatttttcctactgacctagatgtgtgatcattcggtgtaagaatcatctctgtagtagtcattattgagtattagctcgtaagtaatttaaacaggattcaataaaggaaaccgatagaagaaa

SEQ ID NO: 256 - DNA, 2726 bp, Aedes aegypti
gtactgttacattacgttatattgtttttttttattattgtatttttatccgggtaccttctcaggggcctgattacaaattcccccttgcaaaaaaaccctacatcgggttttagccaattggcatattttcatccacgtgatttggccctgatcgcaaattttcccggaagtttcacttacaaaatagaaaaacaaaatctggctgcactgctccttacagttttgctcgttttttatgtcaaaagtaaagcaaaacaaaagaaagcaaaaaggaaacgtaacgaaaatattttgattacgaagtcttttgtgttgtctgcgacttggtgtgaaaaacactcccattttgattttttattgtgcaggaaaaaaagtagccccagtatgacgatattcagtgtaaacattcgcctgttttaacatccaactcgaagaaacgaccagtgaatcagaagttggacatagggtgcgaaaatttgctgaagttgcagtccgaagggattcgacgaattttcgaacgagcaggaagcagctggagtaataaagtggcgtgagtaatttcgcctttgccaaggaaggtgtcgtcagccatcgacttcccagagagaggaaacacggagaattacgcatcgaaacaatggacaacgaaaacgcaatcgaggaaatcttcattcagcatggagtcacgctgaagaaggcgagcgcaagttacatttcggcactggacacgattggagtgctgctctttggaaaatataaaaaggagaatctacattacttcgagtggaagatgtcggaaccgtacgaaattatggacaccgacagtcaggacagcgattggtctttggtgcacacggggaaatcctcggacgacagcgccaactccgaaggtgattctcagaagagctcccggatcaccatacgggtccttttccgggatcttaagggcatcgaatcccacaataccgaactccggttgtatgttcaggatggcgcgaggaaaagcctttccgttcatagtctctatctgttcaatcatggctccccgcgctcgtttgtggatttcctggagcggaagcatttcgtgagcagaagcaaacaccggaagcatttctttcactgcatggaggaaaccaatagtgacaaactgcagaagtcgttctcggagctgaacatcgaggacatcataagccaaccggcggcaggcaattattatagcaaaatctttgccaacgtgcatcacacgatcctgtcaacggctaggcaacaggtcagaccgcgcttgtctcattcgcgagagaatcaggatccggaagaggatggggaagcgagtagcaacggaagtgagaaccgtgtcaagagcgagaacgtcagcaaagatgagcgtcgaaaattggcgccaagaccggaggtgcatcggggagaaccgctggacgccaagaaatgggcagaattccacgctgccaatggagccattaccgatccgaaccgagttcgggatatcatcttcagagggggcatttccgacgacatccgcgccgaagtgtggaaatacctgctcggtttggatctttgggagcacaccgccgccgaacgggaggcaaggcgatcgagcaaaacccaggaatacttcctcatgaaactccagtggcaaacgatcactccgatccaggagggcaacttcacgggctatcgggagcgaaagtgccaaatcgagaaggacgtaaaacgaaccgacaggacgtacgaattcttcgccggggataacaatccgaatctagttaaactgcaggacattctgatgacctacgtgatgtacaattttgacctgggttacgtccaggggatgagcgatctcctggcgccgatcttgtgcctggtccataaacaagcggaaagcttctggtgcttcgtcggcttcatgcagaaggtcttcaacaacttcgacatcgaccagaagggaatgaagcaacagttggagaatctccgaactttgctggccttcgtcaacgagaagctctacaaatacctaacggacaaccagtcggagaacatgtacttctgcttccggtggcttctggtctggttcaagcgggaattctgcaatgcggacatcatgctgctgtgggaagtgctctggacaggcttgccctgtccgaatttccacctcttcgtctgcgtggccattctcgatcaggagatggacgttttcattgatggcaacttcacgttcaccgacatcctcaaacatgtcaacgaactgtccggcaatctgaacgtgacggccatcctcgagcaggcggaaagcatctacctgcaggtgaagaacacgatcgagacggccaaggagccgcacgtcgagctgcgcaaaatcatcggggaggaagtgagcccggcgggaaccagcggaaccagcggcagcgaggaagatgacgacagctgcatgtccattgtgaacgaaaaatccttggacgatcaggaaatggccatccagcgcaagattgacgaggcgtgtgatttgtcgatgagctttgcgttattttaggagggtaagtctgttaataggttcttatttttcggggatttttctaaaaatacgaaataaattgaccatttggaagggatgtataaatattgtttataaaatattatcgcttgaggtacatttgaaatcatgtataatttgtggaataaaaataacgattttgttgtatataaagtaa

SEQ ID NO: 257 - DNA, 2782 bp, Aedes aegypti
actttgacgtcacctgctgcaatcatcatcattcatcaaaatcgtcattcgcagtcgggttcggtcgcactgaacataaacaaaagagcgtgtgttgtgttttcccatcattgttttccgttgttttcctttgtttcgtcgtgattttcccccaaatttttcaatcgatgtgcgctccgtccgagtggtgtgaaaatttcagtgaaaatgttcagtgcttgacggtttctagtaaatacaacagataggaatctaagacggggaacccgtcagaacagaaacgatgccacgatcaaaatgttatgcgtcatcaatgtcgcttcggcggtgtcttccggtaatctgtttggtgattgtggcccgtttggtggaagcccagaaagggatcttcttcgggtgctaccagcgagatcgatccgggcagctggagctgctgaccgacagtttggacaaatgcgttggccactgcgagcttggcttcttcaggtacgcggcactatcggatacgcagtgcttctgcttcaacatgattcgtctgcgccagatagaggacaaaaattgcaatcttagctgtcgccaaagtgcggagcattcttgtggcggtgataatgcgcaaagtttctacgaaaccggggtggatgtggccggacccgttaagaatctcaaactggcagaaaaggaaacggaaagcacgatcaaaatttcttgggatgctccgtccttggatggagtgccggtggacgagtatgagatcaatgccgtcgcactgtccacctttgccaactatcgactgtatccgatgagctggagtgtccacaataactcgcagtcattcgaactggccagtttggttccgggtacgcgttacaacataaccgtgacgagtgtttcggaaaagggcgccggagggatggcttggatggtggcccagacggaaattggcgttccggatccggaaccggaagaaccggtgatattgcgacggctggattcgaccgttcagatccagattcagaaggccattaacaacaacggcccggttaactattaccgagtggtggtgcactacgtggacgatgatctggtgcaaacgttcgacgagaccctgctggatacgtaccaacggtcacgggagaagggcgttccgtactacattgctgccgaggtggagatgaaggaggactcactgctgttcaccgttggcgacaagcgacactatcgaaactacttcaatccggaaattcctgcccggaagcacgtgcacatctccatcggaatcgtcagcatcttgaacaacgtggtaaaggtgcggtacgctaccacgacccacgagcagcaccagcacccggatcaccaccacgtgaattctaccaatgctccggagcggaacgaagcgctgatcacggtactggccgtggcttgcgtcctcttcggaatcgtactgttggccagtatcgtcctgtacgtttacctgcgctataaaacatcgagaaatactcgtccccttcgggatcaccacgaaatggccctgcagggaccgatcttggaagtggagaacaacggcttcattccggacatttacgaacagcgcggattcgaggcggaactgcacgacatcattgaatctctagcaccgcaccagaagcatcctcggaagcatctgtcgctggagatcaataccatcctgggttcgggcaagtacggggacatactcaaaggaagcctccagcgcgagggcatcgaactgccggcccaggtgcacgtcatatccgacgacatggacaagatcgatcagattggcttcctgaacgagttccggcgggtcatcaagctggaacagcacccgaacgttctgcagctctacggggtgtgcgtcacgccggactggtgctacgtgctgttcgaggagatgcagaccaccctcaagcagacgctgctcaacgcgaggataccaaataacgtgaacagtccaaagttttccaccatctcggaggaaattgtcgtgaacattctgtgtctggtgtgcgacggcatgcagtacctggttgagaacaatatcgtcaacaagaagctctgcgcccgaaccgtctacgtcaacaccaagttcgaggtgaaggtaagtgccttcgggccgccactctacggggacgacaacggccagcaggtggacatcatccgttggaacgccccggaggtgatcaagttccaaaaccacactgccaagagtgacgtctggtcgttcgggttgctcatctgggagtgttgctgtttgggcgcgaccccattcgggacaatcaccaccgataatctgtttgccagcatccgggcgggcagtaggcccgaaaaacccagcttcgtctacgacgacctctaccagatgtgccttaactgttgggatccggacgcggcagaccgacccgagttcgacgacgtgagccgatacctgagacaaacgctgcccatgctgcgctacatgctgtcctttgaacggacccaaaacgcgcagatacctccgtacttaccggacctggagctgattccgtgatgaggtggattccgatccaacaaaaccaagatcaaattgtaaccttaggacaatattttaggaacgttaagtattctattctctgaattccgtccattttatcaaatcaaaagatattttttaagactatggaagatattttttatctagctaatagtgcctaacagtataaacgtaaattgttgtattagtttttttttacacagaaatatattgaacctttgaaatggagtaaaa

SEQ ID NO: 258 - DNA, 1114 bp, Aedes aegypti
tcacagttccggagctgtccaccatcaataagttgaagattttctgtactagaagcagaatgaagggcaatttgttcatttcgtttcttttggcggtgaccatcagccactgcaaagtttcgacagcacctgtaggcaaatgccccgatatcttcgactccaaccacttggtcttcctgccccacgaggactgcacaaagttctatttgtgcggtcataatggcccggttgagaaacagtgtccatcgggactgcactggaactcgcaagccagcgtttgtgattggccagagttggccggatgtagtggtggaagtactgtgcctccaactgtcacagtaactccggaacctgtaacctctactacggcatctcctgcagtcaccacaacggcaccagctgcgaccactagtgctcctccctcttcaactgtggcaccaaccaacaagtgtcctgaattcttcaaccccgatcacgttactttcatgccccatgccgattgttcaaagttctacgtatgcacccaggaaggtcccgttgaaaagagctgtccatctggacttcactggaatcaacagggtagcatctgcgattggccggaggtagctggatgtgtggccagtgcatcgatcccacctaaggaccgtgaaaccgttggtcagtgtcccgaactgtacgatcccgagaatgaagttttcctagctgatgcgtcggactgctccaaatattacctatgcacatggggaggcatcccggtactgctgaactgtccagctggactccactggaataagaacaccaatcaatgtgattggcctgcccaagccggatgtgcgcagtttgatcgagatctagtcttcaaacactcgaaaccaattgaaatttagtcttcgaaagtatctagagtggtttccgattgcttaagtactgtgatacagtggttccgatgacgatgacacattcaattgagagatgttatcagtgtgttgaataaaaattattatccagcaggaaggttaaactctgtcaagtgtttatacgtatttgtccatcatatctgttaccaacaataataattgaaatacaggtgggattcgctcgttgggggcctgat

SEQ ID NO: 259 - DNA, 2088 bp, Aedes aegypti
atggtaaactttgctgaattcagtgacgaacatttggtacgctgcactatcggatacgcagtgtttctgcttcaacacgattcgtctgcgccagatagaggacaaaaattgcaatctcagctgtcgccaagtgcggagcattcttgtggcggtgataatgcgcaaagtttctacgaaaccggggtggatgtggccggaccggttaagaatctcaaactggcagaaaaggaaacggaaagcacgatcaaaatttcttgggatgctccgtccttggatggagtgccggtggacgagtacgagatcaatgccgtcgcactgtccacctttgccaactatcgactgtatccgatgagctggagtgttcacaataactcgcagtcctttgaactggccagtttggttccggggacgcgttacaacataaccgtgacgagtgtttcggaaaagggcgccggagggatggcttggatggtggcccaaacggagattggcgtcccggacccggaaccggaagaaccggttatattgcgacggctggattcgaccgttcagatccagattcagaaggccattaacaacaacggcccggttaactattaccgagtggtggtgcactacgtggacgatgatctggtgcaaacgtttgacgagaacctgctggatacgtatcaacggtcgcgggagaagggcgttccgtactacattgctgccgaggtggagatgaaggaggactcactgctgttcaccgtgggcgacaagcgacactatcgaaactacttcaatctggaaattcctgcccggaagcacgtgcacatctccatcggaatcgtcagcatcttgaacaacgtggtaaaggtgcggtacgctaccacgacccacgagcagcaccagcacccggatcaccaccacgtgaattctaccaatgctccggagcggaacgaagcgctgatcacggtactggccgtggcttgcgtcctcttcggaatcgtactgttggccagtatcgtcctgtacgtttacctgcgctataaaacaccgagaaatactcgtccccttcgggatcaccacgaaatggccctgcagggaccgatcttggaagtggagaacaacggctttattccggacatttacgaacagcgcggattcgaggcggagctgcacgacatcattgaatctctagcaccgcaccagaagcaccctcggaagcatctgtcgctggagatcaacaccatcctgggttcgggcaagtacggggacatactcaaaggaagtctccaacgcgaaggcatcgaactcccggcccaggtgcacgtcatatccgacgacatggacaagatcgatcagattggcttcctgaacgagttccggcgggtcatcaagctggaacagcacccgaacgttctgcagctctacggggtgtgcgtcacgccggactggtgctacgtgctgttcgaggagatgcagaccaccctcaagcagacgctgctcaacgcgaggataccaaataacgtgaacagtccaaagtttccaccatctcggaggaattgtcgtgacattctgtgctgtgtgcgacggcatgcagtacctggtgagaacaatatcgtcaacaagaagctctgcgcccgaaccgtctacgtcaacaccaagttcgaggtgaaggtaagtgccttcgggccgccactctacggggacgacaacggccagcaggtggacatcatccgttggaacgccccggaggtgatcaagttccagaaccacactgccaagagtgacgtctggtcgttcgggttgctcatctgggagtgttgctgtttgggcgcgaccccattcgggacgatcaccaccgataacctgtttgccagcatccgggcaggcagtaggcccgaaaagcccagcttcgtctacgacgacctctaccagatgtgccttaactgttgggatccggacgcggcagaccgacccgagttcgacgacgtgagccgatacctgagacaaacgctgcccatgctgcgctacatgctgtcctttgagcggacccaaaacgcgcagatacctccgtacttaccggacctggagctgattccgtga

SEQ ID NO: 260 - DNA, 3264 bp, Aedes aegypti
gtcaaaaaagaccacttcttaacgattttactgagaatgtgttaatattttcacatttgcccttattcatgctctgcatgagttctgttgttcttaattttggcacccggctcttttgagatgtaacgcgaacatcacgatatcgcccacctctgttttgccgctcttttgacatcacttgggttgccagcgcgcaccttttgatccctttatctgtcatcctctcggtctcgggcgcacgaagcttcgccgcatcggaaaatttcccctttggctttggcaaaaattgaaaaccttttcgcgtcgtctggctcgtcatcagcttttcggagagcgtttcctttttttcggttttttgagtgctctacagtgttaaattccgaataattttatcgccatttcggtgtttgtgcgtcgggtaatgcgatcacggtaaaatcggcgccggtggaattctacgaaaccgaaaaacgctcttgcaaagtggaagtgactggctgatctgggcagacagtataagaagaataaaaagtgtgtcccgtttttctcggaccccacaaaacactttgtcaccgaaaattattcacataaccggagtgtggcgagtttggccgattcgttgccggaactttcttggccgttttttctagtagttgtggcaagtctatctatctatatgagtgcatccgtctggccaatcttccggacgtatttcatcttcccctgaatcctgctgaaggcgttccggcatgtctgtgacatcgctgctgtcccgcatcaaagagttcgtggtcgaaggtcgaaagcgaaaaagcgaggaaccgtcagaagcatcaacaattacttttgccaaatatcgtcgaatcacggacgatttccccaaattcatctcgacgccgttgagtaatgattttcattccaagtcagaaccgatctcggacagattgaggatcccggtttactccaagaaaatcatgtcggaaggaacgaatagcaagcagagcgcctatttcggtgccaccggcaagacgcggctcgagtttgccgatattgaattctccgacgacgaggacgagattgactggatcaatcggcagcatcaacagccccagcagcagcagaaccaccatcggggtcgggttagcaatgtcggagttggcggtggtggggtcactgcctcccttcgacacccgccaccgttgacgaaaatcaagccttcccttgcgccggttccctcgctgtttcccatccggacgaagctaaccaatggcactgcagatgggtacaacagtcgtccatcgtcggatacgttcaagaaaccgttcgtattcaaatctcaaccagcgacacaacagccagcaccaccgccgccgtcacaaaccaaacgcaactccatcattgcccagagctacaacatgacggaggtgaacaagtaccgagccctgctgaagcgactgctgccgaatctttactcgccggaggaaccgcaatcggccagcgcatcgcgaaagaactccctactgctgtcgacggacgatatcaacctgtcgtcgtcgacggccatcaatcacagccacggggaaggcggccactcctcgaaggtggtcggtccatcgaccagtagcgcggcgatacgctcgattccggtgattgacctgtcgctggaggagagcgactccgagggacggaagaagcgcacaagcttgttcaccaccgtcgacttgacgcagtacagtttgaccgccgaggacgaagctgaaacagctcaagtggtagatccggtcaataccctacatgagaagctccaaactaacagcaagttccgtgaggacatcctggacacagtgcagcgcaagtatggcagcacttccagccaacgaaaggagctcatcgcacaggaacgggaaaacttgaaggagcttaagaagagcacccacgagtatgaggtaccgttcgagcggaagctgggcgatttcatgctcaagtttgacaccatcgtcctggacgaggaagaatcggaagaggatgaagaggcctatccggagctgaccgacgagcaccagggtgtgatcaagcgggccctctacggcgggtcgcgttcggaggtcatcatcaacaagttcaacatcagcattactcgcaacgatctggccacgctgatcggagacaactggctgaacgacgaggtcatcaacttctacatgaacctgctgatggagcgtagcgagcagcgcgccgacgacggtcttccccgggtgtacgccatgaatacgttcttcatcccgaagttgctctcgtcgggccatgccggcctgaaacggtggacgcgcaaggtggacatcttcacgtacgacatcatcccggtgccggttcacgtcggtcgagtgcactggtgcatggccataatcgatctgcggaaccagtcgattcggtactacgactcgatgggcacgcccaacaatgcggtcctcaacgcactggagcagtacctccgggatgaatcgctggacaagcggaaacaacccttcgacacgagcgccttcgtgaaggagaatatgcgcgaatgtccccggcagatgaatggcagcgactgtggcgtgtttagctgcatgtttgccgagcacgaggcccggaatcgggacattggctttacgcaggcgcatatgccctacttccgccagaagatggttttcgaaatttcacagggccgattaattacctaaagtggaaagcaagagagagggagtatgatgtgtgtgcttttgggagtgcaagacttctctgatttgtttgtagaatattgcaaaacaaagaattattgccggtaatgaatcaaattgagaaagtgtagctcgtaagccttaatttataatttagattccagaaggaaggacataaaatcagttttgttttagaaaaacatttacaaaatattctttgaaaaaaaggtaaaacagatcctcgtttgtgtcgcagcacttctcatcacgtttcctatggaagatgatgtgtctttgtgaaacaattttgaaataatcgatagaaattgtgattttttggtccgacacacgaattacgttctagggggtcccgagcagagcagagataacaaccaatcgtgtgtgtatgagttgggaattagaagcgacaggtgaacatcaagtgctagctagcctatttcgaaacagaaaagaacgaaagagcgcgaaagtgtagcgtgacgaaatacatgtatatttgaaaggtaatttcaacaaatttaaa

SEQ ID NO: 261 - DNA, 741 bp, Aedes aegypti
atgaaggaaccaagtcaggaaccggttcagaagagggcccgaatcgagcaggtcatcatcgaggatgacgatgacgaggagcaggaggaacagaacgaacggctaaactacgaaagcgagcaaacggaatacgaagagttcaacctggacgacttcgaactagtggaaggccaagaagtggaccagtactaccagccggaggaaccgctcatcgacaacagcgccatcctgacgtcgattctgctggacgacgaagaggacgacggaggtaacaatgcgctactcatggaccaaggccactacgaaaaagtctacccgtacgagtgcgaattctgccggagacgttactcgtcccttacgaagctggaatcgcacgtgaagtcccactcgcagaaccggatgaagtgcttcatatgtggcaagctggtcgtggtccacctgctgcggcatctccgttcgcaacatcccgggatgacgtttccagagccggtgcgctgttggcactccaagtgctccgatttggaccaagtgttcctggacgtgaatcaactgttggcgcacatggacgccaagaggatgaggagacggtaggataccgtggctagaatagtgcgtaaatcaagtgcctttttactattaatatattatttaaggttgatgagactgtacatatataaatttttgcgctcaaaccgatagatgcaataaagtgagtatttttgtcgaagtattttagaaaag

SEQ ID NO: 262 - DNA, 3752 bp, Aedes aegypti
gtgttggattctgttttgtccagctggagctaaacgtaagaaccgttacgaagagttcgttacatatcgaatgtgataacagaacaggacatggttggatgacgcagtgatggagatttcttccgcgacggccggcctttctagctcaatggaaacatcaacccactctccgggagagtagagttggtaggagtcttcactgatcgggtgcatccagcagtcgacacccggcttccgacagagcagcttccagttgcttccgtaactcttaagcactaagaagaaaagtaaaaaatcgtccttctgccaagtgggtcagccccaccactcgtcagcctggctcgattcgaaggcggccacaaaatggcacggcacatcatggcggtgtgcgtcgtgtgcttactgtgtgccgatcatttaccctgcaagcaacacgacgccaccctggactccggcacggatcctcggttagcgatgaattccattttggcggtaaacaaagtgcccacggtgaaacggcacacccacgggcacgaccatgatcacgatcacagtcacgggcacgattacggccacgcggatgaggatcagcacgatcacggtcgggaagcagtgattcgggaaaagttggacacttttatggtgtccattttcaaggagtttggcgattccacctccatgacgatggatgtggccggtttcgagaacatgatgaaacggttgaatatgtatagactggtgacggaacggctaggtggaagtagtagtagtagcagtagcacagcttcagcgtcaattcacgatccggacgcggacagtgacgaatcgtgcatcaatagtgttgattttgtgaaccggatagcgattcccaagccggtggcaatggccacgttgcgccccgaaaagctctctcaacttacttacgatagtgcagctagcaacagcaccagtagcgataagtccaatgccaccgtcggaactgacggtggaaccagtagtaatacacttagcaatagtaataggacctccggagggaaatccaacggtaccaacagcggtaacaccacgagcgaactagatcgattgaaagcttcgatccgcctggaacgggacgatctgttcaacatatgcccgattctgttggcgcagttggcatcgaaaacgtcccgacagcgtgccgggtgcatcgatccgaatgtggttccagatctggccaactggacaggtgcaacggcgctgtatccttcgaaggagcacgttggggaacacggagatgacacgatcgagatggcggtctggatctactccacgttggccgtgttgggtgtcagtttgtgtggtttattgggcgtggctgtgataccttgtatggataagcacttctaccagcatgcactgcagtttctggtggcactggccgtggggacactttgcggggatgctctgcttcatttgcttccgcacgccatgatggcaacgacgatgaagaattcacacgacgaaatgatgtacaaaggtttggccgccgttgggggcatcgtattcttctactttatggagcggattctgacggtggtggccgagtggtacaaacaccaggcgaagaaggacaaaccttcctcgcgggtcagggttatgcgagaacccgaatccagttccttgcagcatgccggaagtggcgagaagcagtgcaagcacaagtacagttcctatccctattgctacgatgagatcgcaacggaaaccaaggatgatcaccacgagcacaaccacatggagaatcaccaccacaacaatcataacaatacgacggccaagtgcgccaacaaccatggcggagaacacggaggggaacatgctggagattacgtcggtcttcatcacatcagttccaaggacgattccaccattcaggacaacaataccgtttcgacgaatttggatgacgcgtcgatcgagagcgaaccctccaagccgaaactgcaacccgagagctataccatcatcctgcgggaacacgaaacgaagcaccacggacacacccacatgcacggtcacgtccactcgccaccgggatcgctgtcagcggtcgcctggatggtcatcatgggcgatgggctacacaacttcaccgatggaatgacgatcggggctgcgtttgcgaacaacatcgccggtggattctccacggccattgccgtgttctgtcacgaacttccgcacgagctaggggactttgcggtgctgctgaaggcgggaatgtccgcccgggatgccgtgtactacaatctgctgtcgtccattctgagcttcatcggcgtgatgatcggcattgtgattgggcaccagccggaggcgtcggcatgggtgttctcggtggccgccggactgttcctgtacattgcgctggtcgatatgattcccgagctgacgtccgctcacggtgcggaggaccgctgcaaaacgtccgagttcctgctacaattcttcggcatgacttccggcttcggcatcatgcttctgattgcgatgtacgaacatgatctcaaagaaatgttcgtcgattagatttaaaactgagctgtcgacagaaaaaaaaataggataaaccacaactcacaatacaatagaacttcactactattaggatgtgtctcaaatgattggccactaccggaaccgggccagagcagagagagagagagagagagatcgagagtgtgacctgtagaagtgattgacaagaaccattgtgcatcggtcggggaactatagatttaagcgtgtttgacttcggtaacacttttgagaattgcgaggcggccctccctccaagaagggaagatgagataaacttccaaccggaactagtgtacatagatcgaatacgtgtgtaacgaatttcagttttgacttgaaagttagtaagctaaaagtattagtcgcggcttttcatcttgctcagattttattttttttaatgaccaaaaaacatcaatttctactgataaggaattttccactataattttttgctattataatttcttataattattttaattaatacagtctaaattttacacttttgtacaaaaccaataacacatttttaactacgaaaaggacagttcactatgccattcacgacattctcgctaaacctagagtttcgtaccgacaattatgtgacttaacggggagctgcttgagctcccccccggtatttacagattcactgtttaatcaagttcacttgccaataatgttccatctgatggacgcgacactggtggtaaacatccctcccctcccattgtgcactgttaaatagccgttagagagatacttacatagaaactacaagcatttactaattgaagaaagttttctttctttgtgattctaatttcgattctgaacaacagcgtcactgctgttcatcttttatctacgcaaatcttttgtttctagctcctaagtaggtacgtaacaaattttagtgacctcttttttctgcagaatgtgctaactttgatcagagtattaggattgtaagttggttgcaagaataggttaggcaacagggagtggtgacgaatggtgatgaaatatcgtcaattttcgatgaaatgaatttgtctttttctagaccacacacacgcactttacagaaccgtgtattcatcagcttctgaatgatggtttacttaagtaagattacagccgtaataaatacacactctttaagt

SEQ ID NO: 263 - DNA, 3207 bp, Aedes aegypti
atgcttcgtgtatccgatgacccaccgtcgaaaacggtatccggtagtgaagaggtccaacagcagccatccgcaagcaccagcacaagtagcagtagcagtaacaactacctgacggtggacaaaaagaaacgccaggtgacgctgtgtgaaacgcaaaccaacttggcctgtggtggcactcaggaacggggcccaatggtatcggcgccgaaaatgtttgcattcgatgcattatttacgaccgaggactcgcagcatgacatatgtggaagtgcactgtcggaggtaataccggccgttctggaaggatcggatggctgtctgctatcgttaggctatccaggagcaggacaatcacgcaccatgttcggaacgcttgcttcggctccgtcggacctcggcgccattccgtgcgccatctcgtggctctacaagggaattaatgagaaacgtcagaaatcaggcgcgagattctcggtccgtgtcagtgccctaggcgtgaacgcgaccaaaccaggctcgtcgtcgagggatttactcgccggccatgcgacagagtcggacgattcgccgggaatgtacctacgggatgactttctcggccggcccacggaactacgtgccccgacggcggaacgtgccgccctcttcctggacctggcactgtccggtcgggcacagggcagcagtaatttcgaaccggcactaatttatacactgcacgtctaccagtacagtttgtctggcaaacggggagtggaaggtggccgaagtcgattgcacctcatcgatcttggaggctgtgccaatcggagtgggggacttccgttgtctggaattggaaacgtgttgttggcgattctcagcggacaaaagcatccacccaacagagaccaccctttgacgccattgctacgggactgcttggccccgttgacctgccacgtggcgattgtagcccatgtggcacactcacagtcacataccgatacgttaacgacgattcagttggcatctcgaattcatcgacttcgtcgtcgaaaacctcgtcaccatctgttcgccggtagagcagcagatcttgccggatcgtcgggacatcaatcgggtggttcttcggaaggccccgatccatccagttccgacttttctcaggataccgtaatctatgtgggtccatgtgatgacgctaccgatggagaacatccaccggtctacttgccaagtctcaactctggggataaccgctgtgccatgaataaagtcctcaaaggttctgcagcggaaaaacccacctcaaccccaacagcctcaccacagaaaaagaaaaatacttccacatccaagcgtaagagcgacacccttccccatcccgggagaattagtttgttcaaacccgattcttacctccttacagctcaaaatcctgtcccagcaccgatccccactcgtaccgatagtcttaagaggaatcaaacgtacaatcaacaatccgtcgctgcaggacccgaactggtggctaatgctatccaaatcgcttcccagcatgcttcccctaaaattgtagccggagctttcaagcatgtagctggcgtgagtagaggctccaacatcccaacgcccaagagttcacccatgagacgtcctactcctgctgcggcttcagcagctggctctgcaacccgtgaaagcccagctcggcaacttggggaagaaaagtggatcgacggtcctcgggtatcgaaatccaaggttcatgaagctcgacatctgctaagagaaatcaaccacgtcaagagtcacgaaacctggattgatggaccgaaaacagcgagcgccacccaggtatttcttcctccagcagcgcacagcaatcaaagttacggtttcatggataaccacaagaaatccatgatccgacaatgggttgagaatcagtccatgcagctactacagcaatccgtctctgccaataattctccagttcatagtagacaccacagttacaatccacctcgtttcaaacccagcaaatccgatgaggatggattcgtactcgagcttgaacgtcaggaagagcttataaatccaattgctgataaacctgtgagtaagcatggcgacagccaagaagaggaagatcaggacagtggaccttcggaagtcccaccagcactgccattgatgaaccccttgggatcgcgggaaatttcccacgaaagcatccatcacctatgttcacggcacgtatcgcgagacaacatgagtgttcacagtcagcatagccacaacgctggtatgatggactgtggtctgcaggttacggaagatgacatcgcccggactatgggaggggagcaccccctgagtgcactgagtcacggagacgtatccgtcgtatcgagcttcaacgtcgctggagatgccttcagcgattgtgtaatcggtgatagcatgcggaaccaattcgaccagcttgcccgattgcgggaaatcttcacctctcagttagcaatggcagaggtgactccggccttccgtctaggtgacaccggtagtgtctacagtgaacctgcctatcgcttcaacacaggggctgccagcgtttgtagtgagcctgcgtaccgtccaccgagtcctcgctgccgcgactgtcggcaatcgctatccctttcccgcagtcccagtcagtgttcgttacctagtctcaatgggatcgtcgcaatagccggtatggagcagtacgcttcccttcgacatcctgacggggcgtcggacccgaatctgccaaaattaggggaaaacaacgaagaacccatagaccccgatgaacacatccgtgaaaaccctttagcggagctcgacgaacaggaagccctgaaagaaagtacctctcttcttcctcaacaaactctcccaactctgcctcttcttccgctatccactccagaagcctatgacagtggtcacgattcgactcctcgaacctcgaaacattccggcatttctcggagggcggaaagtggatatcacagcgttggaaccgttcgtgacagcgacgaaagcagctttggatcggctgcctcccgtgccaatcagaaatccaagaaacgaaaccgccatgacaaatctctctgccactggctgcggaatcccttcaactgtacctatccggacacggagggcgacgttagtgacttttag

SEQ ID NO: 264 - DNA, 1767 bp, Aedes aegypti
atggccaggaatattctacaactgtcgaaatttccgcgagttcttttaaactcccaccgtaactattccgaggcatcagcacaatttccgaaaattacaactcactacactctgaacccccgagacaaggatgaaagatgggcagaagtcgacatggaacgtttcgccgacgaagccgatcttctgattgttggaggtggtcctgctggattttcagcagcgatccgtgccaagcagattgccgctgagaagggacaggaaattcgggtgtgtctggtagaaaaggcctctgaagtgggcggtcacatactttctggggcttgtctagatcccgttgctttgaacgaactaattcccgactggaaggagaaggaagctcccctgaacactccggtcacccatgataaattctcgtacctgacgaagagtggtaaattgccaatccccatctttccgggctggcctatggataaccgaggaaattacgtggttcgattgggtcacgtagtagcatggctcggtcagcaggcggaagaacttggagttgaaatctaccctggtactgcagcagcggaggttctcttccatgaagatggctccgtgaaaggaattgcgactggcgatgttggcatttccaagtctggtgctccaaaagacactttcgcaagaggcatggaattgcatgctaagaccaccatctttgccgagggatgccgaggtcatttatctaaacaactaatgaccaagtttggcctaaatgctgaaaacgatcctcaaacctacggaattggtttgaaggaagtatgggagattaaaccggagaatcacaaaccaggcttagttgagcacaccattgggtggccactggataaaaatacctatggtggttctttcttgtaccacttgaacgaaccaacgccactcgtttcagttggttttgtaattgggttggattacgtaaacccgtacattatcttcgagggaggcaatcgcattgcatatggagcacgtgccttgaatgaaggtggcttccaaagccttccgaagctcacgttccctggcggatgcttggttggatgcgctgccggtttcatgaacgtgcctcgtgtgaagggaagccactatgccatgaagagcggcatgctggcggctgagagtgcctgtgaagctattttatctggtgccactcaggacaaaacaggactggaaccgaaggactatcctgacagaatcaaagaatcgtatgtgtggaaggatctgtacaaggttcgaaatgcccgcccaagtttccataatgcattggggctgtttggcggtgtggcttacagtggatttactctgctggtcggaggacgcgagccgtggaccctcagacatggcgctccagatcatacgcgcttgaaaccggccaaggaatgcaaaccaatcgaataccctaaacccgacggaaagataacgttcgatctgctttcatcggtagcgttgaccggaacaaaccacgaaggtgaccagccggcacatttgaccctgaaggatgacaccattccggtaaagaacaatctcgccatttatgacggaccggaagctcgtttctgcccagccggtgtgtacgaatttgtaccgaacgaagagggtggcaacatgaaactgcaaattaatgcacaaaattgcatccactgcaagacatgcgacatcaaggacgtaacgcagaacatcaactgggtcgttcccgaaggtggcggcggccctgcctacaacggaatgtaa

SEQ ID NO: 265 - DNA, 1104 bp, Aedes aegypti
attacatcgctccggccggtgatcgattcgggatgctccaagcaggccctgttcctgttctgttcgtcgctgttcccgctgtgttcggccaatgccccacggccggtgcaaccgtgccgatcgctgtgcgagcaggttcgcaaggactgtttcagcgatgccgttttcagcaaactgtggccctcctatctggactgccggacgctgccccagccggagaaccacgggctgtgcatgcagcaccccaattcgctcctcgagcccggcgccacccggccctcctcgggccatcattccaccccgccggtctcctgtcccatcaactacaccctcgagtacgaccagtgcgtccccaagtgcggatcctcgatcgatgccatgtacaacgcgcgccagaaggaaaccatcgagttctggaccctgatcctgtcggcggcctgcttcatcttcacgctcatgtcgctggtcacgttctggaccaaggcctccaagttcgagtacccggatcggcccctgctcttcatgaccctctgctacaacctgatgggtctgtgctacctcgagagaactatcctccacaacccccggaaagaattgatcgacctgctggaatttcgccaagaatgcaacataacgtcccaatgcctggcttactacatcatcaagaactacctgctcatcagcgccaccacctggtggctgatcttcggcgtctgctggtacctcagcaccgccaagcaatggtcctgtgaagccctcgagaagaagtccgggctcttccacgtgatggcctgggtcgtaccgttcgcctcacccatcagcgccctcctccgtggcaacatccagaagttcgagctcacaaacttctgcaccgccaagggcttcaccgaaatccctgccctgatcctactccttgccggagcgaccctcatcctcctcgccctaatcgctctgaaacgcctcaaatccacctggaaccagagcgaaaccctctccaaagtcttcgtccgggtcctactcttcgccatcatctacctcatccccgccctgtccgccatcatctgcaccttcttcgaacgcatcgagaaccccatcgaaccttgc

SEQ ID NO: 266 - DNA, 1876 bp, Aedes aegypti
ctgctgtcatgccggccggtcgtccatccatcccatccaggcgaagcggcctgtccaatccaacccaactgatgatggtggtctctgtttgttttgttgttttttgccctctgcatttctattcctggcctgcacacctagccgtgctccgatgatgccgaatgccgctggcaattgagggtcgacggcgtggtggtggttctcttccgtagttgtgaatttctccagcagcaatcagtcgttgctgcagccgctccagcagctgaacggtccgaaatatcgtacaaatctgtccagtgccctccatgtagcgcgttgcttttttttcttggatattattttctaatacgaggtggtaattacacatccacctaccgggagaacaaacttacgttttgatacagtataatcgccctcccacacctaccagtgaattactattattacggttggcaagaaatgttttacaacaacaacgtcttatcgtcccaactgaaagcttgccggaggacttagtggatggctgtgaaggaagaaattggtccatcgggaatgcagcaaagttgtaagagtgaattgtgagcactgctacatacaaccagaggggctcgattagatcgataaataattcatgcatattcaattgcacgaagttgcggttatttcgagtcctgggaggggttcatcgatacaactgtaggaagggagccaccagcaaggacgaacaactggtagatgcatcgctacaaggttccacagccggatgagatacaaaagtagccggggtccggtgctaaggtcaagcgaacgccgccgtccacagagtatatcgtcgtccacctccacgctactgccccgtgtggttctgaatcgcatcgacccccgcgagtttgagcgcatcagagtctcgtacaaggttgccatccggagcacccgcagcagtcgtaccagcagcggtgcccaccctggtatgaacatgggccaaaagatcagcggaggtgtcaaaacggtcagcagccgcgaccaaccatcgccattcattccgaagatcccgcgcgaactggcggcgcacttccagcgaccggcccgtctcgatctcctgctcgatatgcccccggccgcccgggaaacacagatcaaatactcctggaactcggaggaccgctcgctgaatgtgttcgtaaaggaagacgacaagatgacattccaccggcacccggtggcacagagcacagactgcatacggggcaaggtcggcttcaccaaagggctgcatgtgtgggaagtgttctggtcgacgcggcagcgaggcacacatgctgtgatcggtgtggccacatccgaggcaccactccactccgtaggttatcaaagtttggtcggttcgaacgatcagagctggggctgggacctggggcgcaatatgctgtaccacaactcgaaaacctgccccggagtcacataccctgcgatacttaaaccagacgaaaccttcctagtgccggacaaattcctagtagcgttagacatggacgagggaacgctcagcttcatcgtcgatggccagtatctgggggtggcgttccgggggctcaagggacgaaagctgtacccgatcgtgtctgccgtctgggggcactgcgaaatcaccatgaagtacatcggtggcctcgatcccgaaccactgccactgatggacctgtgccggcgagttatccgccagaagatcggccggacgcacatggaggagcgcattgaacagctccagctgccacagtcgatgaaaacctatctgctgtatcgggatcgaagataatagacaacccaaaagccgactattaattatttaataataattattatcgcttattattat

SEQ ID NO: 267 - DNA, 2743 bp, Aedes aegypti
ctccgtcgtcgttcgtcgcgctaaagaaccgtggccgtggccttaaattagtttcctcgcggacagtaactggatttcagtcagaatataaccactaactgttcgaatcgtgcggcagcttttcgctgcagaagattttccgctggttttcactcaacggggactcgatccgggatgccggaacagaatcagaaccagagcggtgccccaggggctcccgctggcggcgaagggcaacccctggtggccaacgatggaaatgcaccccccggtcaagctcaacaagcacagcaaccaacgagagcggaatcattctttgccatcacgaaatctctgatcctccgggccatggtcatttacttcatttcgtacatgttccgcaggccggccccgaatgccgaggtcaatactcaggccgggggcgccgcagggcagagcaagattacggcatggaatatgttcgagaatggaaccatgttcgatctgcacgtgtacatctcggaggatgcccaggaagtggacttcaatgaccccagcgcgctgatttggcttcaggaggatttgatgtacggagattggtacggaggtcgggatggcgatggaacctatacgctgagcacccagattaaggcatcggatcggttgatgaacaacgggtccatctatctccatacttatgtcacgagggctgggaagagtccaaatccggcagctggggatgactatgctgggaagtacatgggatatgccacagggatgctgagcaagtacaagaagattaagcgagtcaagacgcacaatttgcttgccggagagaaggagaagttcgagaaggaactggacaatgccctggtggaggaccggatcttagcccactggcatccgaatttgacgatcaatctggtcacggatcaaacgaactgggtcaagggatcagttcctcctccgctggacgaatatgtgaaattccttccgggagcccaaacgtatcttccaatcgtgttctacaacgactactggaacatgttacgagactatcagccaatcaatgaaaccacccctgtgttgcaactcaatctttgctaccagccactttcccttttcaagtggcaactttatgccgcccaaaccatgcgtaacaagtggacaaataacatcttcggggaggctttgactggcggagttgaatcagatgaagatcaggactccctgaaagagaccctcctagaaacgaatccctaccttctaggcatcacgattgccgtttctattttgcacagtgtcttcgaacttctggccttcaaaaacgacatccaattctggaaggacaggaaatcgttggagggtctctccgtccgatccgtcttcttcaatgtgttccaatcgctgatagtcctcctgtacgtattggacaacgaaaccaacttcatgatcaagatcagctgcttcatcggacttggtatcgaagtttggaagatccaaaaggtcgtaaatatcaacatcaacaaggaaaatctgatgtttggattcctgcctaggatcaccttctcggacaagggatcctacgtcgaatccagcacccgacagtacgacaacatggccttcaagtacctgggctgggcctgcttcccactcctcatcgcctatggcatctattccgtgatctaccacgagcacaaagggtggtactcgtttgtgctgaacatgctctacggttacctgctgacgttcggattcatcatgatgacgccccagctgttcatcaactacaagctgaagtcggttgcccacttgccgtggcgaatgatgacctacaaatttttgaatacattcatcgacgatatctttgcatttgtgatcaagatgcccaccatgtaccggctgggatgcttccgagatgatatcgtcttcttcatcttcctctatcaacggtggatctacaaggtggattcgaagcgaatcaacgagttcggcttctcggccgaaatgctggaagagcaggaagccaaatccaagcagacgaacgcactcacgagcggtggttcgggtgacacagtggccgctgcttccgccggtggagcttcctcagacgaatccaagagtcaaccgtcgtctcccaatgccggtggcgccaaaaagcgaaagaacaaaaagtcttctcccaaagctaatgctaacaagaccgttgccgataagaaagatgactaattcctttcgacatgctcattttcggttttgctacgcgcgttaagttactattacaaaccacatttaccgccgggaaggttgagatgcttgaccttagctctagattcacgttgtaggtagtaagacaagtggtgattcgtctctaaattattgaaactatttgaagcatagctattgtcgctgtcgttttaccgttccatggatggtagaatgcgtttgcaggcgatttttatttctgttaatttcgaatcccagttggaactgcaatggcagccgtattttagcttttaaacaactagaactctagataatataaccttgcggtaggatcccactttgagagacgctcgtatcttttgaaatgcaaatgtttcggagcgaaactaatcgttaaaataaaaaaattaaagaactatcagacgacgaatatatttatccactgtgtagctaaaaatgttgcactacgtagtattgtaaaactcaacttcgggattacgaaaccaatataaatgaagataataaaaataatgtattc

SEQ ID NO: 268 - DNA, 1637 bp, Aedes aegypti
gttaccccattttacggtacctactttgcaaacctagtagcaaacattgtatggaaagggaatgagtagtccgagaaattttttttttcatatcaatccaactgatttggcgtcgacgcagttcacgccaccttgaggagctcacagtgccatcagaaattgaatgatgagaagctttccgttggtggttgtgttaattggatgtgtctcgtgtggcgagctaagcgatgacgggtcaggattgaatttatgcagacagaaccttacggacatcagtccgagtacagaattgatcagaaaagcgccttccactgttgaacacattacgttatgtgaaaataatataacgacggtcaatccttcatcgttccaaaaattagatggcttggaaaaattgattctggacaacaacgaatatttaaatttcccttccaatggaagtcaattcatttatcagggctctcttacggattttttgtgctttcgatgtggcgtggacaaaatatacaacaaatcgcttgctggaatgccgcgtctggagcaaattaatttgactgaaaacaaaattacacacattgaaggtggagcttttcagggcaatggaaacctcaaagttatagaattgcggaggaatttgttacaacgtgtaccaagagagatggtggaaacacttgaacatattttgaaagtggatttaagtttcaacaatgaactcgctcctgaaggtgatcagccgttcttgatcagcgatgctcttgaagagttatggtgtatccaatgtggttttgaaactgtggataagcgtacattttccgtattggtcaatcttaaggttttatatctagaaaataacaaaatcacacaggtccacgctcgggcatttgaccaaataactctaagacgatcggattcgggaacaaatttgctggtttcgcttgaaaacaacaacctcaaaagaatcgtctcagaagtgaaagctggtctgcagttgtgtctgcataacaatactattgaattggaatgttttctcagagatatcccagataaagatagcttcgtatgccgcaattcaactcatcccgaagttgaatgtattccaccaaccactacgacactggccacaaccttgaccaccgagtcatcgaggacaccaacaatctccgccactatctttagcactatcccaattaacaccgatccaaggcaagctgcaaataaccctgccaccagtccagcttctacaacaccaactccggtaaagcctcctgaagaagtctacggcatctcggatgcctatatcagtggatatctaacattgctctatgtagcacaaatcatcgggcttgccatgctttccgtagtttggtttaggctgaaaaaatccgattcagaagtggatcgatacgcggagaccattgtgaatccgaacccgaactatcgggccatccagtgacaacattttaggcttacaattattagtcatcgccatcaggcagcattttattcgattgatatcagtagctttaaggacggatcggattgactagcatgcgaatgaataatctcccttgttgataagaatttgtagggaaaccgttatcagttatgaaaacaaataaaccaacgaattgcgaacg

SEQ ID NO: 269 - DNA, 1894 bp, Aedes aegypti
aaacatgacataacaaaaaatgttgagtcatagcagtcaaaaatattatttattaaaaagtgtacgggcaatcaaaagagcgaatcaaaacagaaaaaaatatacaccagtccgatcatcggaggaatcgcaatccccacgagccattatagtcgttccgaagttctcgcccgtaacagttcaagttcatcaagccaccaggacggctggcaagcaactcggctcgtgctcccttggcaaaatccacacccaaaatccatcggttcagtattcgcgcgcgaagcgtggcaagttcaaaagcattctaaccgtcagctgattcggaagcacttttagtcggtgtgcttattgctatcttcatcagactcttactctttcgagggtttcacttttacttagtggtttcgcttagaagcgtctggttcgagaagtttcataagaggaaatctcttcttaccccctccccgtgtgaactcttcgacgtcatctggcaccgttgattctgcgatgcgtcccctagttcgcagtaccagcacgatgtctctagtgccggttcactaccgcagctggtgggatgactgggatctgccactgtattcgcgggttatggagaagtccatcaccgaagaggtcctcagcgatgatcccctctggtggcgtcatcccccgatgcctccgctacgctggtccagtttgtggcgcccctggaagtacttcaccctgcgggacgtaggctcccgggtcgattcggaccgggaaaagtttgtgatcgaagtcgacgtgcatcagtttgccccgcacgaggtcaccgtgaggaaaaccgataaatacatcaccatcgagggcaaacacgaggagaagcgcgatgagcagggttacgtctcgaggcagttctcgcggcgctatctgcttccaattggatatgatgcaaacctggttgtatcatccctctcctcggatggagtcctgaccgtcactgccccgagaatcggtctgccagccccaaaagtggagaaattcgttcccatttggcacaccggcaagcctgccatcgaggataagaagtaaaactcgttcacaaatcgtgagccgaagatgtcaaaatatcaccttcaccaaagacaacataccaaagaacgagcgagtaaaacaagctaaactccgtacatctaccaaaagcagttcagaaatcgaaatctaccagagaccacatttgaacccactgcccctcctcccaaatttgaacagctgcagttgaagatgaaaagtcctatatttcgaatgtttggtttccgtttcgttttttgttgttgctctcattttccattgttttaggtgcaaccaatatggtttgttgatcattgtattttatttattcttttcccttccattattgtagttttcgaatcgggttctaccttaaatagattttgttgaggcaccttacagctcagacatgatactcaccttgaaaacccgcgaaaggcacccgaaaataaaaataagcataatataacgaacagcgccctctcgcgtagcagaatggcacgatatccaaaactcaatcgggaaaatattgacagaaatcaaatcgaggccacattgtgatgcacagacagcagataacaataaaacgcaaacttcaactcaccagacaccaaagattgcgatgatggtaggctctcggagtggagagtgcaatggatccgtcgtcgtgaaataggcttagaatatcatcgtagcgaatgaaagtgactaatccatcctagctggcatgtggcacaaaatgtgattcaataatagtgtacgttatagatgtgaaaattttatcgatacatttgattgattgttagttaacagaagaataaaccgtcacgttttccgaaatacatca

SEQ ID NO: 270 - DNA, 1048 bp, Aedes aegypti
atgcgtcccctagttcgcagtaccagcacgatgtctctggtgccggttcactaccgcagctggtgggatgactgggatctgccactgtattcgcgggttatggagaagtccatcaccgaagaggtcctcagcgatgatcccctctggtggcgtcatcccccgatgcctccgctacgctggtccagtttgtggcgtccttggaagtacttcaccctgcgggacgtcggttcccgggtcgattcagaccgggaaaagtttgtgatcgaagtcgacgtgcatcagtttgccccgcacgaggtcaccgtgagaaaaaccgataaatacatcaccatcgagggcaaacacgaggagaagcgcgatgagcagggttacgtctcgaggcagttctcgcggcgctatctgcttccaattggatatgatgcaaacctggttgtatcatccctctcctcggatggagtcctgaccgtcactgccccgagaatcggtctgccagccccaaaagtggagaaattcgtccccatttggcacaccggcaagcctgccatcgaggataagaattttcgaatcgggttctaccttaaatagattttgttgaggcaccttacagctcagacatgatactcaccttgaaaggcgaaaggcacccgaaaataaaaataagcataatataacgaacagcgccctctcgcgtagcagaaaggcacgatatccaaaactcaatcgggaaaatattgacagaaatcaaatcgaggccacattgtgatgcacagacagcagataataataaaacgcaaacttcaactcaccagacaccaaagattgcgatgatggtaggctctcggagtggagagtgcaatggatccgtcgtcgtgaaataggcttagaatatcatcgtagcgaatgaaagtgactaatccatcctagctggcatgtggcacaaaatgtgattcaataatagtgtacgttatagatgtgaaaattttatcgatacatttgattgattgttagttaacagaagaataaaccgtcacgttttccgaaatacatc

SEQ ID NO: 271 - DNA, 2306 bp, Aedes aegypti
tggctttgggaccaatgagcataggttataacttcaataaaatcctttaaatgtttaacatttgttagcctctatatcaatcctaaccaaatatttgcgatagtatactgttaacttagtgtaactccaaaaagtccatatcctgggattgtccattgagtaggttaaggttctagaggtaccgaaaagcatgaaaagagatggcctaaatgtagaataaaacgagacgaaagagaaggctgattaaaattctcaaaactggagtggcattctgaatggatgatctcatattattattgagagctacaacttcctagcccatatattcaaatgacctgagcctccggtcaggttcaagacagtttattagcttatgtttgttgactgtactgtgaattatacgacttgaacgacggtacttatgatccgatcgcatctaaacaggttcgtttttgcttcgactcggtcttcttgccattttcagttcgtcagtcgatcggaacacaacttttataagacagcgcttcatcgttatcgttggtattgatacacaagtggttcattgataccagttcgcagaaaacggaaaaagtggttgaactttataaaaatggcgaaatttctggttctgggactcgtcgttttggtcgcgattgccgcaatcgatgctgcctcatttggtcagtgtccggtgtcttccaaggtgcaaacctgcactccaaaatgcctgagcgatgttgattgcagcactagcggaggaaagtgttgcccgaacacgtgcaactataaatcttgcgtcagtcccaaccagcttacgcagagtggatcaagcggatcgagtggaagcaaatatcaatcaggcggagccggaacttactgcggaaatgttaaatgcagcgctcacgagaaatgtgacttggacaaatcaaccaaacgccaaaaatgtgtacgagcttgaactttatttgatcggaaacaaattttacaaactttttacaaataaatagacactgagctaaaacatttacacttttttcggatgctttttgtacgaaggtcgcgcaatatcgtcggctgtgatcgagtacgatccagatagtgatgatgaaacgtcagcctttccatttggatcttcctgtggcccttctccgatggggatggagatctccttcaccaatcggtagcctttatcgtccgcaacgtaatgcacttcacgcttgtagaacccatcactgtatgcatacattcccttcagtgctaatccttcgcgggtttcctgtcgttgaacggtttgatcactgatcgtgtccgtgatcgacgagtcatacgaataatgtgctgatttggcttgaaattcttccaaagctttatcgtcatccttccgcagattcctctcgtttttcctcgcagattcttgcggaacactatcaactacttcatacttgtcacgatcactttttacaggaagtgcatcggttttgccgccaacggttaaactgttctgaggtgcagctaaacacagcgtgccaagtgtggcaagtataacgattgtgcacctgaacgacattgctcttaacactactctagaaacaatactaattcctcttcctggccagcctgatctatatattgaatttttcgtccaaggtcaaagacgaagacttcatgccacctaaccggccctgagtgtgaaggagcggtaggcttcttctcttgtcgtctcttaacaagttgttgtacccatcttaaattatttaccgcttctgccgtgcaccgtatagagctggtaagtgccgttggcactcgtcgtttgtatgaattgttagtacacccatttaggaatggaagaacaacgaacaagtttcactttcttctttgcccaggcgccgtttattggtaatgatcttgcgccgacccaagttcagtatacccagataataaccgatagttcgataaactctaccagataacgaatgatggtggggaggatgcgcttcaatgtccttcggcagttataaattgatacgtgcgtacaataaagtgattgcatatagatactactcctcacctcaacacgtgagtgcgtaaacctgtcgaacaagcggaaacattgagatgttgcactcacatgcaatttagaatatatactgcgtcttgcttagaaatatctactaagagatgttcgaaattcattagcattcaatttgcataaatatctgtaataatttgttagtcaatcatcaataaagcaattatgcaaaatattttcccgggatgaatgtcatatcacatcatatcatgtcggc

SEQ ID NO: 272 - DNA, 11007 bp, Aedes aegypti
gtgtgcttgtcttctcggtggctttgtttacgaaattagtcgcgtcgtttgcacgcgtctcaacggtttgtttgcctccgtttgtaagtgctcttccgcccaatatgtcgtaatacaccttgagcaggagaaaactaccctaccgacagtgaacagtcgacacatcatcccgtcaggttgttatgagttttataaaacgcagcgtaagaagcgttctttgttcttcagaacgacgtgatttgtctcgcgccacgccacagtctcaagcaatatcctcagtgtagaaatcccaggagattcctaccaggcgaaaaaaacgcaactgacttgatgaccatcgtccactgtccagttgtgaccggtgatagttaccggcgaatgaatcccgcaatcagtgagcatgaggccgcgtcgctggctgcagaaatgttcgatcatttctgcgcggccacgaccatgcgccagattctcggtttgtacagaaacatgtgtgatatcctaaacctgaggcccggtccgctgaatgaattctacccaaagttcaaagcgaaaatccgcaactggaaggcgcaagcgctgtggaagaaattcgacgcccgggcctcccatcgggtttacaacaaaggtaccgccgccagcggaacccgtgtactagtcatcggcgcaggaccctgcggtctgcgtacggcaatcgaagcacaactgctcggtgctaaagtggttgtggtagaaaaacgtgataggatttctaggaataacgtactacatctgtggccatttctgatcaccgatctcaaagcgctcggagcgaaaaagttctacggtaagttctgcgccggttcgatcgatcacatctcgatccggcagctgcagtgtatcctgctgaaggttgctctgctgttgggtgtcgaggtgcacgaagggttatccttcatacgagaactcgaacccaaagatggctgtggttggcgagcggccgtatctccagaggatcacgccgtgtcgcactacgagttcgacgtgctgatcggtgccgacggtaaacgcaacactctggaaggcttcaagcggaaggagttccgtggtaaactcgcaatcgccatcactgccaactttatcaacaagaaaacagaagccgaagccaaggtggaagaaatcagcggcgtagcgttcatcttcaatcagtcgttcttcaaggaactctaccaaacgaccggtatcgatctggagaacatcgtttactacaaagacgaaacacattacttcgtgatgaccgccaaaaagcacagtctgctagacaaaggtgtgataatacaggattacggtgatccagcagaattactgtcatccgcaaacgttgacacgtccaagctactggactacgcacgagaagcggcaaacttctcaacgaaataccaaatgccgaacctagagtttgcggtgaatcactacggtaagccagacgtggcgatgttcgacttcacgtcgatgttcgcggcagacaactcctgcaaaatcacagtccgcaaaaactatcgattactttcctgcctcgtgggtgacagtcttctggaaccgttctggcccactggatccggttgtgcccgaggcttcctgtccagtatggacgcagcctacgcaataaaactgttctccaattcgaaaaacagcgctctgggagtgatcgcacagcgcgaatccatctatcggttactggcgcaaacgactccggagaatctgcaccgggacatcggagcgtacacgttggacccatcgacgcggtatcccaacctgaacaaatcctccgtgaacatgatccaggtgaaacacctgctggacaccgacgacctggccctgttggatcaaatgttcctggacacgaacgcgctgacggcgggaccggaagtgatcgtaacgaagcggaaacggcgaaccaacgatacggttccgttgggtactgtgctgctgcggtgggtcaagtcccagctcaagggtaacgactttgtgcaggagttgaccgatgcggcgcagtgctttaccaatgggcgggtgttgtgcactctgatcaatcggtaccggcccgatctggtgaacttggacgagctggacggttgcgggccggatgagtgcaacgagctggcgatatcgatcttcgaggatcatctagcaatcccacggatcatgtccggtcaggaatcgctcaccttagccggcgtggactccaagctgtggctcaactatctggagcagatttgcgaggtgttccgcggggaaattccgcacgtcaagcaccccaaactggactacgcagagttcaagcagaagcagcagatcgacagcatggaggagttctccaagctgcgacggttcgcggccctgaaggctacggcaccggccgccgttccggtgatcgtgcctggccccggagccgttgctggcttagggcggaagtcaaccaactatcacgaagaggaacgcatcaaacggagccgcagggtgctgggagcggaatctagtccaatggcctcaccacagaccgacacgacgaaacgagcgaagaaacgccgcagctacgaaaagtttggcaacattgtggagcgaacccggcgcctgcaggagatcgaagcgaaccggctcgatcggcagacgaagcgacgcctggcccgagcccagcagacccaaaacttcttcaccagtcttcacatgctgcaagcgaacactttactgcgcgaaagtggcgacgacagctccagtgccttcgaggactactcgctctttctgtaccggcagtcggcgccggagttcaccgatcgcgtcaaggagctagaacggaagctgctctatcccgatcgcgatcgcggtctagctgcggcgtacccgaaaggtctcgccggagccgatggcgaacagattagcgatcggatcaaatcgatggagcagcggatcggagggaagcatgttccgatcaccgagaagaagccgaaagatctgctgcgggcgatcggcaagatcgacagcagcgattggaatgtgaaggagatcgagaagaaaatcgaacaatcgaagaaagcgaccgacattggcaagagccgtgaacgagttccgaagtggaaccgtgagcaatttttagctcggcagaacaaactcacgcagcagccggatgatgaaaagtacagggacatcgacagttcactgaaggcgatcgaccgacagctgaaagagggccacaatctcgatctcggcgagcgtggcaagaataaggtggcttccatcgctggacagctactcagtacgaagcaacaacagcaacagcagcagcaacaacagcaacagcaacaatcgagtcagaaatcgacatccaaggccgcgttggttctcacttcatcaggcgtagcggagaagtgccatttctgcaagcagcgcgtttatttgatggaaaagatttccgcggagaacctgactttacacagatcctgcctcaagtgccaccactgccataccaatcttcgactcggaggatacgccttcgatcgggacgatccggagggtaagttctactgtacacagcacttcaagctgccatcaaaaacgtacaacaaaccggtgccaaagaagtcgttgacccgaacaccgcaagcagacaaacagcccctggcagccgcagcggcggtagcctcaactacacagccttccacgccggactccaaatcatcgggcttcatcaacttcaatctgttggatcgtggtgaaactccggagcgtatcgagttcgaaaacgccgacgagtccatctcggacggcgaggtaccgatggaggtcatcgacgaaaacgagtggaccgatcggaatttcggaaccgaatcggacgaatcggaggaagaaacgtccagctcggatgagtcggagagcgacagcgattcggactacgaggaagccgcagggtctccgctcggggcgcagacactgcagctggcgtccgagtggatcagcgataagcggttcaacagcatggttgacagtgacgatgacttctatggatactctagtgaagatgatgaagctgattcgcaaacggaaggcgaggagctggctcgggcacgagagatgcggatgcaggaggtaaaactgatgcctcctccaacgcttccaaccgacaccgaaactgaggttgcctcaacgcaacagcctccaccagtagattcttccgtattccctaatcttagcgcccctaatgttaataacccaccaccgctggagccagcagaatccgctgaagatagggctctgaaggagaaaatgctccagaagcttagcgttcgcgagcaatggctgaactcttctgccagcccgtcttcgtcaacacctgtcaccacagaggcgcctaaacccaaaacttccttctttggaggcctcatgaacagtcttagcacgcttatcaaatcggacaaaccagcacccaaaccccaaacgcctccctcttcgtcagctttacttgcaccaccaactcccaacgaaccaaaaccgactactccaattcaaacaccatccaaaaacgaacctccaccggcatccccgtcgccatcaatacgtcaaatgaagtcctccaccgcactcaaaccaccaccatcgccaacaccttctctgaagaagcagaaacgtcctgatgtacctccatccccaacaccatcacgcaaaaaatcgaaaacccctgagattccaccttccccaacaccatccctgaaaaagcaccgcaagcacaagaagtcttccgcttctcctactccctctgccggtagcgaagatgccgcctttgacgaaatgttcaaagacgacctgagcagtggtcgcagtactcccatttccaaacgtcgcagccgtccaaagtcatccagcgctattcgagaggatgccgatgagttcctcgagcaaatcaaaaaggaccaagctgcgctagacagacgcatgaaaaaggttgaggctaagaagttccaaagcaatatgcagtcgatcaagtccgccgtagagggaccccgtattgttggagttcgtagcgaaaaggatgtctccaaatttttcacctccgtcaagaaagaccagtttgaaccgaaaccgaaacatcttcctaacaaggacgtatctgcgttgcaaggagtcaatctgtctaagtatttcccaactagtagttcgactcccaccagcgccaaagcaagtatcggaacaccgtcttccgtgtccagcgttgaggggtctccaatggcatcacgaaagaaaccagatgatgttgaactgatgaaatactttggtcctaatacaacgaagtcttcaccatcgactccatcatcttcaaaggtatctccagcgatatcgaggaagaacagcgttgaatctccgggtgtaactcgtaaagcaatgcctgtcgccatcggtgccaagccagttactccagctgtattagccccgaagcctccggttgtaccgctccccccaaagaaaaatatcctagctttccaggtcgtcaaaaagtccaagactgataccaccgtacaacctgcagccccagtaaaaaatagcctggctttccaacccgtggccaaacaaaagtcaccttcgccaaaacccgtctcgaatgtagctagttctcctccaaagagtacgatcctgagaaaatctcccgactcagacgacaaactgtttgaaaatctattgaaagacgctcaagaatcccccaaaccaatttccaaacaatcacacatccaaaaactacccagccctcctaagcaacctgcaactcccgaagacgaactatttgaagatctgctcagagaaatcgacggatcaccaaaatctccccgtaagattccttccccaaaggcttcaaaaaagtccttaacacctccgaaacgccaatctcccaatctggacgataaactttttgacgatttgctagaagaaggtgacgagtccctgctagacaattttgacgagattcttggtctaccgaaaaagcgacaaagtcccaaacaggtaaagaagaaaaagtctcctccgaaaaagtccccaccgcgtgtatcgcccaaacattctccaccagccgcgaaaaagcccagcatcccccgaatgacggtcaagcgaccaccgttcaagatcattgttccagttaaaatgcaggagacgctggaggagatctacctcgccagtctgtcgaagctcgattcacgctcgacgtcgacttccagtttgaacagcaaagttagcgaccctggtgatctaggtaaggtcgatgaagttttcgaaaagctgctcgaagaaccggaaccgacgccggtcgagaaaccggcagaaccgtttaatattcagccctttcaggccccccagacgaaagccaagtcgagttccaatggagtcaagccgccagaagaaaaagctactagtaaggaagaaacgcagcagaggaccgtggtgtcatcggtattgccggtagttacaccttcaactccaacacaagcgaagaagatcatatctcaaacagcaactccgtcggaaactcccaaaatgcaacgtaaaactgctcagaatggacctacaaccgattctaatatgacggttgtagtcaaagaatctaaaattcccgtatcgacacctgtcttggcaagaaaggtgacaagttctccattatcaactccaactatggctaggaaggtttctcagatttctacggctattatcgtagacgatcaaacgaagaaatcaaatccagaagtcactccatcaaagtctacgggatcgacaccggcaaaggttatgatcactcaaaacataattgctcccaaatcagtcgcaattgttcaaaaggatcttccggtggataacccttctccggtgattcaggatggaatttcgaaattgacggacatatcttcgcctaattcaccactgactgtgcggaaaccaatcctgttgaagtcgtctgttgggctaggcacggattctcagagtaggaccaatgagagtcccaagtctgtatcgctgggaaacgcaaagaatgtagagattcctgaggtaccttttactccagtggtgcgccgaaaagcagttcaaccagaaaaagttcgcgagatcgaggtcgctactaaatcaactacggttacgcctccaaaaactaactcctcaaatgaagctgcggcagcagtttctacgattgcttctggtgctaaatttactccactgaccacgcccaaaatgcctccaaagttggttaattcgactgcaacttctgtgaatgctcctatcgaaaagcaaggatctaccgataaaataacacctaagacaactccagtgatgcctcgaaaactggttcagactcaaattgaacaaactgtaattccatacactttggatcggaaggccacactccagcccgaaccaatcaaggctcgcaaagtggacaaaccagaagctacttctacaagaagtcctaacgaaaagtcaccaatcgaatcaacgcacgcgactcaacaaaaggtaatcctatcagaaacgcctaaatctacggatagttccgaaaaatctaatccactggataaaatcattcctacaatcctatccgttgcggcaaagccttcggtgacacctaagcaagaagctcaaattccgacaaaagtttcccctaagactgacactcaacctccacgagaacgcaagctgtcttccgacgaaatctgtttcgaggaacttcgcaagaaacacgaagctattttccgtggtcaagacggttcgactgaagccacgcaatcgaagcatccagctgaacctaaactggtgcgggtgaaagaagtggatgttcctcgaacgctgtcggagttccgtagtgccatgatcatcagacatccccatacagaggacaaagcgggagaagaagccacccctgtactgcgtgagaagatcaacgaactggccaatgagcttatgccgggagcgaacctcgacgatgtagtcgacgaaatacccattcccgccgagcgtaagaagtcctccttccagaaaatgttcaacaagcttcaacgtgccaaaaccattgctgcaccggaaggctcttcgctgaagagtcttctgacacctttccgacgggaggagtgcaaaatggaagttattcgcgagggatccatcaaaaaacgatcgccggaccccgcgaagcccaagccgtctgaagaaccgaaaaatctgatgcagatcaacctggatcgctcgaagcaaatcaaggaaaagtacacgaaacagaaggcaccgtcgcctcctataccagtggcatcttctacgccgaaagaaaaaacaacccctccatcgttggaacggaagtcttcgttcaaaatccaaactaatgtcgttgaagctcaaaccccgcacaaaccggcgcctgtaccagtagagaggaagcaatcgatcaaaaagcaaagtccacctttggtcaccgagtcatctatgaataaaaaaatatctgaaaaggaagaccaaggtccgtcaaaacctatcccaatggaacgaaagctgtcgatcaagaagcagagcccacccttgagtgcggagagtacaccaaaaccactcgaaagaaattcttccattaagagtcaacaacctacaatcgaacgacgatcttcatttaaactgccagtaccgaaggacattgatcgacagcagagtattcttagtcgagaaccgaagagcaaggatcatgaagttcgcaactttgatgacctgctcgacagtgttgatgcaagagaaatgatcaatttcgatgatttgctgtcttccggagatgaactcgagcagaaacgatccgtcaagtcgaacaacgctgctcttttggaaccggctccaataccagctcctcgtagaagaagtccaagcgtgcaggaagcagccagaaataactcgctgtctgagaaagacttcaagcaaacttcgaaggagttgacggagaaattcttatcgaagacaaaaccaaagccagaggcacttacgaaggtagatccaaaattggaactaatgatgaccacgttgacagaaccggctgaagttttggagcaaacggatttgtctaaggattcaagcctcttgaacgcttcgtcttgcgatctaccagacatagtgaatataaccaagaagcaagctatcgaagcacagccagctttgaagatcttggatcacacagaaaagatcaaacagataacctcgcacatccctcaagagattcaagtttacactctgcatacggaggatcacaaaccggctgaaccgcaaccatcaaccagtggagttaccagtgactatgccagcatcttgaaagacatttcttccggcttgatgggaactgacatagtagagccagtattctacgaaccccctcccacgatcgataggaaacccaaatccgacttcacaacctataaacagatactgcaggacaaagctagagaaccggctgaacacaattcgcagcaaccgcaacgtcctcttcgtaagcccaagccaacagaacgaagtgtttcgccagcggttgccggacgtccattcgataattcgatttgcattgacccctggcgtgcgaagaggtcctcgagtatcgaaaatctagtggttgagcaagtgtttgtcaagaaggacgataaagttgttgacacgttctacatcgttccagagcaacagaaaaagctgaagcgaagatcgaaatctttcgataggttgcaggttcccgggtactcgggtagacgacatagcaaaaagtctttagaagagttgcgcgattttggatttgacattgaacctccgggtacttgcaaaaatcttgtgaaccctcgtttacgacatctgaactttgatgaatcggatgaagatctgtcgagtctaaggaacaaccggagacgagagaaccttaggaaatgtcaatcatctactgatacatctaaactagatgtagaagcgagcagagttgacattgatcgggaatctccgattcctcgtagcacagacttctccaaatgggaagccatcttagatcgtggtattccgtattacaaagagcctccagttcacaagaaagaagatatcaaatcattggagaggaagctggaagatttgaaaacggagtgcaaaccccgaagaaagatttccgggaaaaccccagccatcccgaaagactacgatccggaagaatacgttccaagaatcaatcgtagagctttggatacgtatgatgttcctgattctgaccttccaaagtggtatgatccggatgaatatgttccaagagcccaacgtaaccatgcttttgatcatgaaatccctgtcagcagtgcagtcagatctcgtcgtttgaatgagtttgatattcctaccagtagcacctcgcgtcctcaaagatcatctgcctacgaaatagacgtaccgatcagtcgaacaggcggaagatactatcccgaacctttgcatctggatgatcttccaatgacacatactttacccaaatcaaagatcacttcatcacacgtgccttacacttcaagtaggacctatgacttgccaagcagggatgtccctagaactagatattcccatcgccccactgctgacagtggtaccatcgtaaatcgcagccaaaggctgcacgagaaggcaaataagtacatccgttcacaagtaaccaaaaatgatcccaatccgtacattcgagagatgttggagaatgaaagcgatgacgatgcatatccaataactacatccacctctcatcgcgtccctattaccacaagttcgttccatccaatttctacctacggtacttccgggtcggctgccatgagccgtatcgctacaaaagccattacccaaccatctcggatgactcactacactcgtaaggacgttccttcttcctcgggtagtggcagtagatcttaccgtagaggaggcggcgatcaccacgatcgccgagacaattgtaccatctcctaa

SEQ ID NO: 273 - DNA, 981 bp, Aedes aegypti
atgttgaactgtgctgatttagtgcaatttgatcaatacagcttacagctgtataactatgctatggtggagcgttttcgaacaaatcagtttttcaactatgggaatatagtgacggatccgagaacgctctcaaggttctttaaaccctcagtgtatgtgaataacccagcagatgttggacccagtgctctgctagccgacgccagcaaactttcttcagcgccaaagccacaatacagctatattggactgattgcgatagcgatcctcacctcgccggagaagaaactcgtgctatccgacatttatcagcacattctggacaactacagttacttccgcagccgcggtccaggatggcgaaactcaatccgacacaatctatctctgaacgattgtttcatcaaagctggacgttcggctcacggcaaaggtcactactgggccgtccatccggcaaacgtggatgacttcatgaaaggggacttccgacggagaaaagctcaacgcaaggtccgtcgccacatgggcctcacttcggacgacgacatcttcgataacagctctccaaggcagttcttcccggcgattcctgcttcacccatcatgaaccctgccgcatacatgccaacggcgactgaacccctaagccgagcggctgtggctgcagcggcagcttgcaactacccgaccaccatggaacagcagcatgcaatcatcaaaggcgccatggagagtttctcccggaagcgacaattcgacgtagaatccctcctaaaaccggacgacgccaactcttcatccagcctgcaagaacccccagagaagaaaagcaggcatctacatacgccaacttcgatgccggaaggtccagcactcgtactgccaccgctaggtcatcacccgcatccgttggccgcgttcggaagcctagcagtggccggcctgggacctaagatactaccgaagccgacctag

SEQ ID NO: 274 - DNA, 2228 bp, Aedes aegypti
ctcttgcaatgtgattgttcactaacacatgttagtgaaaacttgatgtttctttacagagacatctatccaacatgtatcaaattaaattagtctctctcacttccttcattcgtaaacaaaatagtattgatctcaaaagagttgtatacatgttttcaacatttcataattaaaagctactaaaatggataatcttaatcagcctatgaacatcaccgagtacaacaccctaatcacgaacattatcgaatccgccgtcgacgagctgatccagaagcgcgaaagtggcaaggaatcgctcctgttgcacctctgtcggctgtgcgcccgggaggaacccctgctcctggacctgtccgagctgcatctggacctgatcaacgagctggccatcagcggaatcgatgccagcgccgggtgcaccaaaatctgctcatcctgtgccgagttcttggggcggatccgcgagttccgctgccggtgcgaggacggccagaaaaagatcagctcgctgctggccgaacggagcgtgattccggacttcttgaacttggacttcatcaagtcggaggaacactacggggggttcagtccgccgggtcacccggcggtagatgaccatttcgccgaagcggatgattccaagattgaccaggatgacgacgatgaatcctcggaggaccatttcgaagaggaaaaacccgcgaaggagtcgaaacgagttcaccgaggtactcaacccaagaattcgaaggcatcctcctctacgaacgattctcggcggcgagttgtcaacgggaagctccagtgggtttgtctggactgcgagcaaacgttcgaaagctgtactaagctgaagaagcatcggcagacctgcgagatggtcggaaacgaaaactccaaacggaggggaccgttcacttgtgatatctgcggacaatcgttgccaacgttgatgggcctcagagtccacgtgcacaagcataccaaaagtggcgcggaacaggagcagaaaccgaccaaaacagcggcgggcagtccaccggctaagctggccatttgtcacgtttgcgggaagtcgttcagcagcacgagcactctgcggtcgcatctgattttccaccggcaggagaagcgactcgagtgccagatttgcaacaagaagttccataagctgtaccgcctcaaggatcacctcaattgccatgcgaacgtccgacgctatagctgcgacatctgcggtaaggcgttcttcaccaaggccattctgtacaaacacactcggtcgcacgatcaaaacttccggaagcacccctgcaccatgtgcccgatgctgttcgcccatccctaccagctgcgatcgcacatgatggtccacaccgcagaatatccgcacgggtgcaaattgtgttccagtaagttccgcttcacgtgggacctgaagaagcactacgccaaagcacatcctccgctaccggaggaagacactccggaaccgatccacgtagtcgaacatcaaccactccctctgcatcaccctccactagatgaggtgctcccggaatcgcttattcctccggtggaaccactactttcgtcgctaccaccactgccggatccggcagtggaagcagataccctccttaaagaaggccaacacgacgatctgtccgtcatgctagcgcacattccaccccaccagcaaccagaactgacgccatcggtggccgccgttcaaccggtggtgactgagcatcccttcggagccgaacacctgcttgacgaagcatcgcgggattttacgaccgattgcttcccggcggatcatttggacgggagccatccgacggccgatgacgatttctatacttttatggaatgttaaggggatagttagtaatgtcgaaagaaaaatgtgatataaaataaacaggcgatctaattttaccacacaattgagtttgtttaaaacttgacgttttgtgttctttgtctcattcaggtgttcaatgtagtcatgtttctacctttcgacgacgtttagtattagtctagcatggtgatttcaatacggagttgaaaggcttttacattatgtagtgctagattgttttcttctttttgccagatgttacgtctcaaccgagacagagtctttttatcagcatcttgttctgtgattacttccacagatattaactctctaacacccaaatttttatttt

SEQ ID NO: 275 - DNA, 7947 bp, Aedes aegypti
tggaaatgctgcttcgctcttgtggtggcgggcgggctcccgctagatgtacacaggacggaagttcatctcctggaattgagagcgagagtacgtcgttcggggtgggaaaagtgaaaaaatagccttaaagatgaaaagtttcatcttgacgagtttttcgtcggtttaaagttgcaatttttactgggaaaagtttgactttaatggttgaaaagttttccaaaacagaacggacccgggctcggaacaggattaggtgaaatcgagcatggtcgatcgtcgggaatagtggaaattttggttgaaggctggcgaaaagtgtgaattctgtgtgtgatcgggctaggatttttcctcccaaaaattgcaagagtgggctccatcatcgtcggttgggcagccgtcgacatcgcggggctggtattcagcctccaggatttttttgtgctgctgctccgctgtgtggtgataaaagttagacattttatttgattgggatgtgaaagtgaatgtgagagtgaaataatgggaactgcgaaaaaaggatatctgatgcagtctgccagaatgatggcagcgcgagcgccctcctaagggggttgggatgtgaaaatttctgcttaaagtggtcggaaaaatggtgattattttctgcgaaatattgattgaatgaaactaagggcagggatgcgtgatacgatgccaaaggtgttggacagtgatacggaatcggagataccagtcagtattcagagtaacaacaatagcgagccgaatacggataatgaggaaaaaccggaaacggacgcccttcctgttggaaggacgtcactcccatcagcagtggaaaatggaaacatcagcgatacggatagcatctgcagcaatcagagcaatacgcgaacgttgcccaacggaaattcttcccaaacctccggaccaagtcttccaccagtcagaccaccaagcccgccatcagctaccgccaatggtaatagctcttccagctgtgcatccaacaatccgaacaactgtggcaactctagctccggaagcactagcagtatcaccaatccgaatctcaaccgtgccgcggcgggaactcctgtggcaggagctgctgatcgggtgaggaagtaccgacaccagaacttcagcaagaacatctacatcggcacgaagaatgcggagaaatgggacaccttgcggaatctgttgcagttcaagaacgatgtggaatttgtaacattcctgcttcggctggcggaggtggacgatcgaaagcggaaaaatcgaatagccaatggattgaatggtgactcagattcgctgcaagatgtcctgccgggcgtcctggtcagtagtaaaagcgaccaatcgaatggaaaacctagcactaagaaaaccaaaagagtacaattccaggaaagtgtaaatataatcaacgacaacaatagcagtagcagcatgcgtacctctggaggtggggcagggatattcgacttccacgaagacgaggatgacaatgaaaacggaccaggggtggagtttcgacgcagacgtccaaggtctcagcagccattgagatcacccttaccgcctagcgaggatggccacagggatgaggatgctgcagccgatggaggcgatgaagacgaagaacagtttattgttcaaaatattatcaaaaagattccgggaagggtcggccagggtggcaacgaagttcaacaggactccattagcagtacaatgggatcggtgtcggaagattctttacataccgaaacagaagtgttggactaccgcattgcggagaaaattaaaacggaaatggaggagaagcaaaagctcgaacgaaagtcgttcggggaggacataccgtcgacttcgaacttttctgagcactctgatcgtccttcggacgacgaagcgtacgatagtaaactggacatcaaaaagatcgatatacgaaaagtgccgttcgatccgaagcttggaacgagtagaaaaatgaaacgggaaacgggttcggttgatcttcgtatagaatacgaagagcaagaatatcgaccgatgactccagaagatcgcaagcctctgctaccaccgcccaaaaagcctaggaaagcaccaacaacgaaaaataaagcctgtacaggatgcggtttgaaacacgggaccgatccatgtccactgaacacgccgttggcagtgataaacaataaaatcgagcttaatgaatggattgaacaaaatgaagaccttattaaaaagcataaaattgtgctgaaacccgagaatccagaagagatggacgatgagaacgaagacaactacgatgacgatgaggatgatgacgaaggtgatgagaatgaggaaaatcagtttgaagaaaaactcgatataattccttcatttgcggaaacctcacttccatcggaattcgaacttcgactagcaccgttggcaacgacgatcagcacagttacaactgccaacagtacaaacactagtcaacaaatgcagattgatgcaaatgagtcatcatgctccttggcagcatcccaatctggcgagcaacagcctcaacagcttcctccaccaacggcaacagttaccaatacgatcaaccatggactgagcatttacacgaagattttcattccgaaatacacccaacttggacctgtaatagggctcgtggccaaagagacggaaatccaggacgactgcaacatgcggtatatctacgaaatattcgatgggacaaagtccacctacatcaacatggagaataagaaccaggccaactggttacggtatctgcgaccggctcggcaccgggatcagaagaattgcgtgctgaaagtgcgcaacgagcagattgtgttcataacttgcatggatcttgaagtcggtagtgaactgctgtactggagcgaggagagcaattcggcttggggcaagaagaaaatggaaaaaacgaattgtggtggatgcaacttgaaatttgatcatcccctctattaccgaacgcattgttcagtgttccatgatccagcgttcagtttgaccattcgaaagtaccattgtaaagtgtgcggaattgcagtgctgggaaaggagaacattatgaaacatgcagaaaagatgcatgatggaaaaggagcttatcagtgccagttttgctcgaagttcttcctacgtctgaactatctggagatgcatcgaacctatggctgcagtatgaatcctcagcgagcgcgtcccttgtgcgacttctgcggccgaaagttctgccaaccgcagaagctgaaagttcacatcaaacgcatgcacagcgacatggccgaagtgttgcgagatttccagtgcaagctatgctcaaaactactaggttcccgtgcagccctgcagcgtcactccaaggaagtacacagccgcaactctgctgtagtcagttgcccacggtgtcagaaactgttccagaacagaagcaacctgaagatccacatgttgacgcactccggagtgaggcctttcaagtgtgccgagaacgagtgtgcggcagcgtttacaacgaagcagtgtctccagttccactacaagaaggtgcatggatacacacaggagcagatgccgaagatcgagcgcagtgttgcgtacacatttgatgcttattcgggtgatcttcttacagatggccttcagcgcagacagcgtaggaagctggaaccgggcgaagaaggaagcagcgagaagcgaaaacgagtaccgaaggatcttcctggcagcattctcaaaacgaagaacatcttggagtcgtttagtgaaatttgcaaaaacgacagcaacttgtcgttgttgtcgacaaaaatatcctcgattctaagtggaaatctcaaggactttggaaaggttcctacgggattgccggggatggatggcgatggggttcgaaaggaagaactggatgatgacctggattcaaatgattgtgccgagcgtgacgaacgtttggaggcgatccagcgacatctgaatcagcccttgtcggatgaaaaacatgaagagttcagtcaactacactcgcgtctatcgaacatatcagcccagaacgaacagaatgcaatgcactacaaactgcccagctgtgaggacgagaaaccaatgacggacggagatggtttcggggatttgaattcactaacgtcaagtaatcaaaagtataaagaatttatgaacggcggtaatccgggattggtaataagtaagggtagcaaaaagtggataagtgacaacggtcatatgcaagatgataacaattcggagaacatgctggcggcagctgcaaatagagatttcttaacgaaactgattatgaatggaggaaatgtagggcataacacatcgcatactcaggtggcagatgatgacgaagatgacgatgataactcaactattttggacgttgttgactcgaacaaccaaaaccaacagaactccaatgtacaaaatcagcaacaatctcagcaacaacaacaacagcagcaacaacagtctcagtatacgtcaagctttgctggattaaacaactccttaccggatttgccagcattccaaaaccacactttcccaacgcatttcaatcatcaatcgttactgggaagtttctataataacaacggtggagtaacgggccgtaacgctatcaatacgatacctacatctgctagcatgctggtagaagcagctttgaactcggtgagtaacatcatcaacgaagctgaaatgaacaatagtagcaacgaaaaccaaaatcttcacatggacatcgatggaaacaatacagcatccgctgagaacaacttgcaagcgaattccttcagtacggaagaaatgaactcttcggtagatgaaatgaaaatgatgaagccgcacggtttccctttgccgatgaactcaatgtctcagttttcgacgcagtctccagacgatgctagtatcatacaggagcgcaacgaactagaggtgcggcctaagtcgcgggacaagttaacgaactatggcgatggagagatgcttggttacgatgatcaacctcaccagcaacagcaatcgcagtcagcactacacaagcatactccaagcgtagactcggtgcgtagtgcattgtctcctgatcaaaatgacttcaactattccaactcaaatggagcgcaaaggcagcagcaacaagctcagcaaactgctacaaactctccagcacgatctgtttcacgacaaatctatggagaacatgaccttatctcacccgcttctactccttcattaccgagatacgattttggtgcggataacaatagttacgctcgtcgacaggagaagaccatcagctcattggcattggagaactttgaagcaaatctgaagaaccagcaccatatgcaacacttatctagtgatgaggatagcagtattgtgattgctgagaatttgtccgtcagcgcgagtagcaacgaaccgaaactgaagatcacaaatccaacttccggtggagactttatcacgccgaatgccggcagcggaagtaataaatatgaatcggttcggaacagtttagggtcggatttgtcgacggatctcagactgaaatacaactctgaagccaatgtggatcttccagattttcgtgccagcaacgccatgaatgaaacatcggacttccaaggattagatatgacttctcgaaccggtctttcttcgagttactcacatagcaatttccaggttccctcaagtggtggaaatctgaatttcaaccggtatcaccaccacatctacgacattctcaacgaacgagagcagcaccagcaacaacagcagcaacagcaacagcaccaacaacagcaacaggaattccaactgcaacaacaacagcagcagcaacaaatgcagcatatgctccaagaccatatcggtcaagacgctgagtcggaacaaccagcttctgttgatctaagtcgtacatccaattacctagtcccatctcctccttctcctgccattccttactctcatccccatcctgatatgatacgaatggtttcactggatctcagtgcgaatagtggaggcaacatgatcgtaggcaacacccctcatcatgtccgtcatccatcgtttttgtcttctcaaatacagcattctaaccgcgactcacttcccgatcatcatcggctgttggctagtgaacagctggccgcaacaaaccatcgcctgttagtcgatccggctgcgcacttgatcttcgaacagaacaatcgtcttctcgcggaaactccaggacctgcgcctcctcctccaaggcacgtggtctctcctcaacgaggttttggagcctaccatcatcaccatcaccaccaagtcggatcgtctaactatcatcatcattcggtcaaacagaatctcacatctcctcccttgaatcaacacgcttcagcggcagcgaattaccatcccttcccaacctactactaagcctagagagtcacatgaaattcaccctcaagacaaaccagcagaacgtgccggtcaaactaacgaatattatctgagaaaagtacccaccaaaacctgtaatgagaattgtaaaatgataaccgagaacgagtttcggtatacgaaaaaccacattgttgaatgtctctatcgattatgaatatttgtaagaatatcaaaatatgttctgcagcgcatggggcttatcactatttatatcggcgagtgagctgcatgagctatattttaattgttttaactgtgcaatcaattgtatttttgtaattgtaacaatcaataacaattctactttaattcgttactgtatctatctttaacgcataaaaatcaatcaaaactcttacaaagtcgatttcgcgcaaactatttttccgtaactgtcgcataacaaaacattataaatgtttttcgtctttttttgttttctctctagcacgaattgagaagcaggatgctttccaacagctggaaaaatcataacgtagtttgtaatatttattatgaataaattagacagagtaaaaaatactatcttaccaagatataccaaaccatacacatacaaacgaatcgagagcattgtgccaaaataacaaagaaattcatatgacagtacgcaaagagtgttcgtttatttgtttctagtcaaccaaaatcatcagtcttgtcagtcagtcattttattagtagttgtaaaatcgatattaatgaaatagattgtaacaaaaaagaaagccatcgtatgtatctgtgtaatggaaaccacaatatacaatgaaaagtgttctatgtgacaatggcacaaaccacaaacagcaaaacagacaaattatacccaaaatacttattaatacgaaatgacatcacaaaatcgaaaattaaaatcataaactccttataaactgtttcaacgaggcacttgctagctcacattctgaccaatagtgacgacgcattaaccattaacaaatgaatagtaaacgtctaatggtttacgttaagtcagcagtactcagaaatcgtcgtctagcgcgacgatgaggacgaatgtcgatagaacacaacaaggactttacgcaacttaccaacctagagagaagataacccaatattatctctgaagcaaacatagattcaagatgcaaattatgacacaaccacatctggcatatgtatgatacgaggaaattaataaagaaagtggataaaatataaaaagtgagtttcttttttcatataaattccatctcgaaaatctcgaaaaaaaaattctgagcgtcagaacttgtgaacttttttttcctctatgaatctccggtataatgattgaaatcattgttttcgaaaagttaaaaaaaa

SEQ ID NO: 276 - DNA, 3509 bp, Aedes aegypti
cccaaaataaaataaactaaaaaaaattgagattgttgcaactgttatatcttatctatcgggactccgtatcaattattcacccattctgaaaacatatgccaaagacccggtgcgtacgaacgaaaggcgattgcctgtgttggtaaaactatgttgacttgtcgtcgatcacttcccgcgaccccacacagcagcaacagagaacatgcgccagcagcgccgggtgttttcacgtcccgagcgagcagccgaagcagaaatcataaacatctcatcaccacatcgaacgaactttttgagtcagcgcgaatgaaaccaaacacaaacattcctcggtctgtgcctgtggccagagcaggcccgatctattcccgtacgcgctttggatgtttgcgtgagctttccgcttcgcccgttcgggtgggttttatgttgcatatgttgcaccggacagcttacgttcacccatcggatcgggtggtaaggccgatgcgaatcagttgctgccaactcgttcgtcagcaaggacgttcattcacagaacaacaacagaacggagagagagtgtgctgaagatagaagttcttatagtttttttgaaagttattaacaaggttttagatttttttcgtaattatcttcattgagaggaaggattgtgtaacgtgatcgcttcgggtccccgataatcgccttgagcgctgtgtatcaacgtgtgtgatctttgagagattgaagagatcggtcggtgaggatcccgatcggaaattggatatcaagtgtcatacagttttgttggaagtttttacggttcaactagaaccggcagctgcagaggaagcaagtgaagcactatactcgatcaatacattttttatagtggctcgttgtgaatgaattagaaaggagcaagtttgtgtttttttttttggtgagaagagaaaaaggaagattcgcttccggtgcgaagattttttccagtgaagaggaatcaagtgatcagttcgtcaaactggaaccagccgtttccgatggtagtttaggaggaagttttggtatcaaatcggcacaccagtcttgcgtcaccatggttcgatcgttgtcacagtggaccaaaacgctcagctttccggcccggatttccccgaatcggaactcgaaagagtgcagcgtaaacgtgctgccaattacaccgcctccggcaccgccgaggaacaagtcgaccacttcgacgacctcgtcggcatcgtcgtcgacttcggcgctgtcccattcgtcggctacttcgtcgccttcaccgccaccgaacgttccgatcacggaaatcagccaaattatctacccggacccggaatcggagaaggccatcatgggatcgctggtgttctgcatccatcacaagcagggctgcaaatggtccgacgaactccgcaaactaaaggctcacctgaacacctgtaagcacgatgccatccagtgccccaacaagtgcggttcgcaaatcccgcgggtaatgatgaccgatcatctggccttcacctgcattctgcgtcgtgccatctgcgagttttgcaatgtggaattcaccgggatcggtctcgaggagcacgcgggaacctgcagttccgaaccgatctactgtgaatccaagtgcggaacacgtgtcgttcgtggccgcatgtccatccaccgtgccaaagattgtgccaagcgattgcggagatgtccgcactgcagtcgggagttcagcgctgatacgctatccgctcacggagccacgtgtccaagaagcccagtgccatgtccccagcgttgcgatgcaggtccatttgcaagggctgacctcgaaggtcacctacgtgacgaatgcaaagcgctttcagtaccttgtaccttcaaagaagccggctgccggttcaaagggccacgccatctattagaagctcacctcgagtccaacacttcctctcatctgtcgctaatggttgccctttccggccgacaggggcaacaaatcaacatgctcaaaaatgctatggccaaactcagtaccaactacaccggcacgctcctgtggaaaatcaccgactggtcagctaaaatggtcgaagccaaaagcaaggacgggctcgagctggtttcaccacccttctacaccagtcagtacggttacaaactacaagcatccatgtttctcaatggcaacggacctggcgaaggaacgcatgtctccgtctacataaaggtccttcccggcgaatatgacgctctgctgaaatggccattctcccactcagttaccttcaccctgttcgagcaaggaaccctcggcagccaaggaggagtcgcagaatcattcgtaccggatccttcgtgggaaaacttccaacgcccgtccaccgaaccggatgccctaggatttggattcccacggttcgtatcccacgagctcctcaaccgcaggccatttgttcgcgaagacaccgtcttcctgcgcgtcaaagtggatcccagcaagatcgtcgccgtatgaaacaacaaaacaaataaaagactcctagcttgtaagcgttatacccacgattacccacaacgagagaacaatgaactgcatttatactatgattcgcattctgtacatatagacgagcgaaactagcatatactgatagcgtagcgttaggcaagcgattgttagaggggatcccttgaaccacctgtacatagaacatgaaattcgaattcagggtcaaccctcggcaacaccaaaactctgtataagcacatccgagcgatgaacgccacaacgaaacgaatcagcttgacaatctcaattttctaagttaggattttgttattgtatcgtaaaagaacaaacctttctagcgtaacgttctaaaggcattacaacctataactgtttgtaatattccacttccctacgaacgtgtatcaaaggacggaaaagaagtaatactactgctggaatcatgccaaagttttgtttggatggctttgcgcgacctgatccggaatcgtgttttcttccggacaggcaaagcttacatcataatcaaaaataattttccctgtctttcttcaactttctcttctcatctgtcaaagtttttagttctaataaaaattttcccagactgtctaattttactttttaattcagggttattattttgttggttgtacgtaaaggtcaaaaggagtaatcaaacatttttctctattagataagtatttcgagtcattaggatatagtgattaattgttgaatatcgattcttggatttaaactcgctgcacagtacacgcatgatgttattcatgcatgcggttttggcgagatcatagctagggaaccatttcaacacaaatgtagtccataagtcgtatttaaccatggctagtttttaaggaattacacacaaaacgtagtgataagtttcgcaattgaacgaaaatacaaatcaaaacgaatcaaataatgcaaa

SEQ ID NO: 277 - DNA, 2443 bp, Aedes aegypti
aatcgtgtgcagaaaaagaagaaagtaaatgattggaagagtgcccagatgtgaggtgctgtgccaaataatgtgccgggcagagtgagcagagtttcgcacccccttgggttaatccaacattcaagttgatgtatttacaatattttatataattttgtccagtttctaaatgtcttgtccgcactgtgccccggtttccgatgaactgaatgaacgtcccagagaatgaaccttctctcgcaggattttgacgtctacgtccttgaacaaaaactagcattttttttctagtgttaaatcgaaagtcgtcggcggcggcggcaactcgcgagcggatgcagttctagtgtagtgaccgtcgcgttccgtcgtgtgtgaatagatgataatgcatcatcagctgacccaacaagttttgatccagtatcgtacatagggactcctgcatacatctaacgatctgctgctgctgctgttgcattcccgcgtttcgttccggagatatctaggacaccaaggatgactaaagattcacaaataagcagctgcgatcgctgcccaaggctggtcgcgttcggaaatgtgctgctggacatcagcgtcgagctgcacgacaacaaaatcctcaaggagttcgacctgaaggaagatgaccagcgggaaattccggcggacaagttggcccggttgggggccgttgccgtggagacatgcggtaaaccgaaatacaatcctggcgggtctgcactgaacacgtgccgaattttgcgcgcacttggcgagaagaatgtgatgttttgcggtgccattggcgttgacgagaatggagaggttcttacgcagatactgaaggatagctcgttagccacgtgcatccaaaccttgccggagcactcgacgggcacttgcatctgccttatcagcggagataagcgcagcctcaacgcaaacatcggggcgtcgttgcacttcaagaaggaattcgttatgtcacgttggtgccagagcaagatcggaagctgcaattcagctgctcataccgacagcgatgaggaaattcgtatcttctacgttgagggatattttgtgccggaaaagtttgccatatgcaagtacatctacgaaaagtactgcaagggaacgccaaatctgttcgtaacgaacctcaatgccagctacatactgcagaacttcaccaaagaaatgcaacacctggtcgagcaggccgatttggtatttggcaatctgaccgagttcatctcgttggccgaaatctatgaatgccccaccgtagatgatctggccaggtgtctgattaggaagtacttaaaaatcaatcgggagaaaatcctggttgcgaccgatggttcccgaagtgtgcggttctaccacggcaacggcagtgcattctatgctgaatcctatcaggttccgattattcccaaaaaagcagtcatcgatacgaccggtgctggggactcgttcgttgccgggttcctgtacaagtacatgaatggtgaatgccccacgctgttggactgcgttcgatatggcagcaaggtggccgccaaagtcattcgtcaagtaggatgtaatctaccctcctctctacctacttctccggttagcgggctggttacacccgttgatgaggttgaatccaaacttgcctagaacagaaccattgcgagccatatccttaaatgtacatccttagtaacttattagcccggtacaggtgtacttagcgcttattacttagtccccttagaacaaactaatggtgttctgtttcttaatctcaaaattttggtctataagaaggtagtgtgatctcattttatttcgtgtttagttttagtgcttaagaatagcatcgattgtacgctgactatacaaaggcaaagaaagtatacatttctaggtgctagttttgaatctctaatgatacctattttaatgatgtttcgttatatacgttcacaagccacaaataatgcaatcgctgaaaaacaagccacatttgttacataaggtcattaaaatatatattcaaaactgttgattacatggtacatatcagatgaacacagacaaacgaacgtaacatttcgaatcatttcagcaacgagatcagcattttgaaaacattttcgccatatgattgctgaaacacttcaaactcagaacctgcgtgcatccttgagtaacaaaataggactgcttgggcacctacatgaggggattttctcggtcaaattattaaaaactctatagtaaaataaacttcaatatgaagcacatataggcttattctaagagtgaggtgagctgagagctctaggtcttgtatagcgaggtgacaatactccactcgaatgaggtgagatctcatttaatttacacggcgaatcacttcattcgagtcgagtattgtcac

SEQ ID NO: 278 - DNA, 2036 bp, Aedes aegypti
aaacaagaaattcacaacaagaatccgctgcagcgtcgaaaaatcattgtcctttcctttcggttcattccgtttcctttataagcaccatgatttgcagcactgtcacctcacaggaaaccatctgcagtaacatcgcaagcctatgccgagtttgttccgctcccggatcgcacagcattttccaaagaattccagcctacctgcatgaacatcctcgggagtgcgcccggtggccgttccagattcacaggctcatcacggaagtgacggggttggagattacccaggatgatgggcttccacagaacatttgcgtcctctgcatttcgtacctgaaacacgcctacacattccgaaggcagacaatcgacaacgttgcagccttgctggcagccaagtatctgattggggtgcaggaacaaaggaaggattccaaagacgcgatggagatcattccaacgatgccaagcccaacggttattcgggctaacgttaacgaaattagctacaaaatgatgaaccctggaggaagaggacgaaaggctggaatccctttccagaagaatttggacaaggaagtgcttcagcaggtgctgggtgggaacgttcaacagaagaagaaacagaataacgctgaagaggagcagaggcgaattgaggaagcgttgctcagcaggtggcaagattcgtccccggaggagaatggaacggaagacgcgaggggattcttcagttatacggagaaggaatttcaggaagatgatatcatggaactggacgatcttaaggagcacaacataacgtttaatctaccggaagattataaggaaaagaagtgtccctcttgccggagacgattcatgttcgaggaatcgtacaacgaacatctcaaagaatgtcttctgttcaagttggttaagttcataagggaagtgtatcatttcctgtttctaaaggagaaccgatctatctcttcgtttgagttcatccggagggtagtgttctccgtgaagaaaaccgttgaaataatttcttgctacggcgagcaaagtatcgaaccggaactggaagctgtagagagttggagtgcgaaaactgccgacgaggagtcaatcaaaatcgaacaatctttcctgagcaatttggagaagcttcgactgagcttcaaccccgagggatccaaaatcgtttcaccttctgtgttgcaccgtcaagttgatgatggccgaagctcattcaccaccggatcaacttccatctcccctcttgtagcgattacccggtgcgaagaatgccacgtgacattcgaatccgtcaccgaactggaagcgcacaatctaaactaccatcgagctccactcgttgtcaccaccccgaataatctcaaaacgcccgcacgattccctccagctccaattgcaccatctcccaaaggggtggacatgatcaaaaacacactcctctcacagaccccagattcgtcgagcggaggccctggcgaaggaagcagcagcgatgatcaacgcaagacggtcagttgcaaaaaatgccagcagcgcttctacacaatcacccagctggaccaccaccagattcgcttctgtcagcagaagttggacagcccagcggaacggaaccggaagaatctgaacgccagctacttctacacaatggaactgctcaaagatgtgaagtagtctccctccaaaaggctgggtacttcgcttttatcacatttgacgacttaacgttagctgtattagtgtgtatttgatactcttttttataactgtaagcgtattggtccaactctaaatttgatcgtttttgatgttgaacactttacactcgtgcgagaaatgcgtttcaacgcattctgtcctattttgatgaattgtaaaaccttttttttttcttttgtttctcgcttaaaaagcaacagtatttagtttttaaatttttaagtaaatgactagattctcatggtttaagcacgaatattcccactgataaattgaaatttgatgcaacgt

SEQ ID NO: 279 - DNA, 1797 bp, Aedes aegypti
ttgcagatctcggaatgtacggcgaaaggtggagagtgcgatgagagcaaaggtcgacctgtatgcgggacggataatcagacgtatccgacgcgatgccatctgataagggcgcagtgcagcggtcatcaggtcagcctcaaacatcgggggacttgtaaagacgtctgtcacgcatcacgcacgtacgccctccagcaccggtccagttcgccctacggggtcaaatttgtgccacgctgccgggaggatggaacctacgctccggtgcagtgcctggaaagtgtcggctgctggtgcgtcaacggccaaggcaaaccactgcccaatacgacggttcagcatgggaaaccggtttgcgtcaagaagggcaaatcaaaccagcggcgatcctcgccacgaaatccgggagatttagattatgattttgtgcctttccacactcatcctttcaccggttttatttgtggaacaggttgctctcgtatggaccgagccgtgttcaaccgtaatctgttgaagcttttcgagaacgaacacattcgattaacggcggcctcggtcagcgagaaaaccgtcctggattggaagttcgcttcgatcgatggcaaccggaatggcgtcctggacaagaccgagtaccgagagttgaagcgactgatcaagaaggtcgtgaaaccgaagcgctgcggtaggtcttttggtaagagctgcgatgccgatcaggacgagcggctatcgcggttggaatgggccaactgcttctccaaggataacctaacacgtaagtatacgttggcccctcaacaccaccaccagcagcagcaataccaacaccaacatcatcacatgggtggcgtaggcggcggcggcggcaacggtggtggtacattaatcggtgtcggtggctcctcccattcttcctctagctctggttctagcactagcttcctccggtacgatgagtcacagcagaatggctccaatgattacactgattttgacgatgaagatgattactcagaaaatgacgacgattcggacgaattgcccgatagtaaaacaacgctggagctgaaaggtgaccaggatcccatcttcaaagacagcgaggccgaatcggactgcctgagtgatcgtgccgccgcactggaggagcaaaggagtggtgctacggcgctatacgttccggaatgtaccgccgacgggcggtatcaacgggtccagtgctacttgtcgaccgggtactgttggtgcgtccacgaagacaccggaaagaacattcccgggacgtcaactaaggacaagcgaccgcagtgtgacgtgtatccgggcgtagggggtcgacagatgcagggctgccccgatgacaagaagttggagttcttgcgagacttgaaggactttttgaaacagcaaatagcaagcaactcggtgacggcagcggataacaccaaatggggaaccgaagacgagaagattgcaacgctcagctttgtactgctagacaagaacaagaacaaggtttgggagcggaaggagtggaaaattttccgagagcttgtcactgaaacaagacaattgcgaaaatgtggcaaaaagatgcctcgctattgtgacgtaaataatgatcgcaagatcaccctctccgaatggctcaattgtttgcaaacccagcggacaccctatgtagaagggggctcggtagccaatggttggaaaccatccttgtccgcatcatccacctccaagttccggggccctaaccctctggaatcggttctgaaaagcgactga

SEQ ID NO: 280 - DNA, 3067 bp, Aedes aegypti
cactcaggaagtaaaccgaaatgaaagtcttccataaatacaccttatgaaacacaatccacatcagtagtagattgccaccgtcgtcgtcgtcgattgctttccgtcttcagaggggctgcatgctgtttcaaagttgagctccttcgtgagtgatcaacccccacttcatcgaccacttcgcgtgtgtttgaaattcgacgagtgcgcgcgcgagagagagagagtgagtttcccacgcggggggagagtgagtgacttgtacgcgggggaccccccagaggaggcactcgcgtggtcccgccacggcaaaacgcgtacgcctatatataaatagttgatggtctggtcggaaagattttagtgcgctgttggacattcgagcccgtctccggctccctgaaccgtgtctgtgtggagaattctagtttttttgttgctgatttgactggcccccgctaggtggctggtgggcgcgcgtagaaaggagatcctgtgcggcggcgcgcagcggtggtagaggagagcgagcgagccctacggaaagggagagagcgaaaggtgtgggggttgaacagcacacgcaattcgtgcggtgtgaagttcgagcgatcagttcagtgcgaagagtggcacagtgcagttgtgcaagccttgaaatggcgagagtgataaagttgctcgcagttctgtgcttagtggtggcaatcgctgaagccgatttccgtgtcaagcgtcaggatgaggatgccgaccaggaggacaacatcgacgagctgtgcaaggaccggccagccgacgaatacttccgtctgagcaccgatggcgattgccgtgaagtcgtgaggtgtgataatgctggggaaaatggcatcacaagactggcacgcgtgcgttgcccaaccgggttgtactttgacgtttaccgtcagacctgcgattggaaaacgaacgttaaaaattgcgatgaactaggaaagccaagaaaggttcttcccatcctgaagaccgatgagccaatctgtccggagggtaagctctcttgcggtaatggcgaatgcgttgacaaggaattgttctgtaacggcaagcccgattgcaaggatgagtccgacgagaacgcgtgtaccgttgagcttgacccgaaccgtgctcccgactgtgacaccactcagtgcgtcctgccggattgtttctgttccgctgacggtacccgtattcctggaaacatcgaacctcagcaggtgcctcagatgatcaccatcacctttaacggtgccatcaacgtcgacaacattgacctgtacgaggacatcttcaacggtcaacggcagaacccgaacggttgccagatccgtggtacctacttcgtgtcgcacaaatacaccaactactcggctgtgcaggacttgcaccgcaagggccatgaaatttcggtcttctcgctgacacacaaggacgatcctaactactggacccagggaacatacgacgattggctggctgaaatggccggagctcgtctgatcatcgaacgttttgccaacatcactgacggctccatcattggtgtccgtgccccgtatctgcgcgtaggtggtaacaaacaattcgaaatgatggccgaccaattcttcgtgtatgatgcctcgatcactgcttctctcggacgtgtcccaatttggccatacactctgtacttccgtatgccacacaagtgcaacggtaacgctcacaactgtccatcccgtagtcaccctgtctgggaaatggtcatgaacgaactcgatcgtcgtgacgatccaaccttcgacgaatcgcttccaggttgtcacatggttgactcctgttccaacatccagtccggtgaacagttcggtcgccttctgcgtcacaacttcaaccgccactacaataccaaccgtgctcctctgggtctgcacttccacgcctcatggctcaagtccaagaaagaataccgtgaagaactgatcaagttcatcgaagaaatgctcggtcgcaacgatgtcttcttcgtcaccatgctccaagtcattcaatggatgcagaacccaaccgagctgaacgctctgcgagacttccaggagtggaaggaaaagtgtgacgtgaagggacaaccctactgttccctcccgaatgcctgtccgctgaccacccgtgaactgcccggtgagaccctccgtctcttcacttgcatggagtgccccaacaactacccatggatcttggacccaactggagatggcttctctaccaagtaagcaagtctcccgaggggaaactccatccaccgaaagtctgatttagttgcgtgaagagaacactacgaacgtaagaaagaatctccgttgattccccctcaactacccaaatacttcccctatcctcaacggagtatagacatctgttgtaaataattataatttcttacattctcctaaacctccagcagaaatcccatccttacattccttccctgaaatccccgcatcctcaaagaaaaatccgaaccaccattttcctattctcggagaatgatcggaatatgataattaattcaacgaaaaaaaaaacattaaagattgaacgtgataattttatttaaaacaaaaatactctttccaaccactaccatccttgaaaacgaaaagacaaacggcaccgagccggagtgaaagagattttatggcgcgagaaagaaaatggtggccacaccacccattcaagtatagtgtcgcgattttgctgcggacagcccgggtgtgtgcgtcacaaatcaggtgttttttgtcagttaagagtactcgttttttattgaatgaacaaaaaactatattttaaactatttttcctaacttaaattgagtaaaaaggattgtgccgcagccgcaaggtggccagaaaattgaaagccggatttgacgtgactgttgttatccccatttgattgggaagtgtgtgcttgcggctggtagtttagaatgataaaaatgaaaatacaaacaaaaaagatatgaaaataaatttccacaaaaatataagaaaa

SEQ ID NO: 281 - DNA, 1842 bp, Aedes aegypti
ctactaaattttccggaatgtcaaaacttgctcggcattccctcgtaccaccggttgtacgagaaagcatcaagtggcagcggcggcgacggaacctccggtggaggcgcggactttgataatctcctcgagtacggcaactggttcgcgagcagcagtaatgggagccttctggagtggaacaatggcaacggttctgccaatggcagctcgctggacggcggcttcgtcgtcaatgggtcgttgctgggcggaggcgagatggacatgggggacggcatcggaccggtgctgccccctttcgaactgtggcagacggttctgatagcgatatgtctggcgatttgcataatactcaccataggtggcaacattctggtgctgttggcgttcatcgtggaccgaagtatccggcagccaagtaactacttcatcgcttcactcgcagccaccgatatgctgataggaaccgtttcgatgccattctacacggtgtacgttctcatgggctactgggatctgggcccgctgctgtgcgatttgtggctgtcggtggattacaccgtctgtttggtgtcgcagtacacggtgcttttgataacgattgatcggttttgctcggtgaagattgcggccaagtatcgaagttggcggacgaagaacaaggtcatctggatggtgacgataacgtggatcattccagctctgctgtttttcatctcgattttcggatgggaacactttgtcggataccgggatctggctcccggcgaatgtacggtgcagtttctgaaggatcctgttttcaatacggctttgattattggatactactggacgacgttggtggtgctgtttgtcttgtatggcgggatttacaaaacggcatacgacatgcagaagaaaagcgaagccaagcagcggaagatgcaatcaatggttgctttggggaatgcgatgactgggaaaagctcaatgcccaagccgaaagacgagaaagtggacgaacagaggaagagtaaggaggagaaagaaggtgacaagagcgagcgatccagtagtcctgcgttcgattcggatgacgaaagctcagcgaatactaaacagcagcaagaggaagcgcgagttgctaagaagcgaacttctttggccggattgctggtgggagcttcagcgactgttctgtcgaatcggtacaacaatggggcagtgaaaacaacgacaactcctaccagtgaacaagccaagccaaagcgatctccaagcaatccagcaaagaacgaaggactgcccaaaataaccgaatcaagcataatggactctgacaataccgatgggaaacctcaggtctccccactgaagccgactccagtgcacccgagccttaattcgagactgcaatcgaacaattctacgccggtttcaagcacaccttcaaatccaaaaccttcaatgtccttggcagtggttgaccaatccacggcaacctccagcaagcgggactttatccgctcgattggaaaaagactgaaaggcaacaaaaagtccggaacgctcggagtcggccggcaaaagtccaaatcggagaaccgagcccgcaaagcgttccggacgatatcgttcatactgggagcgttcgtagcctgctggactccgtaccacgtgctggcactggtcgtcggattctgccggaacccaccctgcatcaacgagcacctgttcatgttttcgtactttctgtgctacgccaacagcccgatgaaccccttctgctacgcgcttgccaaccagcagttcaagaagactttcatgcggattttgaggggtgatctgcacatgact

SEQ ID NO: 282 - DNA, 2955 bp, Aedes aegypti
atgctacaaaacaggaacgcaccactaaatcaagatatcccattttctctgcctctcattccatgttcccgccaattgtcactcacggacaaacgacacccccctcgcaggaagctgaagagaaaacaggaaaagttttgcaagcaactttacaaaagattaaatctactaaattttccggaatgtcaaaacttgctcggcattccctcgtaccaccggttgtacgagaaagcatcaagtggcagcggcagcgacggaacctccggtggaggcgcggactttgataatctcctcgagtacggcaactggttcgcgagcagcagtaatgggagccttctggagtggaacaatggcaacggttctgccaatggcagctcgctggacggcggcttcgtcgtcaatgggtcattgctgggcggaggcgagatggacatgggggacggcatcggaccggtgctgccccctttcgaactgtggcagacggtcctgatagcgatatgtctggcgatttgcataatactcaccataggtggcaacattctggtgctgttggcgttcatcgtggatcggagcatccggcagccaagtaactacttcatcgcttcactcgcagccaccgatatgctgataggaaccgtttcgatgccattctacacggtgtacgttctcatgggctactgggatctgggcccgttgctgtgcgatttgtggctgtcggtggattacaccgtctgtttggtgtcgcagtatacggtgcttttgataacgattgatcggttttgctcggtgaagattgcggccaagtatcgaagttggcggacgaagaacaaggtcatctggatggtgacgataacttggatcattccggctctgctgttttttatctcgattttcggatgggaacactttgtcggataccgggatctggctcccggcgaatgtacggtacagtttctgaaggatcctgttttcaatacggctttgattattggatactactggacgacgttggtggtgctgtttgtcttgtatggcgggatttacaaaacggcatacgacatgcagaagaaaagcgaagccaagcagcggaagatgcaatcgatggttgctttggggaatgcgatgactgggttgacaggtcaagcagcgggtataggaatatctaaaacgcaaagtactttactaagtcaggataaaccattgccactgccaaccactccagcctcgaatatgatgcttcctacgactttggcgttggcctcaaaccaaatacagaaagaggaggcaggttcgagcaggaaaagctcaatgcccaagccgaaagacgagaaggtggacgaacagaggaagagtaaggaggagaaagaaggtgacaagagcgagcgatccagtagtccggcgttcgattcggatgacgaaagctcagcgaatactaaacaccagcaagaggaagcgcgagttgctaagaagcgaacttctttggccggattgctggtgggagcttcagcgactgttctgtcgaatcggtacaacaatggggcagttaaaacaacgacaactcctaccaatgaacaagccaagccaaaacgatctccaagcaatccagcaaagaacgaaggactgcccaaaataaccgagtcaagcataatggactctgacaataccgatgggaaacctcaggtctccccactgaagccgactccagtgcagtcgcccatttcgccggtggacatcgaaccggtggtggtttccaaatcagagcgagctccggagatttcccacacgatcctgacaccaccttatggttttcaaggaagcccacgaacttccgaaagtccaccgtccaagtcagacaggcctcatagtataataagccaaggagactcgaccgtcacgtacgacgccatggtcagcatggatggtgccgatctccgatttatggacgaaagttctgttgtggttccctctccgcagtacgagagccctccatcagcattcgccatcgtacaacctcgctcaccagcacactccgcagcacaaagcatagcgaacccctcgcttctccagaaagcgctcatccgagcaacggcgcagtctcagcaaccaccaccaaccgttctgctgcgtacaatcgacgtaggcccgctctcaccaacgagtcaacagaactcaatacagcccatcaataagtttagtacaacagtcacagtagcctctcaaaatccggacaaaccggtcaccgtgctgaacaactcctacacgaaccactcaactgtagatcaggccttaccgcaaccctcgcagatggacagcccgagccttaattcgagactgcaatcgaacaatcctacgccggtttcaagcacaccttcgaatccaaaaccttcaatgtccttggcagtggttgaccaatccgcggcggccacgtcgacaacgaccagcagcagtacggcagctccagcggtgacttcgccaccacctcaaaccaacgctctacccagcaccacaaccgtgcaaacgcaagtttcttcctccaccacaaacaacactcccagcggagcaacgatcaccattaatccctgcctggaacggcagacctccagcaagcgggactttatccgctcgattggaaaaagactgaaaggcaacaaaaagtctggaacgctcggagtcggccggcaaaagtccaaatcggagaaccgagcccgcaaagcgttccggacgatatcgttcatcctgggagcgttcgtagcctgctggactccgtaccacgtgctggcactggtcgtcggattctgccggaacccaccctgcatcaacgagcacctgttcatgttttcgtactttctgtgctacgccaacagccccatgaaccccttctgctacgcgcttgccaaccagcagttcaagaagactttcatgcggatcttgaggggtgatctgcacatgacttaa

SEQ ID NO: 283 - DNA, 1527 bp, Aedes aegypti
atggaggttttcgtactgttgtttctgctgctgagcgccggttcatcatcaccgatcaaaaattactcatgtgagaaatctcacggaaattgtgttctaaacaatgttatcttggagactgaatccgatctagaacaagttgagtttccggacatcaccgatcctctcacgattgcaacaggaaaaattcctcattttacgcgaatgcttatcgacaaactgccgggcataaaggacttgaccatcaaccgcctggaggtggaaaccgtctacgttaaaccggaaatgacacatctcgaggccgtcgggaatcaaattcgtcttttggaagttgataatgacaaggataaagcctaccaaatgctgacgctagatctgtccagtaataatcttgaagacttaagtgtcctgtccagatttagacaacttcgccggctcacgctgaatggtaacaagttcgacactctgtcaatggatttattcgaaggaatgtccgaattgaggcaactctcgctggataacaacaacatgtacaggtttgacacgagtaaaaaaatacatttgcctaaattgcagaccttttctctagctggcaatggattgatcgagttacacgtcaccatgtgggattttccgtcattgaaagaattggatgtatcaaacaacaaactttactttttagaaggaagtctggatcagttcaaatcactcgaaagtgtcaaaatatccggaaactactggaagtgtgattttgtggacgcgattcttctgaagacaatcaaattagacgaggatgagccaaatcgttgtaaggagagcagtttgatagatgtgcagcgaatttgttgcacttacgatgcgttcagtatcttgagtttcgcaaaggatgatctaggtctgttcgacgataagtgggaggacctgcgcaacctgcaaaaagatttccagggattcaaagacgaaacggaacgtaagctggtgagaataggagaactcggtgaggagcgatcactgatcgagcgcatcgaagagattaagtcaaatcaagagcagatactgaaaaggctggacagttctgctggcatgcttgagatcgaacagttacgctcagacataacagatcataaaagcacaatggatgataaatattcaggtttgggaaggcagctggatagtttcgttgaaccatttaatgaattacgtagcgatgtgaatgagaaacttgccaaatacgaagaaataccggaaaagcttctaccattggaacaactgataaacgatcaaggagcattgcagaaaagcacaattgtattgcaaaaggcggtccaagatatggagaagcagcaattgctgtatcatttatcaatcgctgctctaagaaatcagattggatcgcaagtttcggaattgaaagccgaaattgacaaatttaccaagcgaaatgaaaagctcgacactcaaattgatcgaataatgtttaatgtaaacacgatttttgagatgttggaatccatatccgaagattga

SEQ ID NO: 284 - DNA, 1146 bp, Aedes aegypti
atgcctttcgaagagcatctgagtgacaacttcacggctgtgctacggcccgaggcgcggttatcggccgaaacccgctacctcggctggaacgtggcccccgaagatttgccgcacattcctgagcactggctcaagtatccggaaccggaagcctcgctacactatctgcttggcttgttatacattgctttcaccatcttcgccctagttggaaacggactcgtcatttgggtgttttcctctgctaaatcgttgcgaacaccatccaatgtattcgttgttaatttggcgatttgcgatttcttgatgatggttaaaacacccatcttcatttacaattccttcaccaaaggctttacgacaggcttcctggggtgtcaagttttcgctttcatcggttcactatctggcattggtgctggggcaacgaatgcatgcattgcttacgacagatacaataccatcgcacgacccttcgaaggaaagctcacccacactaaagccatcttcatcacctgcatggtgtggacctacacgttcccttgggctgttttgccgcttatggaactctggggaagattcgttcctgagggatacctaacatcatgcacattcgactacttgaccaacactttcgataatcgcatgtttgttggaacgatcttcacattcagctatgtacttcctatgagcctgattatctactactacagtcagatcgtaagtcatgtcgttaaccacgagaaagcccttcgtgaacaggccaagaaaatgaacgtggattctttgcgctcgaaccaaaaccaagccaacacctcggttgaggtgaggatagccaaagctgctataactgtttgtttcctgtttgttgcttcgtggacaccgtatgcggtactggccttgattggagcttttggtgataaaactttgctgacaccgggcgtaaccatgttcccagcttgtgcatgcaaattcgtcgcctgtctggatccgtacgtgtacgccatcagccatccgagataccgtgtagagttgcaaaagaggctgccttggttagccattacggaatcgttgccatctgattcggcttctaatgtcacagacgcgaccacagctaacacatcggcaccagcatcctcttaa

SEQ ID NO: 285 - DNA, 3321 bp, Aedes aegypti
atggggtgtgcagtgcagcaggagcccgccagtaacgagaaatcctcggcggcggcgctcaagactgagaaaagtctgaaagttccaagcagtcagtgtagtttaaagaatactaatgataggagcaacagtagcggtagcagcagcagcaacagccttaagaaggcccacagtgcactagttaaaattcttgaatccgctcccctgaatagttcaaatttgatcacactgtacaacggaagttccggtggcagtggttctagtagcagtagtaatagtagtagtagtcaaagtaatcaagtagtagctcctaaggaggaaacgaaaatcagtgtgttagcaagtagttccagtcaaacggtggaagatcctcacgcggggaaattgaaaacaaccccgaagatcgatttctgcccgtggaagaagaccacgatcgccaaagagtggattagtgcatgcgaacggggctcgtctgcctcagtagatgataagaatcaacctcagcagcagcagcagcagcaagaagaaggcgtcagccagtgtgccatactagacgaacagtcccacaaacagccaaccggaggatgccggagtcgggagtcctcgcagagttccgatcactcgtccctgtccgcatctccggagcccaccagcgatgacagctgctgcagcaatagttgcagttccaatggaagcagtagcgactgctgttccgactatctgatcaatgatctctgcaagcagttcgaggagaacctatgcgaagatcatggtttcttcaggcgctcgatccagcagaaaattcagtatcgcccttgtactaaaaaccagcagtgtagtatactccgaataaaccgtaatcgctgccagtattgtaggctgaaaaaatgcatcgccgttggaatgagtcgcgacgcggtcagattcggtcgtgtgccaaagcgcgaaaaggcccgcatcctggcggccatgcagcaaagcacgcagaaccgagggaaccagcgggcactggccaccgagctggacgatcagccccgtctgctggcggccgtcctccgagcgcacatggacacgtgtgagttcacgcgtgagaaggtcacttcgatgcggcaacgtgctcgcgactgccctacctactcgatgcctactttggcatgtccactgaacccggcgccggagctacaatcagagcaggagttcagccaacgcttcgcgcatgtaattcgtggcgtgattgactttgccggtatgatccccggcttccagatgctgacccaggacgataagttcaccctgctgaaggccggcctgttcgatgcgctgttcgtgcgtctgatttgcatgttcgactcgcagatcaactcgatcatctgcctgaatgggcaggtgatgcgccgcgatacgattcagaacggtgccaacgcacgtttcctggtcgattcgacgttcaactttgccgaacgaatgaactcgatgaatctgacggacgcggaaatcggtctgttctgtgccattgtgttgatcacgcccgaccgaccgggactgcggaatgtggagttgatcgaacgcatgtattccaagctgaaggcttgtctgcagtcgatcgtttcgcaaaaccggcccgataagccagaattcatgcaggaactgctgcgaacactaccggacctgcgtacgctcagcacgttgcacacggagaagctggtagtgttccgaacggagcataaagaactcctacggcagcacatgtggaacgctgaagaagatctcgcaaagagtcccagctcgaacacgtggagctgcgacggcaataatgtcgaggatgtagccaagagtccgatgagctcggtatccagcactgagtcggcggaaacaacctcggactactcgcatattccttcctcgttgagcgcttcggcgcctctgctggccgctaccctgtccggtcaatgccctatccgccatcgggcgagcagcggttcgtcggcagaagatgacatcattggtggtacggcccatctcgcacagaacggattgaccatcacaccggttatccgatcggttggaacacatcacgtccgataccggaaactagactcacccaccgattccggtatcgaatctggaaacgaaaaacacgaccacaaaccagtcagcagtggatcgtcttcttgctcaagtccgcgatcttccctggaggatcaatcggacgacaagcgtcacatcgtggaaaacatgcccgtgctgaagcgggtcttgcaggcacctcccctgtacgataccaacagtctgatggacgaagcctacaaaccgcacaagaaattccgtgcaatgcgtcacagggaaagtgaagccgagcctgctccaagttcgtcgtcctctacaatcactctgtcatcacattcgccgaaaccatcgtccagctcttcgccgtcttcggtggtatcgtcacacagcagcagtatgggtcaatcacctccgcagcaacccctttcgcagcttcatatgcatttaacccgaccgttgaatcagtcaccacaccaaagccttcaccaccaccatcatcatcaccactcgggaactcctcccgctagccatcatcagtcgtcttccctatccagcacccattcggtgttggccaaatccctcatggagcaacccacgatgactccggaacagatgaaacgttccgacatcatccacaactacatcatgcgagagtcgcagcaatctcagcaccatcccgaagcgcagagttcgtaccggagtggtctcctagtttgcagcccacgatcctcatcggtctcgccactgacctccagcagtagcagtagcagtaactcatcctcctccagcagtggttgtccattctcagccaatagcagcagcagcaggtggcagagtggaccgacaagcgttatcaccaccacccgccagcaaactccttctccatcgctcaattccaccggaagtgctgatacttcctcctcttccagtactgccagcagcagtactagcatccgctacttccagtcaccacattcgacatcgatctccccaccggtggccgtcatggcccaacaagccagcagcacaaccaccggatccgttggctcccctcagtccgtggtgacggcaccctctccctcccctcgcctcatcgagcttcaagtggacatcgctggcggttccacttcctccggcaccaccgatgcccccctcaacctgtcgaaaaaatccccctcgccttccccagctcgccaccaatcaacctcctcgtcctccacagccaccatccataaggtgctattggaagcgtaa

SEQ ID NO: 286 - DNA, 4617 bp, Aedes aegypti
ctgagcccgcggttggggctccctggatgttgcagcgggctaccagagtgtacatattttcccgcaaccctgcggttggatttagtctgctgtgagcttttgaacggtgcggatcatctcttggcctatgggatccacttgttggaccagggctgttgtcttctccccaacagtttgaagcaagaagaagtgtgcggaaagtgcgacgcggcgaggaactgaagaaattcaaacgggacttgaaggccccaaggaaggtcttctatgtaaatggttttcaatcgctaggcatttggacggatggaggcaaactagtgcgtgacaaatcgtggcacagacaagcaagctggggaaggaaaggttccattagtgctcggttggggtgttgattggcgttgtgctttatgatcagaagggtcaacaactcgatcgaaagtgagattctggatttgaaatttcaccgtgaaagtcgggctggaaaagtgacagtggtgctatttcttctctactcgggagtaggggttcgtgttgtccaagttggacacggagttgccatcggtggcacagtgcaagtgaagagtgaagaaagagaagaactggagtaggacgaagcagcacaaaaaccgttaagatgttgtccggacgagggtttaccgtcttggctggagcacttgcgatatgcactatcctatccagcgtggatgccctccaaggatactacggtactaagatcggtgatctcactcagctgcatcatggagtttccggatcggtgtacgctgttgatgccagaacgctttttctgaagaacttcaattacgacggagaaggtccaggtaagtactttagcgttcccaccagagtaaactccaaccgacatctcttctgaatcaactccaagctgcgtacttctacgtgggaaacactcgtgcacctagcaacaagggagctcatcgcctgcgggatgaacgtggtcgttccggtgtgctgagaaagtatcgcaacgaagacatcactttgtcgctgccggagggcaaaactctgcgggacatccggtggttctcgatttggtgcgatgactttagtgtcaactttggtgatgtagtcattcggaatgacttggattttccgaggccaaccaaaatcggacagctgggtggagtgcacgacgtcagctcggacaacatagtgatcgtcgatgcgcagacgctgctgattccaaattttaactacgatggagaggcaccagacgccaaattctgggtaggacgtggggcaaagcccacctcccagggcatccgcatcccagacgagaacggcaaggaaaccccgcttcgtcgctacgacaaaaagaccatcgtgctaacccttccaggtgatctgaccgtgttcgatatcggacatttcggcgtgtggtgcgaagccttcaccgttgactttggccacgttcgcatcccggaccagatcaatgttcctccgtcgctgaagatgctgggcatcagcccacagtccaaactgaactgcgaagtgctgctggatgacctggcattcgaggtgcgatgggccgtcgccggcgagagcatcgtcatccaattggtagccaaattagaggatggagagtacatgtcatttggggtgtctccggatcattcacgcagcataatggtgggagctgatgtggcagtcgtgtgggttgataaggctaccggaaagggatacgctcaggactactatctggatgccaagtcgcagtgctctggagctcgcggaagttgcccggacacgaggatcaacgaaaacagtagttcgatccgtctgttgaatgccgccatggttaacggttactccatcgtaacttatcaacggccgttgagagcatcagatcatctggatcttccgatcttcaccaacggatcgcaagcgatagtttgggcaattgggccgctgaatcaacgctacgaagtctcattccattcgcagtacttgaaagatactaagcaggttgacttcggccgtcaaccgtactggaattgccctacaccggaatcggatcaacagaagcaacatgagagccctcagaaactacaaagtctagagccaaatcgtcgtgtagattccatgaaacgtccgaatgcaccggcaaccgctcgaccgcccgctaaggctggtgcctgggagatacctccagttcagtgctacgaaccagaagatggagtattctatgctcagatgggtcctaccggaggcaaacaaggctatccagcaatcaccggtcatgttggatggggcatctcgtggtacatcaatggactccttataccggaaatcaacgtggttcgtggcaaaacatacactttcgtaactgaaggaggcaacgatccagagactcctgccaaatatcacccattctacatcactgatgattctgttgggggctacgaacatcaggacgaggaagccagaaagaatattcgaatttttgccggagttcaccagaatcgcaatggccaactagttccgaatggcgttgggcggttatgcaactggactccaaatcctgatggtccccctgcggactcgtatccttcgtttggtgcttaccagagaagtctcaccttgaaatgcgaccccggtgagccaggaatcatcacctggactcccgatgccgacactcctgacaccgtctactatcagtgcttcactcatcgttacctgggatggcgaatcaacgtccacgatgcgtgcgatgtagctgccccgagcgaaatcgatgaggtctacgtggatcctaacgaagaaggcattaatgctgaaccgtcaattcgacacgaatccaaattgctgccatcagacactttcctggaacaacatgagaactttgttcagaaaaacgataaggatctgatcaaaaaccataagatgaccgctgatcaaccaacggagaacttgaagctggatctagaaaacgacccggaaatgtccaaaatcatcgaagaaggcatccgagctgccgaagacctcgaagaaaaactgaagaacaatcaaacatatgcaaactacacctccaatgaacagcatcctctgtctcactctgaaatcatgcaccatggaaagccgattcttagctcctctggattaccagtttatctacgtccgccaaatagtggtccgatgttccggccggtaaagcttcccatgagacgaccaatcgccgttgaacgacgccccgtcaatggtcggccctctcgcccatacaacatacctcagccttccatgatcatcagccactaccaaaaaccggtcaacccactgatgcgaccatttatgcccaaaacaaagctccccatgaaagccattgcgccaattttgctgctcggggaaccaacagaaatcaaaccattccgcaaagttcctcctccactacctccacagtcaatgattcatcaatctatggaaatgatgctcgtgaaacccatgaaaaccgttccatacatggttcccgatgtttctccacatcttaccatgagcctcaagaagatcgaacccgctccgatcacacttcccattcgtctcaccaagcgaccggtcctggtagaaccccaaaacgtgaaaccaatattcaaagctccgtatgacgttcacgaaaacaaaacacccgttgatccgcagtccagcgttggatttgagccaagttccgtagtagtagaaagtggattcaaaccgatctaccgtcgcaatggtatgatgaatgccgaatacgacgatcaactgcgccatcatggggatatgattcaacggcgacaggactacgatattgacgaagccatagagagtgatgctttgatgattggcagtggtgaaccacagcggcaggctttcgaaccaatgttcattccatcacccctggacagtatggctatggcgcacaaatcagccgaagttggagatcgaaaggatgacattgaacggttaactggcgacttgaaggaaatgaaagttgaagaaggtgaagataagatggcaatgcctgacgatcgagtagattcgtattaccttccaccagagacgcaaaacgttgtcaaagtctatccagaaggatccgtagtttcatacgatggtaaagcggtacttgatgtatctttattgaattcgccgagcaatgtccgacacgaagccattaagtccgtttccaagacagaacaattcatcagagacactccccaattcggacctttccgtggagaaatcccacccatctctgattacgttgcgccagactcacatccaatctacggaattcgtggatcaaattcagtacaaccaccagtttcagagtatgccaaccccttggtccccggtggcatcaacgtgcaagacaacaaagatctcagtgtaaaacctatctccaccaaactatcgattatcaagccagtcgaagaacaaccggaagagtcacgaaaaaagcgtgaagcgcatcatcatccagaccaccacggagatagtcacgatgacggctgggaagagcaacgcaagagcattagcagcacgtcgactacgtcaatggcaacactgctttatgttctctctcctctgatacttctccgaagagcgctgtaa

SEQ ID NO: 287 - DNA, 6075 bp, Aedes aegypti
ctatatcttgcttcaataacaagaattattacagatttatttaatttagcgaaagtattagcaaaagacatatgaaagggaagtctctcatgttcgttaggcagcaacagaatagatatataaataaatttatgtttaagtgggaccagaattgtgtttaaaatatgaactgtcgaaaccgagtctaattcgtagaatataaaaagatttttaactccaggctcatttgctctcttggtgctctttggaacaatcttccctgcctctgattttgcatgtttcctcgataactcacagcttgcataaaagtcccgttacttatgctcgccgctaggttccgccacaaactctcacaacatgtgcagcatactttcacccaccccctatgtatatacgtgtgagtaacgaatttgcctcattgagtactctctcccaatgatggtgttcattcagaaactgactcattcccattgagcagttttgcagttcgaacggactcgttcgctcagtcatcgaacggacttgctagcgcacggatctctctctcggggtcgccgactgacggacggataggatagccaaaagcctcatcaatccaggcagatcagaagtagcagaagcagaagcgtggactaacataccgtcagtcgcagagttgggagtaggagtaacgtcaccgtagcgaagcctttactgctgtagtgtttccttccaccatatttgtgtgattttgtcggggcgcgcgtttgtgtaggtgtgtgtcgtctaccctctagtgtgtaaggtctctggtctaggttggtaggtagttgtgaaccgtgcggtgaagtagcagcagcgcagatattaaattcagacaaccgaagtaagcagaagtgtgctgtatcgtcctcctgcgctgcgttcatcgtcttcgcacaagagtagcaaacgcatcgtcgacggtggtgtgtcgtcagcagctcagccagtagagctattcgcgtggaacttggtgggtttagtgcttacgcgatatccggacgaagaagtgcgacggttcgacgacgaagagaaatcgagactctcggggcgctgagtttgaccttatgtaattgggggagttcggcagtgcggatcccgtgaaaatttactggcttttccttcgatattcgacgtctaatcgtgccgtgagtgagtgagtgggtgggtgtgaaaaccccttgaagaaaaagctctcccgtgaaggtgtctcctgcaagcagagtgcttcccagaagggaaaatccagggagtagcattaggcgtggtagtgtgatttgccagtctactacagtctctagcgagacgaagagtgaagtgtacgaagcgaggtgtggtggattgtcgtagttgtcgggtgagcgagtaaagtaatggagtgagaagagccaagcgccgccatcggtgataagattagctaattcaatacaagtgcgggagcttttctactccatattggggcctgtgcgtgcaaagctagtgataggaaaggtttctatttagaggattagagtgtctagcaagtagcccagaagaacaatggataaatccggtggaggtgattcccgtgatggaggaccttcgtcgtcgtcttcgtcatctgcctcgtcaccagcgccacagcagactgcgacagttccggccattgggtgtggttccagatccagctcgagttctgggacatcgagtaacaccgcccctatgacgttgaacgtcaccaccacgaccgggggcagcttttccgtcctggttgacggtgaaaattccgtggaaaacctcaagaaaatcatatcgaaaaagctgaaagtctccaaggaccgtatctgtttgctgcaccgcgagagggagcttcacgatggcactctacgagagaatggactgatggatggctccaagctgatcctcacaccgaacgttgagactggactgctggcacaacgggcggagaacactgtcatgcaggcgctggagtcgctaaatgataatcaggtgaacgattttctcagtggtaaatctccgttgaacttgagcgttcgattgggtgaccacatgatgcttattcagctgcagcttagtactttgaacccttcgtcgcagagtggtagtcgctccaaaactcacaaatctcgcagcttaactggaggaagcagcagctctaacgcagctggaactagtctaatacaagcttcgtcctctaggagtaggaccagtatcccaatagggttccgcagagtagctgccgatggctcgagtgggtccagcaacagaaccattgttgaacacgtgaccgagacacagaccttcacaaagcaggaactagaaaatatccatagcatagtgagatctgccgaaagtgaaaaccccacaatggccattgtgcgcccaagcgcaccggagccgatggagactgaaccggaagtcagaccttcggcatcggagtcaccgatcaaatccctatccaatctggtctctagttcgatcaacactagtaacattcccgtaccgtgcaataacaacagccttccagtggatctgccctcaccttgcacggatcccattagcgccaacctcacctcatgtctttgcaaaagactggacaacaacgacaacaactcttgcgatacaacctgctcctcgcgtgctccagaacctcaaccttcgacgtccaacgccagcttgcatcgcaccgcacacaatcccatcacgcgtcacaaatcaaaggtccactctctccggaagcactacagctttgacagcactgccttggagaagacggaacttgaaacagtacaaccggtggcctcgacgtctgctcccaactctccacagcgcccggatcaaactcttgtgcaccattcacatcatcaccaccaccaccatcagcactatcaccaacatcatcatcatcaccatcacccaagtcatcaatctcaatctcaacccggtccaagcaacgcctcgcgagccattagcactgacccggcaaacgcagagaaccctgcgctagcggaagcctcccgcaatctaacacaaaccctccggaaactgtccaagcgcgtattcaccaacaaggttagcgacgccgcacaggaacaggctcgcaacgtcagctctggagcagtaatcgagtcgatgaaacaccacgggaagggcatctactccggtaccttctcaggaacgttaaatcccgccttgcaggacaagttcggccggccgaaacgggatatctccaccatcatccacatccttaatgatctgctcagtgctgcgccgcaatgcgcccggacaggaaccaagatctacttcgaaccatcgcagtcgacaagttctgcctccacttcagcgaccaaccatgtcacagctggaacaagctctagcaccggatctacacccaccagcagtaccaacgggagcaacttgcaagccgcagccctgatggcccccagtacccttaccactccagtggcaacgcctagccctcgattggtttcccgttgcgtcccggcgtcgatccacaccaaaaagtatcccagcaacagcaacggaacgactaccactgtcgcaaaccttggccctagcagcagctgctgcagcggttgcaaacccatagaaccccaaaccaacggtggcgccacttcttccgcccttgcagctcgctgccttcatcacgctccgaaagccaccccgaaagtgctgtgcaaatgtggcctcccactgacggcagcacccacggcgtcgtcgtcgtcgtcgtcggcagcacccagcagtgccccacaacattgcccacgctgcgccgccgccatcagtgcagccgagctggaaaactccaaaaccaaatccaagctagacaatctccgcctgattatgcagcagaaaaaggaacgccgcgaagcacgtaagcagaagtgtgcgccgtacagcaccgcggcaacgtccacgatggcctcctcactagcagcatcatcatctccgttgtcggccatcggagtcagtgggacgacgacggcggctgcggccgccctcgttaccccacaccactccaccttttcagccaccgccaccaccgccgaagctcaacccattgaagagacaatggatacgacttcggccctggctgcaggagaaactccagcgacggcggcggcagccgtagcagcatcagaatccacgggagggaatagcaacagcagcaacagcaacgcagcaaattcggccactgccaccgctacggcaacgaccaccaccacagcggcggcgacggcggctgcgacgtcttcggaggcggctcaaagtcaccagatcgtcgaagaggttgatactgttgcataagaaaatctacggaggaatactttcaggagcagcaagcttaaccaacaatgcagcgcaacacagccccgacgaattcaactttaacttcaatccgagaggaatttcagcaacgttggcgtagaacccgttctagtagaggatgaaatcattttgtacaaaaacgaatagtcaagactaagcaaaatattaacacttaataaataacaaagtactaacagcataaataaatttcttaggcaaaagatgatacatttctagcagatagagctaacctcctgtaagcattgatgaattatcccgcaaaacggtttgatgcgaatctaaacaccctgaagaaactagaaatgagaaaatttatcgcaaaactacggtagacgcagaacgatgatctccaatttgaatgaatgttccgctaccggctagccaatcatacattgcgattgataaatcgtcttagaccaggtcgaaaaaaaatccaagctgtagtaagtattgataactgcgaggaaaattagcaaattctacctatatctttaaggcaatcactaaaaaaaagaatataacacaagacactctttaagcaacaatggcttctggtttccaaaactatctccattaatagtaacactaactcggtgcaataccggaatttattgaaacgaaaaaaaatcctgcttctcctaaaactgcaagcgacaaaaaaaattaaaactcattcctgtactatgagcaagtatttgtagcgaagagagcgagaggccccttcatgcgtactattagcagcttagtgaatcgaatttaatcaattctaaatctagattttgcttccttggccgcgcgtacttttttcttacgttttgttttcactctgttcacacgatttttgttttgttttctttttttgctctaattctgttctgcttagtttaattatcttatctactgcggatgaaccgacgaaaacagtagaatgtgttcttttaacaaaaaaaatctattgtcttctttccctcgagagtttggcgagtcgacctcaaaggttccgaacgggattgggttttattacaatcatttaggattacatttgataaaaaataatcaacaaattgagcgattgtgcgtggttattgtttgtgttagaatcgagagatatgttttttgatttgccttactatgtttattaagttgagatgagaaaaataagaagaaaaaaaagttagttgtagcgtgaatattataaaacacagtgattgtgtttcgtagttgtaagctgagcgatgttccgaagcaagtagcattcgtacatttgaacgaattgatttaacggaagggagtggtacatctttcaaagacaaacctagcaaatatatattcaaagaataaacaaacaaaattaaatgaatgaataaagaaatcacgtcaagcagacatgcaaactaaaaactatgggtgagcgtcatttgaaaatgtcatgcccctggaacacaatggtgtagcgtaatgaaacggtatgaagttattaatcaataaagtaaacaaataaatcggatggctaaagaacaaatcaacgtgtaatgactaagaagagtaaatcttaaacggaaacaataaagaattattgcaatctacggcaaatcatgtgtgtagttatttggcgatgacatgatcacaagactgaaatcaagctattagggtggcctataacacagggtaacaaaaattaca

SEQ ID NO: 288 - DNA, 1473 bp, Aedes aegypti
atggcttcttcgccgactaatatcgatgatggatgtcggctctgtttgaatccgtttgtcgaaagttacagcactatcgaaagccctttggtgaaggaacagatggagaaggtttttaaatttccgattgaatttaaaaatggattgagctctagcatttgtcaatcatgctcgaatactataactgatttctaccattactcggaagaagcgcgtaagaatcaagagtttttggaagctgagtactctgacgaagaagttggaacgtcccaaaattatccaacattcgaaaaccaaatagactcggatgacagtcaatcgtacggtccaagggcaaaaattttggcaattgaatcgatctacagtgaggaaacagacattcagcaggagcaggaaccgattgacaaaacatcaaaaaaggacgtaagcactcaaacaggtattgaagattcctctccaaagaaacctgcggaggatgatgaggataaatttctcaaggaacattttgcgttgaattgcgatatttgtgcagccagtgtttcgagcttcaaactactacgcagtcatttcgaaaatgtacaccatctcaaaaacgcatatgtgaaatgttgcaacaaagtgtttcacgaacgaagtactatcgttgaacacattcgctgccaaagccaccatgtttgtctacagtgtaagaaatattttagatttaaatcggctttaacaacgcacatagccaatgaacactttatcggcaagcaccctcatacttacacctgcggtcattgcaaagcgcatttttcgtgtgaaaaggatttgaattcacatattggcgaatcgcacactaaaagcgaagagcagcagtgtctaatttgtaaccaaagggttcgtcttcatcgctaccaacgacacatggaagaagttcatggtacaaccaaaggaaatagaattgtgcacaaatgcgttcactgtccacggtatttccgggataaatcttccctaaacttacacatgaaatgcagtcatcatgagtgtgccaaatgccacaagttttttgaaagtcagcttttactgaacaagcacattgtagcagaccatcgcatgggctttgtgtgcgaattttgcggtaagcatttcataagcagaaccccgtacgagctacatgtgaaactacacaaagaatcggaagctcccgagggtttgtaaaccactgaaacagcacagattgtgtttcaagaattcgaaaaaggaatgtgtggaatgaatgtctaccagctggactgtatcaattccttgacagcagattgagaatagcaaggtgatattcatactcggtggcgtaataggttagttcttgttttaggttatcaataaaagaaatctcagaaatatagtcaaccttgtcaacgaccatttgaagattccttggatcgatttgcaactttgtagctctctgagtaataaatcatttatcttgtt

SEQ ID NO: 289 - DNA, 1308 bp, Aedes aegypti
atggaaccgcgagtggatagattgtgcattcgcaattttccggaatctttcagtgaatcggacgtcaaagaattcctctctcggttcggtatcggtagtgtggagtttctgaagcgtcgtagaaaacttacagctatcgtttacagttcggaacaagtgttaaccaagtgcattctatcgcgacttcaccagctgaaagtcctcgacaaacggctgattgttgagtactatgaaggatcggcggaagtggaaatcgtcgatggtgagagtgagacaaagaatacgtccagggtccattcggctcaagagttaagcaagtttgttaaagccctacacgccgtccatccagtggactttgatcagcctccaccgccgtatctccggtatcgatatcctcgagctacgcgggaaataatcgacagcatttgtgtggcgctggaatcggtgccgaagttctacacccaagtgcttcatttgatgaatcggatgaatctgcctcctcccttcacgacacgggatgtagaacggcggggttccgtagtggagaaacgggatgctgtccagcaaacggatcctgttcgaatcaaagagtgtctcctggtggatgatgaatccgaacttgagtcggacgaagaaacgccacaggctgtaggacctaccaagcaaaaggtttctctagatagaaaccgattcaagccttacgttttgccacaagtggtcaacgttcctcataacggttcaaacttagttaaatctactcctcaacctaaacccatgaaagctagtcagaacatcattcttcggattccagacaaactcaagacttctaagaaagttcctacatctccaccgaaatctcctatgccaccccccacaaatcccccaacaattaccacggaaatcgacctccttgccaatcgcatcccaccggaccaattgaccgatctcccggtctttaaaaactacacccccggcgaaccatccaacaagctctacctgaaaaacctcgccaaaaccgtcactgaagacgacctcaaacgaatcttccaccggttcgccatcaccggccatcccgaccgcgaaatcgacatcaaactcatgcaaagtggccgcatgaaggggcaagccttcgtcacattctcctacatctacgaggaagacctcgacctaatggaggagaagcccatagcacgtgcgttgaggctcaccaacgggctcctactgaaggacaaaccgatggtggtggcgtacgggaagagcagcgcggccaaagtcgaaaaagaagacggaggggagaaagcgtcgtag

SEQ ID NO: 290 - DNA, 4841 bp, Aedes aegypti
gatgtaagtcattaaaatctgattttgggaacagtacatttttaatttcatactaattgtacgggagacaaaaaactttgaagtctttaataaattattttatttgttcttttggacggaaaaattatctaaatatactgttaaaacgccacttacacccatttgcgtttgggcgcttcaactggaaaagggctgcgtcgactgcatgagcgtcagtgtgcatagagaagatgtgcatcggtggcagcgtttctggaatagagcgaaatagcagtgaccgtcaaataaaatatggattgtgccacaaacggagcacggggtggattggattgcgagcttttgcaccgagctctcggttcatgttgacatttttatttctcttcgtttgaacgtgatactaatctatcggcactcggctgaccgattgatggcgtcggatgcgatcgtagtaggcataacgacatttccacgtgcgcctgtgtgagtgatgccaggttaggagaaccataatggcggaaaatattgtgtaattttcagttatggtggcattttccggtttgaaaaatcggtgaaattacgtccgaattcagtttgaacacgtgccaaagggggtctgaagtggtgattttgtgaaaaattgttttgttatgcgttttcggcgacgaaaaatggcgaaaatttagtgattttgatttttgaatagatcctgttgctgaggtggcattgcgtgaagaagatcatgcgtatggctttactgcaaggcagttactatccaagtgcaacgaaaataattacgtagttcaatttaagcatatgtttatagtgtggtcatctaatttttcagaagctacgtaaatcaaaactgtgttgggatcaaagctttagttacactgaaaaaaaaaatcgtctgaatgatttttgcaaacgtgctcaccgacaaaatttgaattaccagtgaaaaaatcgaaaaacctcaaacgtgttttcaattggaatcctgcaatgaagagcaaatacagtgctgttaccaaataaaacccttcatgcaagggtagcaggtgtattttccacaccgaagccaggaaaagtggaaaaacgaagagagaaattttccagcaaacaagtgaattgttcctgtggcgcaaaaagaagaaagtctggtgacgcaactctggcttcctgctcaaacaaaacccggagatggtgacgatgcagtgtgcttactagtaacttgtgcttgcttacggtaaccctaccatacatttaccgggtcgggctgattcgagcaacagatgccgacgacaacgactacaaaaacgagaaccgattgcaaacaactcggcttgttataaatattgtggtacccagacaaaaaaggcgatcgtggaaattctacactaaactggttggaagtcagccggaattcacacacgaggccaacgactcaaaagcatgaccaataaagccagacttcgcagctgcaaggaactgtgcaatccgaactttttctgtaacgtgacttaaactcggatctgaaatttctcttgcgaacaacgccgaccaaaaaagtgagtgaagttgctttcagcttcacgttaaatgttaggaagtgtgttaatatatagcgtaactgaattaagccgaccgaagaaggaaactgaatgtgatatcaattagtgtgtaagttagtagcttgaaactcagtgattgaaaacaacgagcttttgtgaagttagtaacgatccacaaatcaaaattgttaaaatagattttataacggtcacaaagatggaggatgatccggatgacaaagatgataccaaaaggaagtcccggaacctcagtgagaagaaacgccgtgaccagttcaacctgttggtcaacgagctcagctcgatggtgtcgtccaatagccgcaagatggacaagagcacggtgctcaagtcgacgatcgcattcctgaagagtcacaacgaaatcgcggtccggtctcgggtgcacgagatccagaccgattggaagccttcgtttctgtccaatgaggagtttacgcatttgattctggaggcgctggatgggttcatcatcgttttttcatcgacgggtcgggtgttttacgcatcggagagtataacgtcacttctgggtcatctgcctagtgacttgctcaacatgaccgtgtacgatatggtgtacgaggacgaccagaatgatctgtacaacattctgctgaatccggcggcggtggtggatcctttgcagacgggaatctcccgtgaaaatcaggttaccttttcgtgctatatcaagcgtggtacggctgattaccggacggaggtttcgtacgagttggttcaattcaccggatactttagaagtgatgttgacgctgattccttgatgacaacgtcgcggtttagtggttacatgaccgatgccgatacgaggttgatcttcgtggggacgggaaggctgcagacgccccagctgatcagggagatgtcgattgttgatagttccaagagtgagtttacttcgaggcacagcttggagtggaagtttctctttctggaccatcgggcaccgcccataattggctacctaccgttcgaggtgttggggacttccgggtatgattactatcatttcgatgacctggagaaggtagtttcgtgccatgaagctttaatgcagaaaggagagggaacctcgtgtttctataggtttcttaccaaaggccaacagtggatttggctgcaaactcggttttacatcacctaccatcaatggaactccaaacctgaattcgtggtgtgtacgcatcgtgtcgtcagttatgccgatgtgatgaaacaaatgcgaaatcaagctggtggagagggcaagttttccgaagatacggatagcgtcagtataggggtagagcggaagtttcaaccgagctcgtcgcaaagtttactggcaacatctccgtggagttcgaagagctctcgtacttcacggatagcgccaactccaggaggatcccccacaggtgctccgtcaagaggaagacataggtacaacacctaccaaggtcctggatctgactcggcaacttcaatgtctgctgaatcacatgtcagtcgacaatcgatgatgacgcagcatagttcaaaatcacgagttcgctccaacactttccactcaaagccttcctctcaagacggaagcagtcagcatacggcggctcatttcatactccagcagcagatgatgccgaatcctcaacagccatctccggagtcttttcaacagatgctggcgacaactcagcaccagattcggcctcctccggcagctgcaatcatcaccccacccgtcactcagatcatcagcccagctgggtttatcgaaccgcaacagtatttggcagcgattccggtgcaaccagtagcaggatttcctccggactcgtcaaccggcgttctgtctcccattccaccgacatctcctgcggcatatgcggttcatcctactgttccttctgcggctgggagcgtcgtgctaactccagcgcagaaccaggttcaagatcagttacagagaaaacacgaagagctgcagcatctgatcatgcaccagcaggaagaactccggagagttcaggaacaattgctaatggcgcgttacggcctgttaccttccattgtgactcttccattcacatccgcatccagcagtaccatcgatattagtagtagatgtagcagcagtacatcatatctccaacatcaccagtcatctcacagtagtcatcaatatccaacgcatcctagtctggcgaatcagccgcaaaacttactaaacccacagccgcaccaatcccagcagcaacccgaccaacagatgtctatacctctagatcagaaaccgatcttccatcctaaccagcagctcaatttcactgacactggacagccaaagcttcctggagaccctaacagtgaggctatttcctacatgcagctaactcccgtcccaattcatcacctgcagcaacagtcacaacccttgcaacagcaacagcagcatcatcatcaaatgcagaaccctggtatgaatctacccggccccagtggcaacagcatggagctattgcagtaccaaatggcagaagagcaagctcaaaccttgttcacatcgggcatggagcaacagcagcaacaacaacagcaccttcctcaaccgcaacaacagcatcatcatcaccaacaacagcagcagcagcaaatgcaccatcagcattcgcatcaccatcagcaccatcatcaacaccaccaccatcagcagcaacaacaacaacaacagcaacagccgcaacatcaccaatcacaacatcatcactcgcaaagctcttcagtggggtcgccgggaggttccacccgaagtcaccccaggagcgatatgtagctttctcattagtgatgaggatatgagagaactcaaccaaagtgctatcagagttttgttgagaaatgtgagttgtttattatacatttttgaaaatcaagttgaaatgcgaaataattcaaaatttgaagtgatgcgaagttccattatcgtcacaactggtatagttgtgcccgtgtttgctaagtcatagttgagtcggaagtggccagccaacgctttgactatgagacagccattttgctttgatagattcgttaaatactttgccacccttggagatggctcagttatttacaattttgtttgatgacacgactccaaactgtttcagcattacttgggctgagtagccgccaagaattgatctgaagcttcacgcagcacat

SEQ ID NO: 291 - DNA, 2793 bp, Aedes aegypti
atggaggacggaagcaatagttgtagcagcaacaccagcagtagcagcagtagtagtaccagcagcacaattggtgatagtgataaatgctccgacgctggttctagttccagtgaaaaggatattgaaagtgaaaatgacaaggataatgaaggcagccgaccggacagcaatgtaacggagaatggaacgaaaagaaaatctgggactaccaacaatggcagtggaaatgaagacgataaggaggtcaaaaaggtggcagttaagactatcgaaggcaatatgggccctttaacagcgacggttaaattcataaatcccttcaaaaacaactggatcaatgcggatcgactgaatgagctcaggaagaaggtgcaggatgcttccaaacatcatcgagtgtttcttgtgcggggttcgttccacacagtgcgacgagctttgaccgaaaggggttgggtggagaagttagacgggtttagggctaagccacaggccaacacttcttcctcggggtttattttggaggatctagtacaacagctcccagaacgtaagccaggcgaatcacgtaaaaaccacattgcaaaatgtgagcgaagtataatgtcacgcttcctggagcataccccaatcgaccttctatggacggctcgcagggagaaggccgattggttggatatgactaaaaattcttccctgatcatcaaccgcttcagcaaggcaccattcacaacaaaagaaggtctatgttccgctctgcatgattttcattggttctacgaggaaggcatgtccgagacctactttcctcgctgctacaacgtgtggaatccagaagagctcaacgagttcatagacaactttcgtctgacgtcttcgatgggactcctcaagtggttggtggaaactcacgataaaagaggtatcgatgccattctgtcggacgagggaaaagttccaggatcgtgtataaacttcgcactctcgcgctgcaaggagtatttggattattgtcttcacaacgatatcgacgttgaagaggacgtaaaaatctgggaccacgattgggacgtatttcttacccatcattatctgctgacccacgagggcggtacaatccagctaatgaaggaagaagaagatacgaatgcaatcgcaaattacgttgcggaagccaagtcagtcttggagcaaatcaaaaaccactggccacaatatgcgctcgatgggtacctgaatatatggatcgttaaaccgggaaacaaatgccgtggacggggtatccatttgatgaacaacatcaagcagatcattaccatggtgaatccaccgatcgtcagcaaaactagatatgtgatacaaaaatacatagaacgtcctctaatcatacacaacacaaagttcgacatccgtcagtggttcatgattaccagcgtacaaccgttgataatatggttctacaaagagagttacctccgctttagttcgcaacagtacaatctaatgaactaccacgagtccgtgcacttgaccaatcatgccatccagaaaaagtaccataacgcagtgcgggatgaacggcttccccatgagaatatgtgggactgccatacgtttcaggcctatctgcgacagatcgacaagtacgaaatgtggtcagagcgaatctatccgggaatgcagaaggcagttattggatcactgctagcctgtcaagataacatggaccgaaggccgaacacgtttgagctgtatggtgccgacttcatgattacggaggatttctatccatggttgatcgagattaactctagtccggatttggcacccagtacgagtgtaacagcgcggctttgtccgcaatgcgttgaggacactattagagttgtaatcgaccgacgtcatgatgtaaacgcaagtaccggatcgttcgaaatgatttacaaacaagttatcccgaaaacgccagcctatatgggactaaatctacaactacgaggtcatcgtatcacaccaaaaagcactgccaaaaaggatcgccttcgcattctacccgttaaacctgtccaaaatgtcctacaagtttcgagacttgccgcttctgctgtcccaaaaccaaccacaggtcctgtgataatggatctgctagagtgtcttcaattcgataccaaaatgcaggaagaggaagaactccgtgcacgaactgccatctacaggaaatctggattttccaccagacccaatctacggtatgatttcgctcgtaaaaagtcgtatatcatagccaaaactggagaattttttcgtagaaacggtggaccgaagtatctgactgagggagaaacgtatattgacaatatcgaggactgggagcgcgctacgaccagcttctttcagaataattatgccagcaccttgagctctctaacaaccaatagaaacaacccatatggttcaggagatctacaaacatcacccaacactagtagtaccaatctgcgatattcctcgaaagctgcctacgctgccaactattgtgatgatttcgataatgccaatgtcgaaaataacactgccacaagtgagaatcctaccggttatactagatatagtaaactaacagcaaatagtagcaacaaaactgcgttatctacgaatttcaataatttctacacccttgggctaagccttcggaagcagaccacgcccaggagtccaatggccactcgaatgagcgccaacttcgtacaatcaaccgaagatttaattgagttagggaagaattgttaa

SEQ ID NO: 292 - DNA, 4421 bp, Aedes aegypti
atagctgcccaggaaacggaaatcgtccgcaaacagtacaccaaagtcctggacgcctacggatgcctcggcgtactgcaactcaatgcaggcgatagctctctactatacctggtgatggttaccgggtgtttctccgttgggaaaatcttagacaatgaaatattccgcattacccaaacgcagtttgtttcgctacagtaccaaccgacaaacgaggatcgaatctccgaaatccgaaaggtgttgaactcaggcacgttttacttctcgtttgcgaacccggcggccagcaacagtgtccagttggcaagtggaggattcaacttcgacatcacactgtcggctcaaaggcgtcgacgcactacggagacggacaacaggttcttctggaatcgcatgttattcattcatatgctacgatttggagttgagtgcaatttttggctgctgaaagcgatgtgcggatcggtggagatcagaacagtctacgccgggagtaagcaagcgagggcggctatcatatcaaggttaagctgcgagcgtgctggaacacgctttaatgttaggggaacgaacgacgaaggatgtgtggcaaattttgtggaaacagagcaatgtatttatcttgacaatgaagtatcatcgtacattcagtctaggggaagtgttcctctgttctgggaacaacccggcgtgcaggttggttctcacaaagtcaaactttcacgaggcttcgaagcttcaagagcggcgttcgatcgtcacatgacttctatgaaagctaggtacggcaaacaagcaataataaatctactcggaacaagtctgataggcagcaaagagggtgaggccatgttgagcaacgaatttcagcgacatcatagggaatccaatcacacggatgtgccgcatatagtgtttgactatcatcaggaatgcagaggaggcaatactagcgctttatcgaaactgaaggccaaaattgacgccatgtgctcagattatggcctgttccatgccataggggacagcgtgttccgagagcagaaaggaaccatacgaaccaattgcttagattgtctggatcgtaccaattgcgttcagacatacattggtttagaaattctgaacgaacaaatatcgcaaatgtccgcactatcagacaaaaagcagcagattgcctctcggttcgaggaaattttccggcagatgtggatcaataatggtaacgaggtgagcaaaatttacgccggaaccggtgccatacagggtggttcgaagctaatggacggagcccgttctgcggcaaggacaatccaaaacaatttgctggatagctccaaacaagaggccatcgatgtcttgctcgttggttcaaccttaagttctgagctggcggatcgggccaggatcttgctgccgtcaaatatgttgcacgcaccgacgcctgttctccgcgagatgtgtcgtcgctacgaagagtttgtaaatcctttggatttgcgcattgcatgcggtacgtacaatgtcaacggtggaaagcacttccgaagtgttgcctacaaggacgtatctcttgcggattggttactcgattgccatcgactggctcgatcaaaatcattagttgatgtgagccacccggaggatagtaatgaaccaccgatcgacatttttgcaataggttttcaggagattgtggacttaaatgcatccaacattgttgcagccagctctgataatgccaaagcatgggccgaagagttgcagaaggttataagccgcgacgaggagtatgtcctgttgacatatcagcaactggtgggagtttgtctgtacatctacattcgaccccagcatgctcagtacatccgagatgtggccattgactgcgtgaagacgggtctgggaggtgccacgggaaacaaaggtgctgctgcgatccgatttgtaatccacggaacatcaatctgtttcgtgtgtgctcatttcgctgctggtcaatcgcaagtcgccgaacgtaatgctgactatgctgaaatcacccgaaagatcgctttcccaatgggtcgctctttgaagtcgcatgattacattttctggtgcggagatttcaattaccggattgatatggaaaaggacgagttgaaagatttgttgaaacagggtgacatcggtgcagtattgcagtacgatcaattgagaattcagcagaatacaggaagcgtttttaacgatttcctggagggcgaaatctcattccctccaacgtataagtacgatttgttcagtgaagattacgacactagtgaaaagtgtcgagcgccagcttggacagatcgagtgctgtggcggcgccgtaagcagagtccagatgctgataagcatcctaactggaaccctggaaatttggtgcactacggtcgagcagaactgaaacagagtgatcatagacctgtgattgcaatcatagatattgaaatatgcaagatcgatcagcaacgaagagcacaagttttcaatgatgtcatcagagatttgggaccaccggatggaactattttgattcaagcaacaaacgttcccagtagcgcagattctgacgaggacgaaggcagtatctacgacgagaacctgatgagcgcgttgatccaggaattgactcagatcggtgaagtcactctggtgcgattcgttggggataccatgtgggttactttccgcgatgggcagtctgccttaacagcagctcagaagcagtttgtgcaagtatgtggagtgaacctagccatcaaattgaaaacagaaaactggatccaacgagtggaactagagattctactttgcactccaaacacagtgactttctgcgacagtcaaataggcgattacaacagccttggcattccggaagttccatcacgcccaaaaagtcctccaaatctacagcaagcacctctccgaccggctcccccgagcagaccgcctctaccgaaatctccccaagcgtcacccaaacatcaaccgcagccgcatcatcaccatccgaaagccggggtcatcagtttgggggcagaagtgctcatggcgtccaagttgcatcagaaaccggcgatgcctccttcgccactggtgcccacttcagctacaacgaaaaccactcctcccatcgaagagtatgccagttctagtccaatacttggctcgccagctcatgggtcatcgcaggctagcacccctccccaggataccggagctatttacgaggaaatcagcgacgatattgccatacctgaaccgcgaggtccgccacctcctccgccgcgctgtgacgtgtacgacctggacgtggtcagcaacaataaatccaacaagtcgtctcctcctggtacctccggtggcagttcgggagccggatcgcctcaatcgtccattccgtcgcaagcaccacccaagacaaatcctcctccgttgccagtgcgccggggggttcctccgccgataccaaaccgaagtgggggagcgcctcccctaccagcgcgacccaacaattcctaagcccaggagcagaatatccaaagtttatatttaacgtaccaatcagtcaataatcatctaaactgctgactataataagggaatattctacctatttaacactgtcagagaatttaatcatccgtagctactcgtagaatcagcaactggaaagtactgtaactgctcgtaggcgatatcttattccgagttgagactaaacgtaatctctaacggtaatcacttgactgtgcatgttgcattagcatagtttagcgtagaaaggagatgttaatatagtgaaacataatacattccacagtttatagttgcatgcatgatatgtttgaatgttggcattattattggatattttgttttgtataattgagtaggagcagcttaatttgtatatttcgtgtatttatttgaatatattgatcgggtcaaaaatgtatgatggaatgtagaaacaaatgctaacgctttgtattataaagaaagaaatttaattcaacacgaaaagattccttatcaaacacgtattgtgatgtaattgcaaacaattgtaaaagtgaatataagttatatcaactaataagtgttaacacatcaaattattattgttgttcgattgccgttcccgaaaggaattccaaaactcgatggaagacaaaaaaaatacaatagctatcaatacgaaacaaaggatactttattgaattaatgatggtgtaaaaacaattggtaacaaaattaccaaactagtgaaatgattgcaatgaagtatgcgcccgttgaagcaccatatagaagagaattattaactattatgtaatccgttatagaaaacagcagaaatacaatctattcaaaatagc

SEQ ID NO: 293 - DNA, 1530 bp, Aedes aegypti
atgacgcaactggaggacgacgttctgctgaacaatctgctcaagttccccggaactatcataatctacaacaatgacctgaatacctacaattacgtcttaaatggtcacaattccattccactgacccctgccacgactgcactggccgaaggcaccatcgatctgaacggcgcagtttctatcaatgtggaaactgtgccaccggaagccccacctccacctgctggtcctattcagtgtttcaccgagccgcccgttacaaatcagcaacaccactacgaagaagctagcagctcgagcagcagtgccgatgtttgtaacgaatcgctcattgccaacaccagcctgcaggaagactgtgaatccctcgaagaagagccgatggaagctgaagaggaggactccgaaccagagttgactaacctctcgtggttgaccgaactgaaaaacattaccaatctcacaccgtcggatattccccagacggatctaccgacagcacgcttcaataaattcatcgcccaggtgcgaaggagtcgtgaatcgtacgacaaacgcaaagagcagtacacttcggtggcgaatgctaccgaaaaacctcccttcaattatgcgcaaatcatagcgatggccatgctggatgaaggacggatgaccttgaaacagatctgcaagtggatacaggaaaagtttgcatactacaaggtgcacaagaactggaataactccattcgtcacaacctatcgttgagtttctactttaccaaagtgtcacgcgccaaagatgaaaagggaaagggaggctactgggaactctcgatggatgcgtcaaaaagcgaaaggaaacgaattaggattcgtcaacggaatcgcggtagctcaacaacatcctcaatccgcagtcgtaaccggcagagaaagtctgcctccaacggtgattcgacgatcgattgcagtaatggcaagtcaactactaccagcagcgtagacggaaacaacaacgatagcccaacgactaccgtttgtcatacagaaaccagtgccgaacagatgatcatggatgatcaaatgatccacaacgtcaccatcgacagcgtggacaatgtcagcaacgccgattccggttgcgttgatatcgatcagatttccacaatcagcgaatcacccgttttaacagttaacgacgatcagttgatccggtccagcactttggtagagaactgcaatatcaatttcgattcgatcatcaacgcggagagtggaaccaatatctttaccaatcttagtgtagatgagattttttcagacaacgaaattccccagccagccaacgacgacatcgtggtaccattcttcggtaccaatggacagcagacggtacaaacaggacccaatgtgattgtcgaaaccattccgtattttcttcccgatatgggcaactttgacgagcaagacttcggcaacttgatcaacatcaatgagcaggaaatcagcgatgagtttctcaacgagcacggatttctgtag

SEQ ID NO: 294 - DNA, 426 bp, Aedes aegypti
atggcgcaacagcaacggagcgtaaagttcgcaaagttcgacaatccggcctcggtttcggtgaccccgacccggcagctgtcctacaactatctggcatcggtcaacctgtggctgctgctgtttccttgcgatctgtgctgcgactggaccatgggaaccgttccgcttgtggagagtttcaccgatcctcggaatatggccaccttgggagcgtacagcctgatcggagtgctggtttgggttgcgtttctccagggcgatcgacatcggtctggtgtgatagtgatgttcgcaaaaagcaaaatcaacgtagcaggcaaatatcttgagactcggggctctttatctcctccgatcgaagacatccatccatttggcggcgtgaatgttgtgtggtgtgttcgccacgtgtgcaatgcataa

SEQ ID NO: 295 - DNA, 1495 bp, Aedes aegypti
gaaaatctgatcgtcaacttctcgagagggaaagccagaaccagaagattttcttgggcgttagattaattttgtgcgtcgacggattaacacgtgtaggcttcggcggttctttgcgcgagttctgtgagtttcggaaagtgcgtgttctatgctctcatgatcaacatggaaagtgaaaataatgatagacctaacagccacagagcgaaaaacaatttcagtattgagcacttgttagctaaaccggatatctataggggatcaaatgttaagcaaagctatgaaaacagtggtgtaaatcatttacatagtggaaaagaagtgttggatagaacagaagatagatcatccagcaatgatccatatgtggaatgctctacatcgccagattccagttgtaacgaggaaatgatggataactgcagtgaagcagcgtcggaagaaagtactacaggaacatccgacgaccgtaagaaacgaccgagaacagcgttttcggctgcacaaatcaaagcattagagactgagttcgagcgaggaaaatatctatcagtagcaaagcgaacagcgctggccaaatctctgcatctaactgaaacgcaaatcaaaatttggtttcaaaatcgacgtaccaaatggaaacgaaagtacacatccgacgttgaacagctagcctcgcattactattcccaactgggaattggtaactttgcgcgccccatggtggttggcgatcgtttatggcttttcagtcaaactccaaatgggcctgctccagtgcaatcacttcttctcaatacaccgtctcacattggtccatcccatcctgcaatgagacaatatcaaccgatccctccaacgccgattggagtgtccagttttgcatctcgtcctagtaatggttacaccgtaaactacctcccgaaatcgtcaccccaagcaccaccatacagcttgaatcggtacccggtttcaacattcaaacccttgccgtttgaggatcccacgggattttacaaatctacaccggagatgacggatggctactgtgcaatgccaaaatttgggccaacggaattcgtaaacgatgagctttcccccattagtacaagttcaggcattgcagatctggaaagagcattcggcaatcctagcagtctgttggatggccagcttacttctagaacgagtgaaggactaccaaggctcagcgcagccacatccgaccatggagtacaaagcaatttgaaagacctcacaacggactcttccagtgaaattgattgcgaagagcttgacgataaagattgaagtttaagatgttataatgctaccaaaatgaactaaaaccaaataaattagaacaattaagtgttaatatcaaaatctgttttagtgttaattaatacacaaagggtctttaataaaaatctataatttgaacagaattagttcattaaataaaagcaaacaaaaaatccccaccttttgg

SEQ ID NO: 296 - DNA, 1158 bp, Aedes aegypti
gccacgtcgccaatattccgcgatcgaagcatcgaagaaacggaagccgcccatgatttattgtccttatcgcagagcctacccccgcttccggctccgtgcgttgtgacaatccttcatcccagcacggaaccgaccatgaactttgtcacgtctagcactccagtcagcacaacgcaaaccccacaagccacggacggtcaaccagcgacaacgacgctcgtccagaacggcagcatcataaacttcaccatcacttcggcagccccacttacgccacccacttcggagcactcgtccgacacggaaagcaatggctcttccccaaccacttcagcgtcggtggtctcattcgtatcgtcttccaatcaatccatcaagcggaaaaaagcatgtccctcaacgacactagtcgcacaaggcaacaagaaagccaatctcacggtatccgaacaatcggtgtcatcaactaccgtccaccatcagcctcagaacaaaccgaaacccgcaactaatccacctcctcccatagacaaacccaattctccaacagaccaaactcaacctcccgtagaacctccaaatccaagcccaaccaccacttcccccaagggcaaatatcggtgccctgaatgcggcaaaacctacgcaacctccagtaacctctcacgccacaagcaaacccatcggagcttggactcccaatccgctaagaaatgccaaacctgcggtaaggcgtacgtctccatgccggccttggcgatgcatctacttacgcacaagctctcccatagctgcggcgtctgcggcaagctcttctcccgtccgtggcttctgcagggtcacctccggtcccacaccggcgagaaaccgtacggctgcggtcactgcggcaaagccttcgccgatcggtccaacctgcgggcccacatgcaaacccactcgacggacaagaacttcgagtgccaacggtgccacaagacgttcgcgctgaagtcctacctgaacaaacatctggaatcggcctgctacaaggaggacgacatggtcggcggccggaagatctaccacagcagtcaggacatcgatcgcgacgaagcgcggcagagacagctgcagcaacttcaggacgagaacagcagcatgaccatcgatgtg

SEQ ID NO: 297 - DNA, 5355 bp, Aedes aegypti
gataacgaactctattccggaacggtggctgacttcagcggtcttgacccaattatctaccgggaaccattgcagaccgagcagtacgacagtttgagcctcaacgcacccaacttcgtcggatcgttcacgcagggcgactttgtctacttcttcttccgcgagacggccgtcgaattcatcaactgcggaaaggccgtcgtcagcagagtggcacgagtttgcaaatgggataaaggtgggccccatcggtacaaaaatcggtggacgacctatctgaagtcgcggctgaactgctccatgccgggcgattttcccttctatttcgatgaaatccaatcaactagcagcctggtcgaaggacgttacggcaacggaaactccaagctaatctactccgttttctcgacatcaaccaatgcgatagcaggatcggcgatatgcgcattctcgttacaggatatcgccgacacgtttgaaggcaacttcaaggagcagagtggattaaactctaattggctacctgttaacccatcgaaggtaccggatccacgtcctggctcgtgtcacaacgattcacgaaccctgccggatctaacactcaacttcaaaaagacacattcgctgatggatgaaaatgtgccaacgtttttcggttcaccgattttgacccgagtcagcacggtctatcgattcaccgccatcgccgtcgatccgcaaattaaaactcccggtgggaaaacctacgatgtgatattcgtcggaacagaccacggaaaaatcatcaaaacggtgaatgcagaatcagccgactccaacaagaaggtcacctcggttgtcatcgaggagatcgatgctcttccaactagtgaaccggtgcggagcttggaaatcgttagaaccatgcaatacgacacgccaaaggacggaagttatgatgatggaaaattaattatagtcaccgatacaaccgtgatagcgattaaattacaccgctgcagcagtgaaaagataaccagttgcagtgagtgcgtggcgctgcaggatccgtactgtgcctgggacaaaattgcgggcaaatgccgatcacatggggctccccggtggtcggaagagaactacttctaccagagtgttgccaccggagatcacgctgcctgtccgtccgggaagatgcccaaggatggcaacgcggagaagcaaggttacagaggtatgtatgattctcaattattgattgaaacacggataatcataatgcaggataagagcggctacgacgataagggaccgcaaataactccagatctgataaatgctcaatacacggtggaaacgctggtcatggctgtgctagctggtgccattttcgccctgttggtgggattcatcaccggttacttctgcggccggagatgccacaaggatgaggacgacaacctgccatatcctgatacggaatatgagtacttcgaacagcgacagaacgttaatcgacgtgaaacgtattgctctatgatacaaaccgaaccgaagctccttccacaggtcgaagaagtgacctacgctgaacccgtactattacctcagccatctagtcagaataagatgcagcattcgccaaaaaatacgttaaggaaaccgatgggtcaccaccacggtgtcaactcggaaactcttttccagttccagccagatggctatagcgctcgggacaactaccggggtcgcgacaactttggtaccctccgatcccaccaaggtgataattatcgtcgcggtgacggattctcaacaacgagaagcgtgaaaaaagtgtatctctgagacgggaacggggcggctgagaccagccagggactgatcaatcaaaatatgcatttttatataggtccttaataccaacactcgtaacagaagtctcggccgaatgaaaaggcagccgccccggcatggcatagtaacgcaacatcgttccgatagtccacagaattccagttccggatcttccccagtcatgtccaatagtagttctagtccggcgcctccctcgagcagtcctagtccacaagagagcccaaaaaactgtagttatatttatagagattgattattaaataaacccccgccaccactgcgacccccgcatcatcatcaaagcagaagcagcagcagcagctacaacagacccgtcgccccattccagcacgaagacagcgaagaagcatcaacagcagcggcagcagcgatgacaacggttattctacgcaacagaaacagccaaagcagtgacaccaacaacagaaaactgaatcgtctttcaacttcgtcctcactttcgatcattacaccacccacaactccaaaacgtccggtcggaggtcgcctcaaaatggcgcttagcctctcgttggcacacaatttcaaccaaaagctggccaacctcaacgataaatggaacgacttcagcttcatgctgaaaagcaatacggtcaagagcacaactcgaaacgattcgtaccactcgattgaatccgccgtaacctgtacggctgcagatctggaggccggtaatctgagtggcggcggacgtttcgacgaagaggagcaggagcgaagaagacgacgtcacaagaagggagatggcggtggcaatagtgggttatggaacagtggcggcagcagacagtcgcagcagaaaccttacgagcgacacagaacaagcagaatgtcaccgcgccgcaacagtgccagcggggaccccaaggagttcgacatgttagtactcaaaactacggaaaatttagaggataatgaaagtttttaaacacatggcttccattgcggttcagttgattttggcttttgctgaagcttttgctgcgcatttctttgtgtcgttgcagcaaatatattgaccggttggtctcaaacaggcacaaacgacaacctcaagcgatgagaaaccagagtcacaacaatgggaatgcttatcataaaaaaaaactagaagagataatttaatcgctttcattcactattaaccaaccattaagcaacaattagggtatatgcatccgcctaagtttagagcatttaaaaagctacgcaaaaagacacgcatccataacaactgatattaacaaacggaaagatctggtgggagtaacgcagaatactcgggtgtacatacgatatacagtgcatatatattataatcttcaaactattagggatttttgcatcagaaatagtcttgcagtgtgttacgagttacactgcgtgttgtaattgctgaataagcagaacactatatagaaacacattttgctgcagtattaaaaaagagaacataatcttatacaaatagggaagaaaaccaaaacgagttcgatgagaagccgtgccgtcgtgaacgagccaaatcctcaaacgctgagtaggtatgcttcatcacagtaagtacattaaacgtcatcatctcatttagagttacttttgatttcgtccgatttcgtcaaactcctccgttcatgccaaaccgtaacgaatactgatttcattgtaaaaagagtaaaaatctcttttgggtcgtggatcatagaacaattacattggtgtcacattcttaatggagtcacctgtgagttataatcttcagaagcactataaattttaattgatgattgaattcttttcaaattcttacagtctcagacacacatattcgtttactaaatatgcacatttccacgatttggactcctttatagtcagttttgtgcgaccttaagtctgttgaaatcttgttttgaccaacacgtttttcgtgatatcaaatcattgttcatgattcaccatcccaaaaagtttatatatcctaatactctcacgataacaaatttcatgctgatttatacattttgtggcaaaagtgatgccgagcaattatttagatattaggccagggactaggacattattcaatccgaaccaatttcatgaaaaaaagtcgatctgaacattagttaatattttttcaaatgttatgtttggttgttacattagtttcttagttctgcgaacaaaaatactgggaaatgatttttatttctaccttaagtgaattccttctgataagagagatcgtttagtctgatttatggcttcaaattgtgcaccagtcggagtatgtaaaatatgtatcgaaaagaaatgaattgctggcaacgtgcaagagtgaatttagtttatcgaatttttctaggcacttttggttttgtaatggttttaatttttactttgtttggttattcagcgcagactgtgtcaaaccgtagtaataggtataattttcgattcaatatatttatttttatatatttttcattcattttattaaataaatatcacacgtcctgttttctttgtttcgtttcacatctttcatttagtagcaaaaaaaaatacatggaaaacggtatacaagaagtcaattcagcatcaacatttaagaataatacaaaagatcattatagttgagatgcatactaggctcaacaatttcctaataaatcacacacatgcgcaaacataaaccacatctgtaagtacactgtatctactatataatgtacagttctggggggacatttttctactttagccaagccaagcttagggatggaatgaagtctaaagtaggatactgaagcaaaaattcttaacacatagaacatgagaacaggtacatgctgaaacgctgaaaagaggtacgctagggtgggatttatttgtgaaagaaataatctttgaggcagagtgcttgattaggttatcatggtttgggttggaaataacttaaagtttcaaactttaactcttggttttgcattttttttatcgatgatgaataaaactcgtaattattttatcgcatacttcaaagtgtctagtatatactgtaatcgtttatgaatgacttatcactgctaaatgatttatcattcatcggttgaagactaattgccttaaagtatgtgctaaacaccttgaagtttataacttgcaaactttggggaaatttgcaatagttggattttgactcaatttctatttagcgtacgataaaaagtaggaagcgaagatggtaagtgaggcatatctcaagagtcatttttgtacttctgcaactatgtcattaagatcaggaaggaaccttccttagcctagtagtaacgtctgtgacaacaaagcaaagccatggggctgtccataaataacgatagtcaagtcttacgcttgagaaaacatatagggtgcagagctacttgggcactttcatgattcactttg

SEQ ID NO: 298 - DNA, 1989 bp, Aedes aegypti
atgaaaaagtttatctccaagtttgaaaacaagaatgaggcaacgccaagcaaggaaacgaacagtttcgtggggaaaacgttcaaactgagccgggacaatgtggtgacggtggaggaagtgctggccgagggcggctttgcggtggtgtttctagtcaagggccacaatggccaaaggtacgccctgaagcggctgtatgtgaacaatgagcacgacttgggcgtctgcagccgggagattaagatagccagtaatctgagcggccacaagaacatcatcggatacattgaccatagcataaaccccaagggcaatggagtgcacgaaattctgctgctgatgccttattgcaaaacgaatctgcttacactgatgaatgccaggattccaaccgggttcaacgagcaggacgttctgcagatattctgcgatgtggcagaggccgttgcccggttacatcaatgccaaacgccgatcattcatcgagatttgaaagtggaaaacatcctccaaaacgacataggaaatttcgtgctgtgtgattttgggtcggcgaccgctcgggtactgaaccctaatacccacgggaggacgctggtcgaagaggagatacaaaaatacaccacgctctcttacagggctccggagatgattgatctcttctcgggacaggatataaccgtgaaggcggatatatgggccctcgggtgtcttctctacaagttgtgctttttcacgctgccttttggggaaagcgctcttgctatccaaagcggacatttcagtattccagacaactccaaatattcccgggaaatccatcaactcattcggtacatgttggaaccggacatcgagaaacgtcccaacatctatcaggtgtgcgaagtagcatttaaaattgccgggaagaccaacccggtgcggaacctaacgaaatctacggttcctgggttagaatttctgatcgttccaccatacgagagcgaaacgaaacgcgttccatcggccacgagctccaacgtaaaagcaacgaaacaaacagctgcctctgctctggaaggtggcacatccgtggctccacggcagagacccaaggcctcccaatcggcgaacaatagtttttctctgggactccctttaaatccttcacccaagaatatcctttcgtcgccaactcccggccctgctgtggcccctcaagcggaaccattcgtggccaaattcagcgccaatttccctccaccaccaacgcaggaaatccccaacagtaatctgtttcaatcaacctatccggacccgttccgagaagcggatgtcctccaagaagccggatcgtcccactcagtagtacacccagaagcaagcgttccaacgtgcgattcctcagcgtcttctggcaccagtgtagctggctctttgctcccttccaagcaacccatcgttggccatcggcgcaacatgagcgacacgtcggcattcaacaaagcctacaccacagaaacctctcagtttctggcaccatacgatgtatcatccaacaactaccagccgccgcagaacacgctcggaagtaacggttccgagcagaacctccattccattccggccactttcgattcacgctcctcgaatcctcagctgaacccaaccggtactcaacagcaaccgtggaatccgttcggtgatcccacccctttcagtcaaatgaccgaagaccacatcttcggcgaggagttcgataaaatacgacaacaaggctcccaaggcagtctgaagactccgccggaatcaacctctcggcatccctcactaccccaagtgcaacctatccttaaccaaccaattcaatctcttccccttcagtctcaattctccccggagaacattcccccggatactccggaagacgatcccttcagctcggcgccgttttccctacccgtccgggacaagaaccgctcgatcaagctcggttccaagcgg

SEQ ID NO: 299 - DNA, 1643 bp, Aedes aegypti
atgccgtttgtcgttgtgcaaacccgcaagaataaaaaatccaaaccgtgcatgaccgttgtgccggaaaagtgggccaaaagagaccatgtttactggccgccagcaaatttggtatcgctttccaaagatggattttcggaaccaaacattgatgtttggaaaattcagaaatgtaaggttgttggtcgtggctcgtcatatgcggttgctgaagacgtgatgcgacggttggaggcggtcacggactcggaggatgctgtacagtcaactctaggaacacgggccaatcctggcaagaaaaaggtcaaatttgtgccaaaagtgtacgaactgaaaagcagtaagaaggatcacgtaacaagccctccggagaacgaggccacatacccactttttccagtgccaaaaccgcagacgacctcacgcccagaggaattgcgtggcgttgcctccactgcatcacagcaaatcacggaaatctctcagattgaccaaactatgactcagtttgtcattcagtcaggtgacggtcggcaatatgtccagatgagtgacggaacatgtttggaaatcattgctggtgaagctaactcatatgcttcgacgagtactcaaattcaacctacaacacaaagcagtgtaatactggacagcagtaatgttatcaccgacaatgatctaaacaatgttctcgacactacgggaaatcagaatgatcagccatgttctatcgaacaaccgactcaagaagaacaaatgtgtcatgacacctcaatcatgacagtccttcgagatttgcaaggtcgggttaccagaatggaaacgatgctggagaaggtttttgctttcatggccaatataaatcgactcttcgaaaccaaactatcgacaaaaatgcaggatggagatgtgaaaaaatacgacgaagatttctccgagtttgacgatctcatgccggttaaaaccgaggaaaaactgagagaactggagcatcaattaaaaacacagtcatatgcaaacaaactttatagattcttcgaaaccgttttcaaattaaatggcaaacgcgaaggaaaaccattcttccgaaacctactacggaaatttgttgacccgtccattttagtttcgtactcgtggttgggaaattcacgagcaaaaaaaggtgaaccagccaacaagaacaagagtttcaaagacaattttccaagctttgttcaatttgttggccgtattcaaagatctgctgacttcgaattttcggcagaagacacggaagaatcgttcagccaatttctacggcagaaaaatacggagttgaaacggaaaattgcgagatctggcgctccgaaagcctcccacacaaaaaagaggcgacaacattctcaacatctctcacccagaatcgacgaaacaactgaagaaatcgaaaacggagatcttttagaacaaatcgccatcaaggaggtagacatcattccagcagcctcctacagcagttccagttccagtagcagctcagataccgatgttgagtaaaatgtacacttccatgtgtacaaacagcatgacatgccatttcttgccaatatgttaacttattgttactacttttttaataaaagaaacaaaatctttgc

SEQ ID NO: 300 - DNA, 1921 bp, Aedes aegypti
gcgtctttattcaagataaaaacatacagttctctacctacatttaatccaacttcacggaaataacaaatcttattatcatgtggcttacattttgtaccgtattaattatgctaccattactcgaagcgcaagtgattgccccgtatctggtgtcgattcggtcaaacgttcccgccgtcattgggtccattacagtgaacagcatttcaaaacaaatttgcaacggagtaatcatcagagacaagttcattttaaccaccgccagctgcttgtttgtacaagacacccaaaccggacagagccgattcattacttccggagagatatttatccttgccggaaatatcagcttgaatgaaaccgactacggagatgaagcgagaggcagccttaggcgtaatgtggtttccgtgatacccaacggaaagttcgatgcatcgacaggagaaaatgacatcgctttactcaagcttgaccgctcgctgctgccactggccaacaagaatacgagctcggttcactggatagagctggaccaacagccacgatcgaacccacaacccgccctggcagccgcagccacatcgcaacaacaccagacaacgacaacaacggcgccaactaacaacaaagttaatgaaaactgtttcataaacatttataacaactctgtcggggtgtccggttatccttacaccgttgtcaaaaatgtgagcttcctcgaaaaatggctatgtgatgctcagagaggatccctaagagcaggccaaacggtcgtaggaagaaatggaacgtgcatcgagtatcgtttcagtaatgcacaagcttgttggctcgatgcaaattccctgcggcgcagtgaagaaaggggctccgctctggtgtgcaacttcaaattagtggccatattgacggaaataaatccaccctcgaatccacaaacttgcacttcgataaaacgcaccacagcgtactataccatggttgctccatactatgattggattgtgagcgaaattggatatctttacaattccaccacctctcctggccatccaggagccatcggaaccacgggtagtaatccgacgatgaatgtccagagtggaccaacaccgccaatatcatcctggggagcccagcaaattggaacccctacgaccacaacggcaggcgcaccaggttgggaaatcggatattttcggacgctttgtttgctcaaaagggtactccttttctatccgcaggaaaaaccaaatccgcagctacgccatcaatcagccccggaattgtattcaaacttattgcctttaatttattcattccatttgcgttcatttatcggttccatcattgatgacgacgacggcggcgacggagagatttcgaaagctatcgaaatggggctttgtggttgagcctcttcgcatggtataccgttattttgggtaaaattgtacattttttggcgggttttcaggtctggtttctataatgttgtcaaagtcaaacaagtgaatacaggaaaggaagtacgaaggtgaacctcatgggcccatgaattaaacatttatggaaaaaataaacaattatatatcaagaatacgctttcaatgccaaaatgtagacaattttcaaaaaaatatcctaataagtcaattctccctaactcgatactaaacggataatcgagttaagaaagtatcaaatttgtagaacagaaaactagtactatagtaatcatgcaagggaccatggaggtagtcatgaaaacaaactttttttgactgtatctcacagaaatccaattattacatgaagctgatacaaatattaattttccaatatgtccaggaccgcttgtagggtataggggggagaggataaaaataaataaagaacgaaaaaaattgaaacg

SEQ ID NO: 301 - DNA, 1397 bp, Aedes aegypti
caaaaaatagtacagaacaaacgttcaattatgaaatttaacatgccgtaatctattaacacttgtcgcagtttttagccgcatattactcttttacactagccgcaaacacgaggcagctccaactcgataagcagagaaaacaattgcaggagaaaacaacttcaatggacgatagctggccactgtctacacaacttcttgctgctgcgaactctggtttacatttaagcacgagagccacccactatcgggctatttcccgatactttttactcgtattctctttggcactggcaatcgtgggacgccgtcatcacaaaaacgaacagtacaacacctttttaaagccgccgacgcactctcaacagcatacagtcttcgaggtttgttcggatcgaaatgtgcagaattaagcatttactagcaacggttcttattctcgtgggagttgcccacggtggacaaacgaacagcggatgcaaacactgtagacccaatcacaactgcccacagcaagacaggactctagaagtggtgttccgccatgaagaatacgtagaccgatactatcgatgcctttctggtgtggcttacgagttccagtgtccctttggaatagccttcgatcccatccaaggacgctgtcgatatgcttcggagggcgaaatcagatcctggcaagcaagacaactgatgccatgcgaaaaatgtgtgggtggagtgaagttcgtcgaacttggcgctttcttgcctcaatatttgcagtgtgtgtccgaaggaattgcagagctaaagacttgtcctgtgggacagagcagaacgagatccgtccagcttttgtggatgtcggaccactgcgaaggtttcctaacaactcgcagtcagcgtatcgaggattacccatcagctcatcatcattctaaagatgaaggtttgaagtgctcaggtggaaaacatcatcactcgtttggaaatactcatgtgcacggagtttgtccatgtgagatctgcagtaatcctgttaccgtgaaacctggttgttctacgactcctccttgcactacatctacgacaacaagtattcctcccaaaacaaccacaaccactgaaactgttactccttccaaaaccacgccgatcaaagattccacttcaacggataccactactattgcaccgacagaaactactaagaaaccgacagatattattataagtccagatgattctggtgaatattatgacgaccatattgttggtttggcaatagattcagaattattaggaagatatgggacaacaactcctaaaccaaaaacaaccactacgaagaaacacacgactaccaccaaaaaaccaaccaccactacaaccaaaaaaccaaccaccactac

SEQ ID NO: 302 - DNA, 1977 bp, Aedes aegypti
atgagtgccgtttcatctatcttcgatacgcccattccgagtgcagcgaagtcttcgccctcgggatcgaacaagcgaccattggcgcaaaatgggcaccactcgggggaaaagcagtccaaaaaatcgaagaaagctagcaagaagcaactgatcgatctcctggtgcaggaacacgcccgggaattgagccaaaacgattccagcgcttccacggtttcgactccgaagaagaaaaagaagaaaaatgcttctgcttcagacataaacactagtgcttctaaaaatgtaaatgctgccaagaaaaagcccaaagagggacttaaaataaatcttcaaaactcaaaaaagaaaaggaagaattttgaagtgctcaacagttcgcaacagcacgccgacgatgcgctagtcgagacatcattcaatggtgaatcgttgaaaaataactcgaaccattcgacacctgtctccaaaaaacccaagaagaagaacaagcaaatgcctcatccactggcgggcactccaaatctagccatcaaacaggagccccaaactcctaaggcaaatggcatgcagcgcacctcggcccaggacagtatcgttgttggtcgggagaagttcgcttgggtaatccacccgactccggtggaagatttcatgatcaattactgggaaaagaaacccctgctaattcagcgcaagaacccatcttactacagcaatctactctcgcgagcgaaaatcgatgaaatgcttcggcagaacaacatcgaatacaccaaaaacattgatgtgacctcgtaccgtgagggccagcgagagactcacaaccctgacggtagggttctccctccggacatgtggtctttctacgaagaaggttgcagcattagaatgctcaatccgcaaacctatctccccggagtgtacgaaatgaatgtaaaactacaggagttcttccattgcatgaccggagccaacttctacttaacaccaccgaacagtcaaggatttgccccgcattacgacgatattgaagcattcgtacttcaggtcgaaggtcgcaagcactggaaactatacagcccacgagaaccagccgaaatgctagcgcgcgtatcgtccccgaatttcacgcaggaagagatcggcactccaatattggaggttgttctggaacctggggatttgctgtatttcccacgaggaatcatccatcaggccagcaccgtacccggtcatcactccctgcacgtaacgatgagtgtctatcagaagaactgctgggccgatctgcttgaattgttcttcccgcatgctctagctcaggcagccgaaactcatttcgacttacggcggggaatccccttgaatctgcatcagcactttggcattgtgcattcggatagcgaaactcccgcgcggaaacaactgatctctcacattaaatccttggtcgataaggttttcagcgaagatgccattgatagtgcggtggaccaactggctaagcgcttccaacatgatgccctccctccgctaatatcaaacactgaacaatccactacagtatatggttcaagcttcagccataatcccgacggcaccgttagcctgcgggtgccgttcaccgagaacagcaccgttcgtctgcttcgctgcaatgtgctccggctggtgagcgaagaggagaaacttcgcatttactatcacaccgataactcacgtgagtatcatgagtatgagcccaatttccttgaaatcgatcaggacgctgccctcggtgtggaattgctcgtaaagatgtatccgcatccggtggctattcgagatttgccagtggaggacaagatcgaatttgccaagagcttgtgggagaagggactgattgtcgtgcatgggcagtgaaagccctgagtcgttaattgtaaatatttccattattcattgctaccaatacagtttagttgtttatct

SEQ ID NO: 303 - DNA, 3414 bp, Aedes aegypti
agtatgcttgaggaaagagcgcgaaatactgacagacccaccgatgtttacgttgttcctcagttgaatccaaacattgttcatgtcgttagttgtttttcgtggcggtttgcgaaaaaattgtgtttttcaccgatttacgtgttattaagttgttatttccttctggagagtgcgcaaaatagttatccatcaaaatggatcaatatcccacggaggaagaggaatttgagttgatgtacggcgatgacctggaagctatgaatgatatggatatcgagatgaatccagccaccccgcgtccatcgagagctaaggagaagccagcagatccacctcgagcatcgacatcacattcgcactattcccgtcctccgctggatagccccagtctctctcaaattaacgaagacagcccactgcgaagtccagcatattcagttatttccaagaactccacaaccatcaataagcgtctgttcgatggggatgggaattacggtcgcatggcttccacgccgttcccgcgattgtctcaatcttcggctacggatccgttggctgaaatccagaacatcggtctcaatacgcgaaagagacgtttggacgccttgtttggcgatattcaagatattgaagatgatggcagtgtgtatgacttttgccagcagggcaatacaaaaaagaccaagacggaagaggagcgggacatggaattgattgaaaagattctggaagccaggaagcgcttccaagcgattgttcatccaactaaatccagcgggttggatagagctgaggctttgcatcggttcaaaatgcaaaatttatcgtattcgttgccaaaatggccgtttgctactgtcgttagaagcgataaagaacgcgtctatgtgcggtttcattctgaggagtttgaaaccaacgcaattaatgagattaactgctttaaagatggctataacggactgctcggagacgccaaggaaagaatttggaaagaggctaacgacataatagccaagcgattggacgcaccagcccgagccattgcacctaacccggatgtagtcgtcgttccggatcaaggcaactcgttgtgggttgaaaagtatcgtcccaaacggtacgttgatctgctgtcggatgaaacgaccaacagaagtctgcttcagtggctcaaactttgggataaggtcgttttcggacgagaacctaaagagaagaaagacgtcaaacaattgaacagcttcaacaagaagaccggccgatttgagtccaatggaggatggaaaaagaagaatcgctctgcgctgaatactgaactggacgagcatggaaggccaatgcagaaggtagctcttctatgtggtcctcccggtttgggcaagactacgttggcgcacacgattgcacgacatgctggctatgtggtgcgtgaagtcaatgcatccgatgaccgcagtccagaggcgttccgtatagcgttggaaagtggaactcagatgaagtcggttttgaatgaggataaaaggccgaattgcattgtactagacgaaatcgacggagctccagtcgccacaatcgatttcttgttaaagttcatatcaggttcggtgtcccagaaaggcggtaaaaagggtaaaggtgaaaaaacagaaaagtttatattgaaacgacccataatttgtatttgcaacgatatgtacgttcctgctttgcgacagttgaggcagatagcgttcgtagtaaactttcctcccacggaatgcgcgcgattggctgaaaggctgctttccatcgccaagcgagagaaaattgaaacggatttaacgtcaatgctggctctagccgacaaatctgggaatgacgtccgatcctgtttgtccatgttacaattttgcagttcactgaagaaacccatccggctgaccgacgtcctgaagagtaccgtcggtcaaaaagatcgtcacaagggcctattcggtatttggtctgccatatttcagatacaacgtcccaaaaagaccctggtggatgctgatagctgcgaaagcgatgctattgtgacactcaccgatatgtctccggcaacccgaatgaccaacattctggacgtgatacacatggccggcgatcaagaccgattgatgcagggggtgttcgaaaactatctgcaccaaaaaatgcccgatccgaacatggcaggagtagctgaagcctgtgattggttctgcttcaacgatcgtatccagcaggtgatcaaccatcagcaaaactactccatctatccgtacctggcgtatggtttcgtcgtgtggcactatttgtttgccagtttagcttggccaaaaatcaatttccctaacaagggtttcgaggtaagtccgtgggggtggttggtattcttggtattttatattttctgagcgtaagaggtgttgaatgaagtcaattactgtggctattaaaacttattatatggtttataataacgaaagcgcattgcgacctgaaaggatgtaattattttctccgcttaatggggaagagtttgttggtggttattatctttgaatgggaccgtgtgcttgctttgcttcttgtgtcgcttctaattatttccttctttcatcattcaatctgcgtggcattttctaatttagtattctattttgtgcccgttatattgcgcaaaagtcgttacgttatgatggtgttgtaggtggaaggggagggggattttgaaggggaactcgtttgctgacggtaaggacgtatcatcgtcacgtacatcgtcggccacaggtagaagtgaaccgcacttttctgtctttgccctcgaggtaaagcctagtggtgggaagaagtcctttggctcgtgacacgagaagctggctgtgctacggtaggaactgaagcatgatgatgttaatagaatgcacacagtttaaacataacttacaccattttaaataattctttttgtagattatgtgtgtagcttgctaggttgtgcttgtattcgatgaatttgggacgatgcgatgccattttttgtccaaattttggaatgttggctcccctatgttgaaaaaatgttaattattgtaaataatatcctttcaagaaatctatccatactcaatttaagtatttcaaagtatatttataatattcaaaactttatctaaattcattttttacggattttcggatttggattttttagtgtcgtttcttgaagatgaatcttctaaccagtgtgaaatctttccaattctagtaacatgattttaagttgtttttatgttgtatctttagaaggtgtgcgaatattttgtcgataaacgttatgctccattgccccaagacatttttccagtaggtatgcatttccattacgaaaacatt

SEQ ID NO: 304 - DNA, 2313 bp, Aedes aegypti
tttacctgtccgcgagaccaaatcgcgctagatcttaaagcaatttcgcgcgttgaattgataagactgcctgcaacttaatcaaagcatccacatccagaaaatgtcgtccttcctcaacggtcgtacatctcgagttcaagttcaatggcaatcgatagtggtcgtgatttgtgccagcctattggccagcgtgagtgcaacaagcagatgggccagtttggtccgagccgttcgaaatgcttccacaccgatcgatttggaagcatttccgggcgagctgtgcatgagaagctgtgaggatactcaacctcgcgtttgctacttcaagtgggtgctcgagcattaccactcgatgggacccgcctgtaaacgatgcgcagacggagttcacagcgattgctatctgccggcgtgtcttacagcggatggtttcgagcgaggagtgatgtccatcaaccgtcaagtaccaggcccagcgattcaagtctgcaaagatgatctcatagtggtggacatgacaaatgccatgggtggaacggccacagccatgcactggcatgggctgcatcagagggacactccgcacatggacggggtcccattcgtaacgcagtgccccattgagttcatgagtacctttcggtatgctttttgggcgactgagcctggcacacagttctatcattcgcacgctggacatcacaaagtgaatggacactacggggccatgatcattcgacagccggaagtgaacgatcccaacgcgaaactgtacgattttgatcttccggagcatttgattgtggcatccgattggatgcacgtggacggagaaatgtacatgccgggtcttcccaacggcgatggcatccttccggtgaatctcctaatcaatggacgaggcacgtggctgaaacacaacggaaacaggacgaacgctccacgggaggtgtatcgagtgcgcaagggtggccggtatcggttccgtttcatcaatgccgccagtcacgtatgccccctagagctgcagatcgctaatcacacacttgagatcatcgccagcgattcgtacaatttgcagcccatcagtgccaatacacttgtgacgacgtctggcgaacggtacgactttgtcgtgaatgcagaccaacccaccgatgactattggatccgtctacgggcgatagggccatgcgactacaggcaaatcagccaggttgccgttctgtcgtaccaaccgatgagcgtccctgaggaggacattgctttcacggacaaagagattccccattatcaggatcagctgtttttgaacgatgtgtatgtaaatcacccaaacacaacttgtggagtctcgaaaccagacgtttgcatcacggatttccaagcgtatgagaccgatgatgacgtcatcaacggtgttccggatatgcaatttattctaggatttgaaaattacccgatgaaattcgaagacgctttcggcatgggcagtcacgagcatttcatgaacattcacgacgacatcgtcctccagggggccatcaacaacatcagcttcacatatcccccgttttcgctgctcacccaaacggatctcatcaccgagggcatgttctgcgacgaagatagctggccggagcgttgccaaacccgcgatcactgcacctgtatccaccggttgaaaattcctctgcacgccttagtcgaattgtatattctcgatttgacgccggaagtgaacgatctgaatcatcccttccacttgcatggctaccaaatgtacgtcatggagatgggacaggaccggtcaacgcccatcacgatggaacgagcccaaaagattgctcggaggcagtctctccaccggacacgagtaacaactatgccccccaagaaggacaccgtatcggttccgagcaagggctacacccgggttcgattcgttgcggacaatcccggattctggctgatgcactgccactacgagtggcatacggccgttggaatggtgctggtgctgcaggtcggtgaaccgggcagcttcgtcaaaccaccggccggatttcccacgtgcaacaaatatacgccagatgtggacgcgtcgctttttgatgcgtgattttggcgttgttatttattggttatttattggtgtaaggatctgagattaaattctagtcatttgttgcgaacgatgtttttgtacgaatgtacagaaattttagacaaagtagaaatcgaatgtttgtgttgagaaaactgctggttttgttttcgggtttaataaataaaatgatttgaaatata

SEQ ID NO: 305 - DNA, 807 bp, Aedes aegypti
atgggagatgtcagccgccgttcggatcggattgcgccacccgccattatcacatcccgcgaattcggagtagaattccccaccaccaggatggagcaagttcccattgcggtacggatagagaaggaagaatccggtttggctgaccgtatcagagttgacaaagcaaaacgggcggaagaagcttttggaggcctagcttcgtggaccgacaaagatttaaatgattttttgactatttgtaaagatgataaagacaccgatgatgctaattctgaagacctttcggacaccgtaaaaggagttcagttgcttttgaatgacggccacgaagttgaagacgttatccttcttcgagatcaagaacaagaagctcgtgatggtaaattcaacaacttttggaaagctgttgaagctgtgatatccgagaacgatttagctgttgctcaggaaaggcgacatgggaccactagttggatatctcctctttgtgtctccctacgcgatctgatggaaaaaagtgaagagaaaatgaatcaactttttccagaatcgttgatgaacaatgtaccctcaatggaattcttccgtcttcaattctctcccagaaactcacgtaccaactcggctaaacgatactacagcagatttgacataaaatatggactacaaatacgtactttgcgaaaatcacatccggatcagcattatggagcaaagcagttccaatacatgaaaattatggcagagcttgttgctcgctactcgaaaaatgatcttgaaagaccaatgctgttcattggataa

SEQ ID NO: 306 - DNA, 2922 bp, Aedes aegypti
cacgaacggtccagaatggaggaagtgcatcaaccgcaaccggctcatttggcagcactcgagtcgcactttggccattccaactttcggcccatgcagtggaccatcatccgctcgatcatcgaggaccgtcgtgacaattgcgtaatcatggccaccgggtacgggaagtccctgacgtatcaatatccttcggtgttcctccagaggctgacgctggtcatttcgccgttgataagtctgatggaggaccaggtgctgtcgttgaacttgagcaacattccttcctgtttgctgggatcggctcagcgggccaatccagttccggatatcaaggcggggaagtttcgcgttgtttacctcactccggaatacgtaaccggggagagcgggaagtatctgttggaacaggtggccaatcagctggttctgatagccatagacgaagctcactgcttgagtaagtggggacatgatttccgaccggcttataggaatcttggagtgattcgaaagtggtgtccccgagtgccgatactggcggtaacggcgacggcaacgccaaacgtccgagacgacattgtgaccagtttggggctctggaatcctcaggttttgtgtaccggattcgaccgaccgaatttgcagtttcacgtcaagatgaagagttcgctcggaatttgggaggacgttaaagggctcctcagccggaacgtcgaggggagcatcataatctactgtctgacccggaagcagacggaagagattgtggagctgctccggagcaaaaagatcgactgcgaaccgtaccatgccgggctcggcttgaagcagcgcagggaggtgcacgagagtttcgtgcgggatcgggtgcaaatcatcgtcgcgacgatcgccttcggaatgggaatcgataagccggatgttcgcctagtggtgcactacggcgcttcgaaggatttggaaagctactaccaggaagcaggtcgagcgggccgagatggacaaccgtcgaagtgcgtcatgttctggagtcgagcggatttcaagactcatgaaattcttcgagagcacaaccagggcggagttcagaaaaatctcgaagcgctatcgaagaaaatgtacgagtaccttgatacgcgggattgccgacgaatgttcatcctaaagtacttcgaaggagacgttgtaaaggtagatcctcgtaaaaactgttgcgacaactgtgatcgaattgtgggtggagttaaggatagtgatcgctatgaaggaatcgatcaggatggaaattatgattttagtaaagacgcggaacaccttctgaaggcggtcgaagcttttggaggtggaacaggcctggcacttccgattgcgttgctgcgaggttcgaaaagcaaaaagcttcatagttcttatttgaagaatcctctacacggaatcggaaagacaaaggacgacgaatggtggaaggcactggcagtgctgctggagagagaaggattcctggccaagactaaagtaccaaacaccttcaataagtttgcagtcatctacaaaataggctccacgcccttggcgaagaaatggctagcgacaccgaaccggaagttgctgatgaaaccaactacggagatgttcaagtcgatacggctggtgagtaccgaggggcaagttcgcactcaaccactgtttgacactggctcggatttccaaacgcagagtaaaacaacattcccacctcagcttcaagcaccgggcagctctcgtcttttggaacccattgcccagaagcaggacattgtgcaggaactcgtgaaaactcttttgaaaaagcgttcggaactggcaacggcttacgagtgcatgccgtacatgatcgcatccaatcaggccctgcaccagatggcgaccatcaggccgttgaatctcgatgagatgaaacgtgccaaactggatggtttctccgacataaagatccagaagtttggcaaggagttcctcgtctgcattcagcaaaagttaaaatatattcccgaaacgagtcaaccaaatactcctactcaagtacttcaacagcattcccttaccaaaactaaattctcctcgactcatcagactacttggaatctatggttggaaggacgttcaatatctgatatcgcaaagtttcgcaatttagcagaagggaccgttaccaatcacttggccgaagcgatcaaacattggtttccctttggtccgaaagacttgtcgcggatgggcatagatcaacgcttatacgatcacatcaagtccaatctaccgccctctttggaaggctgcaaactgactgacgtcaagaatcgctgtctaccgcatgtgaccttcgatcagataaagattgtactgagtcacgttcaggtacgatcgcatctcgaagcgttgaacgtccccgcaaacgacaacaatgcccatgaggagccccagaaaccacctgagaaagaagtggaccctacagcacaacaggagaatgatctttggggcgatgaggacgacgacttcatagcggcagaaagcagctttgcagaaattgatcgaatctgcgaggaatccagtactaataagaacgaaggcgtcaaacagcttgatgccacaataacatcgatcaacgacgaagacgacgatgaaggtttcgatatgggtgaaatcgacgcgttggaacaagccgtgatcaatatgagcgatcgttctggtacagaagctctagaaccgtgttctgaaccagaacaaccaaagaagcccaccctgaaggccaagtcaaggagaattctctacgacaacgacgatgatgaggaggagcactgtccgcatttacgacatctgtttatcaaatataccaagcgttgtgctcacttctcgttcaaccattctttgccacattag

SEQ ID NO: 307 - DNA, 2571 bp, Aedes aegypti
atggcagaaaaatgtatcgtcacgattaaggaagagcagcagcaccaacagcaatgtcccagccctctgggggagataaagaatgattctgtgacggcgttgaccggtacacctacgacgatcatcactagcagcatcccatcagcgacgaccgcgatcagtctgccatcaacgacgacggtatccgcctcttcgactcccacccaatccggcacgatagactgcgacgacgatgaccaggaagagaacggcggcaaaccgcgcgaaaaaggttgctatgcgtggttctattctacaaatcatggcgtcgttgttgggcactctgccggaaaccagattcatctggaaacaccagtgctcgaggaaaaaagcaacggtggcatgaatttagcgaaaccaaagcgtctgagcgatgagttttactctgccgacgatgactacgacgaggacgacgacgacgagatgattggtggcggagaagatggaggcatcggaatcagtagtagcagcagtggcagcagcagtttgaccggaatcagtaaaagtgttggaggtgacggagattgcgaagcgcacgctagcttaaatgagattaaaaacctgagtatcacgaatggtggtgctgagcttggtgaggatcgatatgaacaggatgaaaactcgatttccgatccgatctatatcagtgaggaaacttcgtcatgtagtagcggtcaccaacggatcatagctgaagaagcttccgtaaaagcacaggagactgaagagccaagtcggcaacatccggaacagcctttgggaatggagcaggaggaaatcccagaggacgaaggtgttgctgcgctggaagataacctcgaggacgatgaagatgacgaggtggatgaggatgatcctcatgatgtgcaatcaatcgatgcaatcgaacgtcgggattttgagcaggaacaaaaactgactggcggaattataattaaaaatagcgctttgatacccgataaccatagactgaatttagaggtaataaatagttttagtaggaaccgcaacgatgcattggcgaaaaaatctcagtctgagagcggcaaagttcagcttataacaacgccaactagcagtagacacgcgtacaagaattgttgtaataatccatctagttctaatagcactagtaatagggaacaaaacagtaatagtacaacaaagtcaacggtaaaagttaatctgtcagctagtctagatagctattgtgcagctagtgaatccgtaaatggaccggatatggctgatgggccttcctgttcttcctcaatggcttcgtcctcgtcttcttcggcctccagtagcagtaagacgcataatcgccaacaacagcagcaattagatgcgatcttcaatagtaactccaatgatagtctatcatccgatcgttctatatttatccccaacctgcaagctctgaaagcatctgccaaggattgcccaacagctcccagcagcagcggtgtcaatgagccaggaacatcatcttcctcgtcgtcatcaccatcaccttcatcagcaagctgttccgctggtccttcaacttctggagcaaccaaagcaccatccgactgtagtttatcgtcttgtgcaacatcggtcataaagcaaacaggagaatgcagcaaaaacatcaaccaccatcccattccctcaactagtactagtagttcctcgctgttttcctttagctgtccctttggaagcgcggatcgtgaaaccggcgaaggatgtagtaacggcaatgtttccctaagaagattcccttcgaatggctcgaattttgccgataacattgccgatgaagtggaaccttctagttcgtctcaccgtattcgccaaccacaacttcatcacgagcataatcacatggaggatcccctgttggaaccttctgaactatcgatgccaccggagctagccgcttcggcatctgtcgtcgatcacgaatgcgacgaagacaactgggccgattgcgaagaaggctccgacgaagaaatatgcacctgccgagattataccgatgatgaaggaaacggcactaccggagccggtggccatgctagcagcgaagacgaactgccctccagggacgttgatctatcgagctttactcacatggatgccgctgaggatattcttgctcatgacccgagtaccggtgggtccggtagcgcggccaatactagcggaaacaacgcacaaacgccaagactgcatcggaagcgcaaacttaccgaaaatcgcattctattcggaagcggcggcagccggacttcaacgggaggaatgtcggagaccaccggtgggctgggtagccattgcgatagccctagtacggaatcgctcaactacaacagccgcaaacgattagctttagatagtaccagctcgccacgaacgcttgcttcgacgcccacgacatcttcagcgctgggagaacggaagactccccgaagtgtaatccctaccaaagataatcctcctcccgaactgaacgagtggctgctgcaattccaggtcagttga

SEQ ID NO: 308 - DNA, 755 bp, Aedes aegypti
tacaaatgtcaacattgtaaaattagcagtaatggtgacggaaaaaactcgcgcggtagctgttttttgttaattgatttagaatttgtttttcgtatttgactacaacgattccagccaacacaggggaaagagctgcttatttcaataaatacaaacgaacgataatcattaggaacttctgttttttctaccagagcaagtttgttattatgttgattctagtgacaatcaggtgtccgttgttcacaaaacactcaggactatgtgatgtgcccattacggtgccaaaaccgtcagatatcggcacctttttgcgtttatttctcaaagcgagtatggcaaaattcgtgaagttcatgactaaaacaacttgcccactgctgctccgggtgttctgttcgaccggaaggcaccactcatcgaacgaatacaaccacggaaatgtcccctcgaatgagctgcagatctacacgtggatggatgccaccctgcgggaactaacaaccctggtgcgagacgtcaatccggaaacccggcgcaagggaacctacttcgactttgcgatcgtttatcccgatcgtgggtccgtctatcgaatgcgtgaaatcggcgtgacttgttccggccagaagggagcggacgacacgaagacactggcccacgcaaagttcaccatcggagactacttggacatcaacattaccccaccgaaccgtttgccccctcgcgggggaaggccacgaccctactag

SEQ ID NO: 309 - DNA, 1484 bp, Aedes aegypti
gcgggtgttctgttttcttgcgtagtattcactttccggcgatatttggagccccacgggatgatttcggattgaccaacagaagccctaatagtgagaacaagccgccacagccatggaggtcgacggcgagacgcaaatcgaggagctggagtgcgacatccgaacgttgcgaaagcagctcaaagcgaaggttcaacagctgaagaccttgaaaaaacattttcagaaaaactgcatcaacaaattgaacaacaatgaaatcgctcgctacagtcgccagatcattctgtccgaaatcggcgtccagggccagctgaagttgaaacgatcttccgttctggtagtcggtgccggtggacttggctgtccctcggcactctatctggccggagcggggatcggtcggattggcattctggactacgatgaagtcgaactgaccaatctgcaccggcagctgctgcacacggaatgctccgtgggcctcacgaaagtcgaatccgttcgatcgtatctggaggaactcaactcacagatcgaaatcgtaacgcatcatatccagttgaccagcgacaacgccttgcagactctggagtcgtacgacatagtggtggatgctacggacaacgtggccacccgatatctactgaacgacgcttgtgtcctactgaagaaacctttggtttccggcagtgccttacagctggaaggacagctaacggtgtacaattttaacggtggaccatgttaccgatgtttgttcccgaatccacctccaccggaaacggtgacaaactgtggcgatggaggtgttcttggagcaatcaccggagtcatcggagcgctgcaagccctcgaaactatcaaaatcatcctcggtaactcgggagtcctttccggacggctcctactattcgacggccaccagagcaccttcagaaacctgaaactgcgaccgaagaaggccgactgcgcggtctgttccgacaatccctccctcaccaagctgatagactacgagcagttttgcagcatgaaagccaccgataaggactcgcatctcaacctcctggcgccgcacgaacgcatcaccgtgcaagaatacaaaagccttgctgaaagcaacgtgcctcatcttctcgtagacgtacggggtgcgaatcagttcgaaatctgccaacttcccgcatcgataaacgttcccatcgatgacattctgaagaaccgacggacggccgaagtgacgcaactggccgcgactggaggtcccgtatttgtcgtgtgtcgtcgaggtaacgattcgcagctggccgtgcgtcatctgtcgcaactgttccaggagcaagggttggcaccaccgcgggacatcgtcggaggattgcacgcctggacgcacaatattgatccggaatttcctatatattgattatctgggtgggaagaatatacctatatgtacagcgaaatgtacgaaaaatgta

SEQ ID NO: 310 - DNA, 1839 bp, Aedes aegypti
atgcgattaccaataatattgtcacgttcccgaggagttcctgtactaacacgtcaactcttcccaaaatccccctcgcttatcatccatcgcaccttcaacgactccaacggcggcctcataatgccgggtcaacttcgcggctacgaccacctgcgcgaacccaggctgaacaaaggcctcgccttcaccctggaagagcgtcaatcgctcggcatccacggtctactcccggcgcagattcgcacccttgatgaacaactggaactgtgccgcctagcattctcccgctacaaggaagacctgcacaagtacgtctacatggtcgaactgcacgatcgcaacgagaagctgttcttccggctgctcaccgaagacatcgagcgaatgatgccgatcgtctacacgccgacggtggggctggcctgtcagaagttcgggtttatatttaggcggtcggtcgggttgttcgtgacgatcaacgatcggggacatgtctacgaggtgttgaagaactggcccgagatggacgtgcgggcgatcgtggtgacggatggggagcggatattgggattgggggatttgggcgcgcaaggaatgggggttccggtggggaagttggccttgtatacggcgctggccggggtgaaaccgcatcagtgcttgccggtggtgatcgacgtggggacgaacaacgaggagtttctgcaggatccgttgtatattgggttgaagcaaaggcgggtgaggggtgaagagtacgatgcgttaattgacgagttcatggcggccgtggtgaagaggtatgggcagaatacgctgattcagttcgaggatttcgggaataagaatgcgttcaagttcttggacagatatcggaactcgtactgtacgttcaacgatgacattcagggaacggcggccattgtggtggcagggttgatggcttcgcagaagattgtggggcggagcatgtccgaacacaagtttctgttcctaggagcgggtgaggcagcgattgggattgctgatcttctggtgagagcgatggaagctgacgggattccggaggatcaagctcgggagaaaatttggatgtttgacaagcaaggactgctggcgaaagaaagagaagaaggggagctggaaggtcacaagatccggtacgctaaagacaaatgtccgaccaaagacttcttggaggttgtcaaaaaggtccaaccgtctgtgctgatcggagcttcggccgccacaggcgcgttcaataaagatgttctcagaaccatggcagactgtaatgaacgtccgataatatttgccttatcgaatccaacggccatggcggaatgcacagctcaagatgcgtacgactttacggatggtcgttgcttattcgcgtcgggatctccatttccaccggtggaattcaacggaaagaccttcgtcacaggtcagggaaacaacgcgtatgttttcccgggagtggccttgggggtgattgcatccggaatccatcacatatcggacgatatttttctgaaggctgcggaggtcgttgccaataaggtttctgaagaagatttgtccaagggattgctgtatccaccgttgagcagcatcaagcaatgctcgattgaaatagctgtcggtgtgcttgaatatgcgtaccaaaaaggtatcgcgtccagatatcccgaaccggaagacaagctcgctctcataaaatcccatcaatacagcttctgctacgaacgatctctccctgctacttggcgatggccgcaaaaccattgcaaaccccagggaatcgttaaggacccatgttcaaatgattcgtga

SEQ ID NO: 311 - DNA, 3992 bp, Aedes aegypti
gtcatcaagagtgaaccggttcacccgtctcgttgagaacatttttagcagaaaaaagcgagacattgcaaagtgcgagttttgtgtgtggtgccgcagtagcagcagagaaaaaccattgtgaacctgcaaatttatctcctttggagtctgaaaatcttaacagttgcctcttcatcaaccaatctacgttcggacgtgtattccgctatctgcagtcagtgaaatcacaccgaaaagatgccttccagcgatcctttgcctcccaaggagagtgctgtgttccgcaagattctgaaatgttacgaaatgaaacaatacaaaaatgggctgaaacttgcgaagcagatccttaccaatccgaagtttaccgaacatggggaaactctagcaatgaaagggcttaccctaaactgtctcggtcgaaaggaagaagcgtacgattacgttcgccgaggtttgcggaatgatctgaaatcgcacgtctgctggcatgtgtacgggttattgcagcggtcggacaaaaagtacgaagaagccatcaagtgctaccggaatgcgttgaagtgggaaaaggataacatccagatcctgcgtgacttgtcgctgctgcagatacaaatgcgcgacctggagggctaccgagatacccgccaccatctgttcaaattgcgcccgtctcagcacgcttcgtggattggttttgccatgagttaccatctgctgggagattacgaaacagccatgaacattttggaaaccttccgggcctcgcaaactgtggaaacctacgactacaagcatagcgaactactactataccagaaccaagtgattcaagaatcgggcaactacgagaaagcgttacaacacctgaaagagtatcaatcgcaaatcctcgacactctcgctgtgaaagagactatgggtgaactgtgccttaagctcgatcgccatgaggaagccgttgggatttaccaagatttgatcaagcgaaacccggaaaatatcgcttactatcagcagtatctgaaggcattgcaagtagaaaagggatccgacgtgattgcagcgtaccagaaaatacaaacggaatatccgcagtctttctgtgccaaacgattaccattggatgtggccgaagatgaagcgttccgctcgttgatagatgaacacctacgacgaaaccttcggaagggtgttccgcctctatttgttaacctgcgctctctgtatcgggacgagaaaaaagtacgtgtcataacggagttggttgaaggctaccatcaaaatttaaccagcagtggttacttctctgctgctgataaggaacaaaacttacccaaggagccggcttccgcattgctgtggactcttttctatcttgcacagcattatgaccatctgcgtgaatcagaaaaggcattagacttcataaacgcggccatcgaccatactcctaccttaatcgagctcttcgtcaccaaaggccgcatctacaaacacgctggcgatgttctggaggcagtcaaatggatggacgaagcacaaagcctcgacacggccgatcggtatattaattccaagtgcgcaaagtacatgttacgtgccaatcagatcaaggaagcagaggagatttgcgccaagtttacaagagaaggagtttcggctatggaaaatctcaatgaaatgcagtgcatgtggttccagacggagtgtgccctgtcctaccaacggttggaaaaatggggcgaatcgttgaaaaagtgccacgaaattgaccgacacttctcagaaattattgaagatcagtttgacttccatacgtactgtatgcgtaaaatgacgcttcgttcttatgtaggtttgctgcgattggaagacgttttacgaaggcatcctttctactttaaagctgccaaatgcgccattgaggtctatctccgacttttcgataaaccgctaccagcagaatctgctgaagaagaactcgatattgaaaacttacctccatctgagctgaagaagctacgcaacaaacaacgcaaagctgcgaaaaagaaggccgaacaggaaaatgctcaagctgctcaggcaaaccagaagaaggaccaacacaacaagcagcgtaatccaaaccaggatggcgatccagaagcacctcaattggatgagctgataccagacaaattggcccgtccggaggatcctctcgagaaggctatcgagtttctacgaccgctacaacagcttgccaaggaaaacatcgaaacccatctgatggcgtttgaaatatattgccgtcgaggcaaactgttgctaatgttgcaatctttgaaacgggctcgttccattgactccaataattcaacgttacacagctgtcttattcggtttcacaagattttagaaagtaaaatcgccagcaacgagttagacgaaacagtgaaaatggtcattgaccgggaatgggagaaactattccgaggatcgaagtccgctgctgagatcaacgatggctatctggcagcaaaccgagacaacgccgaagctagatacgaagtcgccaagattatgtaccaactagatgagaaaaggcagaatgaagcggtcaaattgcttacatctgcagacctgaaaaaagtgacactggaggatgcgacgaaagtatttctgctactgaaatccggattctttggaggcctagctgaggatcaaatagatgcgttcaagaagagttgccagaaacgattcccgctggcggtgatttttgccgatgttgtatctactgttgccactctcaccactacccaatcatcgtcgccgacgtcctcagcgacagtcaccaccagtgctaccggaacgaccatgtgtcccgttgagcaacagtcaaaatctacccctcaacagcaaagcaaatcgagcgaaataaaagcaaactaaccgagtaaaaaattcaaaaagctggtaccgaaataaagtatgggagtcaagttccgccgctttcgctgtcagaaaacagcggactacatcgtaatagagtgacagtttagttttttaatcctattcttgggaactattttagctctgctaatgagagaatatcgaaaagaatttctaacgagatgatcaaaatagtttacatagttaaacagtcaggactaagcaagaacaaaatattgaactgtcggccacgcagtcatatataggatcgcttgcattgagtgcacaatatattaattttgtttcgtttcaattgtagatcactaccaccattatacatgagggaaggctgaatgttccctcacatttgtttttagtacacgaatatattaaattgaacacagataatgtaacttcgtgtcatgtcccatacttttttgtgactcaaccttgattctcgtgcatataggatgcaggggttgagcgactaaacatttctgtaatatagaaaatcataaaatacaaaaccggttgattttcttttcatcgttcctttatgtataatacacagaacgtctctaccactcgattgtcaagggtaaattcggtcgacttgaactgcattgaattggagtttaccctaggatcatacgcaatcctcgtagtcagcctaatcacaatccctgcaaataaattcagagtggaataatgattttcgtgataacaacacacaactaacgtatgaattaagaaacaggttttgttagctagcaaaaggcaaaagatccgtacgaagtcgtttttcaaatacacaaacacaatataatcggatgaccggaaacagcaaaataaatcagatgtgtgaactcgaaatccggatattagaaggagcttagaaaatgaagttttcttgtttggtaacggctaaacatatccgaactccaagttttccgtctgtccattctctccattcgtcggtgcaaagagagcaaccatgaatggcatgagatcagttggtataaagtcgttaaggtgaagatgaatcgaag

SEQ ID NO: 312 - DNA, 2532 bp, Aedes aegypti
atgacgcaaaccgtagtcgaagtgcactggttcccgaagtatccggatcgtttcctcacggcggccggatcggagatcaacctttaccaggtcaaacaccgcgatctgatcgaccatagcatccaaaccagtaacaccactgccacattgattgcctttgagacgcgctaccagtttatccggtcggttgctccgtccttccactcgacgggggagattctgtttgcggctgggttgcccaatgggaaggtagcactgtgcaattttgccaccgagaacaatgtggaattcacaccgagattatcacgtccatgtacgtgccttgcttggagtgagctggagccaagcctactggcgatgggacacgatagaaatcgttccgatcattgcattacaatatgggataccgaacgaggcgttcccaatcaatcctctatcctccagttgatcgggttgtcggagacggcacattccatctgctgggataagacgtttccgcaggttttgatagccggaatgagccataagcacatcaagatgatggatttcagacaaaatccagccatcgtaacgttggccaacgcccgaaccgtcaacggactctgcatcgctcccaacggtcgctatctgtccagttacgtggataacgtaatcaacctgtgggatctgcgagcgctcgagaaaccaatcagccagatccaaatgcagaagaatatcacccacttatcgtggtgtcccacgcgttcatcggtcctcaccacgctccagcgagactcgccgttgatcaacctgatcgatctgcactggcccggttcggaatccgacggaggggacccccattccataaaacggttcgttactccgttccaagcgagggccaccaatcgcatgccgaccatgggatatctttcgtggcatccgtacgatctggagcggatgttggccttgtccggaacaggaacgatttgcgattatcgtattccgcagcgagtggccatcgcctgggataacaacaacaatttgtatgggaacgatggatgtgaactgcagcagcttacatcgccttcgccgtcatcgtcgccaacggattccttgaaccagtgggattgcgggatcgacagctacgaggaggacatcgccgaaacgattcagaagagagcgctcaacaattatggcctgacagcggaaatgcaacgaaatggggatcttgctggtaattccaatctcaaaggcgtctggcgactgctcggccacatgatcaaggaggactgcaagctgggcttgaacacgatcctcggagtctgcagtgctccggatgggccggctatgtcccgttccgacccggtcatgatgaagtggctggatttcagcatcggaagtggcttggtcgtttatcgaagcgaacaaagagatacggctcaactgctctgcggatggacattcgatcggagcaaggaatcttcgttcctgtccttcatagaggaactctgctcaaacaaagaatacactcgggctgccctgattgcttgctttcactttcggatcaagcaagccatcgaaatcctcagctgtggagctgaacaaccttccgacccgacttccctgctccgtgtagctgccatagccctgtccgggttcagtgccgagcgttccggcctgtggcgaaagcagtgtggcgctgctcgaacccaaattgatgatccatatctgcggtgcatgttctccttcctggcgcacgagaaggacggcttcgaaaccgtgaccaacgaaggaaatttcctcagcgatcgcatggcctttgcttgcaatttcctttccgatctaaaactcgcagagtacatcaagggaatggttgccaactgtatcgagtctgatttgaatggccttcttctcacaggagccaccaacgacatcaaactgctccaaagccacctggatagaaccgaggatgttcaaaccgtcgccctgatagcagcgcgtttcctcacttctgatttgctaaccgactatcgcgttcaatactggatttcaacctatcgggaccttctggacatctggggcttgtgggagcaacgtgcccagctggacatcaccctgggaagaattcgctcacccccgcaaaattcccgctcagttttcctcctgtgcaacttttgcggcaagaacgtctcgatggccctgcaggaggatgcccgggtccggagcaatgcggccgtcatgcataagctttcgtcttgcccgaactgtcggaagccgttgccgcgttgtgcgctctgtctgctgcacatgggaaccacgatgggtgccatctcgcagggtcatgccgcccaagggcagatcgggtggcaatcgaagccgttctcgaagtggttctcatggtgtcagacctgtcggcatgggggtcacacggagcatctggcggagtggttcaacgaaaatacagaatgtccggtgacgtcctgcaactgtaagtgtttcgccaaagatctcccgatgccgcagtatccgcgggagaaggacatcctgtcctga

SEQ ID NO: 313 - DNA, 1049 bp, Aedes aegypti
ttatttcagttattgtgttcagttcattgcgtggttcagtcactgtttttccgtctagactgaagaaattttttgagaagctgttccactcttctatttttgtaacatggattctgatgaaggttctatgtcgcagcaaaatacgtctagtcaagcaggtgaagtaaaacggggaaagaattggagtgaagacgacgatgcacagctatgtctgtcgtggatagcaatttctaaagattctatcaaaggaactgatcaaaacaaaactaacttttggacggctatcaaagatcatgctgggctcaaaagtgtaggtatccgagaaaggccagtggacggattgagacagcggtttagtcagttgagccaccaggtctcaaagtatgttggctgcttggcatttgtaagccgagcgaagaagagtggggaatcttccgaagacaagtttcagacggcccgtgatatgttcctcaaggaaaccaaacaaaggcacttcaaaatcgaaaaatgctacgagatattgaaaaatgagcctaaattccaggtacccagcagcaacaaacgaatcaggatcgatgtagaaataaagcttgtgcgtagatcctgtagaaaactgttactgtcagtagagaagaaaccagtacaccctccccagatcaatgccaatatgtcacggaggaattaatcgagcaagacttgttttcgactcctaccacatcacttcgaccgattggtcgtcataaggccaaacgacttcaagatggatccaacgaagatatttggtcaaaagtcttgatggaaatgcaacgtaaaaatgaactgctcgaaaagcacacattggcccttgagaaggcgacagagctgcagttactaacaacacctttacatcaacttgacgatttaagcaagaagataattgaaatgcagaagaaagaaatagcaaagaagtattttgatgaagaaaatgtaaccgatgaaatgtagatgaatgtacaatagttggaagatgtataagcgacgaaagaagtattacagaaagatataacatt

SEQ ID NO: 314 - DNA, 1683 bp, Aedes aegypti
attcgaaaagtgaccgtgctcgagagcagacgtgtgtatctgtcgtccatgtcgcaaagcggcgtaccaacgccatatagaaattagagcccaaaagcgtgaaagtatcgattttccagtgtgaaactgcactaaaaacagtgcaaagtgtatagcgagccaacaaatcacacgccacaagatggcggacgacgaacagttctcactgtgttggaacaatttcaacacaaacctatcagctggattccatgaatccctcgtccggggcgacctggtggacgtcacactggccgccgaaggtcaactagttaaggcacacagactcatcctatcagtatgctctccgtacttccggaaaatgttcacccaaatgcccgccaatcagcacgcattcattttcctgaaggacgtcagtcattcggcactgaaggatctcatccagtttatgtactgtggggaggtgaacgtgaagcaggatgctctgcccgcgtttatcagtacggcggaagcgctacaaattaaaggactgactgaaacgggagaaagcgcacccacccatccatcacccgccaaagaagcctcccacataccgtcggcgagttcgacgaccattccatctctggcgtcgtctccgcgggcgaaaccgatcgtgcgaagtcggatccagtcgtacaaactcgactcggacgacggaagcgatcacgagaaaatagtacaaattcaagccacctctacccctgcctccgttgccagcgccagcagcagcacagcgaccacccaggtcagtgttccgcagcaggtgcaaatcctccaacaacagaccccgcaagcccagaaacgcaccctccagcaacgagcctcgatcaccccgcaaacgacccagatcatgaaacgagccaagcttaccgatccgcttgaagcttccgaaccgacacagatccaaactgttcagattgtgaagcaaatcgcgccgaccccgcagccctcggtatcctccgaaccggaatacgttgaaatgccaatcgaaacgatcaacccgaaagcggaaccggaatatgcggacgatccctcagaggtcgaagcgatcgatacggaacacgaacaggaacaatcactagcggaacaagaggcagcggaacacgatcaggcagaagacgattcggcacattacgttgaagacgaaacgtacggtgatatgagcaaatatgacgaaacatacttcgcggagggtgacgacgctaaggctggcgcttctgggttcagtgaatcgtacgcagagagtggcaccggagcggaccaggcagcacaagttctaggctttctccaacccggaccaaccaccatacacttccacacgaccaagcgcggatcggttcagctggaaatcgatggttaccgcttcacgcggatgaaagtgctgcaaaccaccatccactggtcgtgcctgcagacgaaggccctacgctgtaaggcccgagctgtaactaataacgacctgcagggcaccatccgacggtacctcaaccatcataaccatccgcctagtatgcggcgccgtcagcatggggatttgcagcgaatcaaagatgaccgtatggctgttaattcgatgaggcattgaattggtgatatgttacccacgtatagcaattatttcgacggaataaaaccttgttacctatt

SEQ ID NO: 315 - DNA, 1602 bp, Aedes aegypti
cgacaggtgtgagagtcgttctcttaccgagaagtctgtcgcgaagtgtgctaagctgctcaagggaagtcattaattgaggtcataattagagtgtctattaaataacatacatcaggcgtagcccacgcgaagagaatccaaaatgtcgttcaagaaggacctggccctgctggtgaagccctattactgggtcaatatcctgatgagcatttcctacatcgtggccaagcgaatgccgatggtttgtaactttttatggacatatttgttcaaccaggaccagtgcgagttggacggtcgcgaaacggagattctgttcttcctgctcatcgtggtcatgatccggacgcggaaaaccggaagcgtaaccatgatcaactacctgacgtccagtttcatgtacacaaagttggccaatttgggcctgtggttctacagtgacatccgcctcgggttaatttacggagtgctgttcattctggtggcactgatcctgccagaaccgacctactccggaccggaaaatgtcacctatttccgactggagaatggcctcgaagacgaaatggaaaaggacaaacgggtcaactggttggtcactttctacaccgtttggaatccggcttgcgtaaatttcgcgcccatttttgcggaactgtccgcggaatacaacctgcccaacttgcgattcggaaaggtggacatcggaagattccccaacatcggaaagaagtatcacgtttcggacagttctctcagtcgtcaactcccatcggtcatcctgttccggaatgggaaggaagtggcccgaaggccgtatgccgatgccaagggcaaactggtcaagttcttcttctcagctgacaatgtgaaggcggccttcgatctgaacaacctgtacaaggagtgcaaggagaatcccatcaagggcgccaaggcgattacggccagcgagaagaaaaagaactaagctccggcggttccagtccagttatgttacatttgtagaagcatttaagacgcgtcaaactgcccatcacactcctgtctcatcatctttatcgcaatcgaacggttgcacatctttatctcaacgccatcgaaatcggaacacaaacacacaacagtcattgatattaagattaaaagaaacgagtccagccccacatcgtcgcgcacattttatacaggggttaaacaaaaaggttgagataggttcaaaagacatacgtcgtgatgtaacctgcacgaaatcgccagcagcttggagaagtgttaattacattgatgaacagttatcggaaagcaaacgtcgcatcgtccgcccctttgaaaatactgataagaagaatgattgtcttttgtgtatgcattagctattagcagctccgcagtcagcagtaggtcgtatcaggggactacggcattacacctggctagcagcatttgccaccgttttgtattgttgaggttgtttttaagttattttgtcttgtttcgtgttgttttagttttaagctgaagctgatgcagtcattagggatgaaaaaaaaaccaaaagcgatatgttagtcaataaatttagtgaaactgattctg

SEQ ID NO: 316 - DNA, 1007 bp, Aedes aegypti
atgtccactaagttggcgtcacgtttactggtgttatcgtccgttgggatcggcagttatttcgtgggatcgtttgtcgagcggaggaaaacaatcgactcaccggtttgccatcgggaaaccgagaaatttgattatgtaaacgagcaaggagctggaagtttcttgagggaaattgtgtccaagccggggctgcccatttttggtaccgtgtccgccgcttcgccaattccggccgaacagaaatcgtcggcagtgccggccaatgtgagtcgcgtcgggcagattatgaagtacggcttcccaggactggataatgtgcggtcatatgacgattatgtgctttcctatgatcggaggactcgagtggcccattgggtgtttgagcatttgacggcggaatcggtcaaggcgaacgacgctgtggatcgggccaagtgtgactttaaagcggacgaaagcatacacccgttcttccggtcgttgaattcggattacaaaggttccgggtttgaccggggacatttggcagcggctgggaatcataggcttcatcagcaacattgtgaccagacgttcttcctgactaatatggcaccgcaggtcggtgtcggtttcaacagggacaaatggaaccatctggagcgatatgtgcgaaagcttaccaagcaataccagaacgtgtactgttgcactggtccactctacctgccccgaaaggaagccgatggtaaactgtacgtcaagtaccaagttattggcgccagtaacgtggcagttccgacacatttctacaaagtggtggtcatggagtccgccgaccacaaactggaaatggaagcctacgtgctgccgaatcagaaaattgacgacgatacaccgttgactatgtttcaggtgccaccggagacgatcgaaagggcagccggtctgctattcttcgataagatcgcccggaatcaactgtctcgaataaatggtaagaaaatttaattcatccgtcactc

SEQ ID NO: 317 - DNA, 993 bp, Aedes aegypti
atgtccactaagttggcgtcacgttttctggtgttatcgtccgttgggataggcagttatttcgtgggatcgtttgtcgagcggaggaaaacaatcgacttaccggtttgccatcgggaaaccgagacatttgattatgtaaacgagcaaggagctggaagtttcttgagggaaattgtgtccaagccggggctgcccatttttggtaccgtgtccgccgcttcgccaattccggccgaacagaaatcgtcggcagtgccggccaatgtgagtcgcgtcgggcagattatgaagtacggcttcccaggactggataatgtgcggtcatatgacgattatgtgctttcctatgatcggaggactcgagtggcccattgggtgtttgagcatttgacggcggaatcggtcaaggcgaacgacgctgtggatcgggccaagtgtgactttaaagcggacgaaagcatacacccgttcttccggtcgttgaattcggattacaaaggttcagggtttgaccggggacatttggcagcggctgggaatcataggcttcatcagcaacattgtgaccagacgttcttcctgactaatatggcaccgcaggtcggtgtcggtttcaacagggacaaatggaaccacctggagcgatatgtgcgaaagcttaccaagcaataccaaaacgtgtactgttgcactggtccactctacctgccccgaaaggaagccgatggtaaactgtacgtcaagtaccaagttattggcgccagtaacgtggcagttccaacacatttctacaaagtggtggtcatggagtccgccgaccacaaactggaaatggaagcttacgtgctgccgaatcagaaaattgacgacgaaacaccgttgactatgtttcaggtgccaccggagacgatcgaaagggcagccggtctgctattcttcgataagatcgcccggaatcaactgtctcgaataaatggtaagaaaatttaa

SEQ ID NO: 318 - DNA, 492 bp, Aedes aegypti
gaaaataaccgcacgtgcgacatgcgtaagcttaacttccgcttacggaagctataaaaaacgtgacacctgtccggtgcacgttccaacatgagatcgacattggttgtgctattactcctaattgtgcaagcattcgaagcgagggtgtgtcctactttatgttgtgaagatccaaacgaagtgtacctaatatgtggatcgttgtgtgagagaacctgtaccaatctgtacgattgcgacctgtgtccggcggtttgtgtatcagggtgcttctgcaaagatggatatgtacgggattcacttgggacgtgtatcccggcttgtgattgccccattttaaccacgacgttggccccaactactaccaagaagaaaccactcaagtgcaagccacctacaactactacaacggaagctccttgctcatgtacaacgaccactgaagcaccatgcctatgttcaaccactactgttgctccttgtgcctaa

SEQ ID NO: 319 - DNA, 330 bp, Aedes aegypti
atgattccgaaatcgttgccatttcgtcgtccctcaggaggacgtcccgccgcctggacgccatcatcgtcgtctccattgacatttactatcgataagttcgtttctccccgcgtcattgatgtacccgccgaaagtcgcctgccggcatccgttggcgcaacctcatcaaccttttacaacaacaccaaactattcgcttccactagtccgattgaacggaagcttcaaagacggcgccggccacaggatcaacggggacggctattcaaactcaccaagcaacagattacaatgcaaacgctgcgtgatagccccgcccccccatag

SEQ ID NO: 320 - DNA, 1251 bp, Aedes aegypti
atggatgataatctaacgtattttctgactacgggtggtttgttcggggaaaatgcttcgataggagagaatgcattgaacgacacaggagggatgcctcgtggcaacttcacctgcccatcgacggatatgccaaccacgtacactgtgttcatgatactatatgccgtcgtgtgtctggttggtgtcatgggcaatacgttggtaatctatgtggtgctacgattttccaacatgcagacggtgaccaacatgtacattctgaatctggcgattgcggacgagtgcttcctgatcggtattccgttcctgatagcaacgatgcacatgaagcgttgggtcttcggtggagccatgtgcaaagcctatatggtcagcacgtcgattacgcaattcacctcttcaatatttctgttcatcatgtctgccgaccgctatatagctatttgtcaccatatctcatcgcccaagtacaggacgcctctggtgtctcgagtggtctctgctcttgcttggctagcttccgctctaatcatgctgccaatcatgatttacggtgacatcatccagctgcaacccaacagctactcgtgtcaaatcgtgtggccagaatcacacgaacatatgcccggatacacgttcacgctctactcgctgatcttgggatttgtagtgccactctgctttataatgacattttactgtctcgtgattcgcaaacttcgtaacgtagggccaaaaacgaccaacaaatcacgcggaaaacgacgttcccaccggaaggtaacgaaactagtgctaaccgtaatcaccgtctacatcctttgttggctaccgtactggatttcgcaggtagcgttaattacttccccggatgggtcctgcagcactcggctcgatatcatacttttcctcctggtcggttgtttaggttacattaactcagccataaaccccatcctctacgcgtaccttagcgaaaactttaagaaaagttttcttaaagcctgcacctgtgccgcccgggcagaggtaaatgcccagttaaaattagaaaacagcgtaatgccgaagcggtcccgcactcgaacgaactccgacacgacccaactgaccacatcgaaagtgcaacatcggctgttgatcgatccgaccacgacggccaccacgacaacgaccgcggcatcaaccgtgtcctcgcggaatcccagcccacctgtcgtacaaaggagcttaatgaacaataaccat

SEQ ID NO: 321 - DNA, 2785 bp, Aedes aegypti
atgacgcaaaccgtagtcgaagtgcactggttccccaagtatccggatcgtttcctcacggcggccggatcggagattaacctttaccaggtcaaacaccgcgatctgatcgaccatagcatccaaaccaatatcaatttagacatttccaaaagcaccactgccacattgattgccttcgagacacgataccagtttatccggtcggttgctccgtccttccattcaacgggggagattctgtttgcggctgggttgcccaatgggaaggtagcactgtgcaattttgcaaccgagaacaatgtggaattcacaccgagattatcacgtccatgtacgtgccttgcttggagtgagctggagccaagcctactggcgatgggacacgatagaaatcgttccgatcattgcattacaatatgggatacggaacgaggcgttcccaatcaatcctctatcctccagttgatcgggttgtcggagacggcacattccatctgctgggataagacgtttccgcaggttttgatagccggaatgagccataagcacatcaagatgatggatttcagacaaaatccagccatcgtaacgttggccaacgcccgaaccgtcaacggactctgcatcgctcccaacggtcgctatctgtccagttacgtggataacgtaatcaacctgtgggacctgcgatcgctcgagaaaccaatcagccagatccaaatgcagaagaacatcacccacttatcgtggtgtccaacgcgttcctcggtccttaccacgctccagcgagactcgccgttgatcaacctgatcgatctgcactggcccggttcggaatccgacggaggggacccccattccataaaacggttcgttactccgttccaagcgagggccaccaatcgcatgccgaccatgggatatctttcgtggcatccgtacgatctggagcggatgttggccctgtccggaacagggacgatttgcgattatcgtattccgcagcgagtggccatcgcctgggataacaacaacaatttgtatgggaacgatggatgtgaattgcagcagcttacatcgccttcgccgtcatcgtcgccaacggattccctgaaccagtgggattgcgggatcgacagctacgaggaagacattgccgaaacgattcagaagagagcgctcaacaattatggtctgacagcggaaatgcaacgaaatggggatcttgctggtaattccaatcttaaaggcgtctggcggctgctcggccacatgatcaaggaggactgcaagctgggcttgaacacgatcctcggagtctgcagtgctccggatgggccggctatgtcccgttccgacccggtcatgatgaagtggctggatttcagcatcggaagtggcttggtcgtttatcgaagcgaacaaagagatacggctcaactgctctgcggatggacattcgatcggagcaaggaatcttcgttcctgtccttcatagaggaactctgctcaaacaaagaatacactcgggctgccctgattgcttgctttcactttcggatcaagcaagccatcgaaatcctcagctgtggagctgaacaaccttccgacccgacttccctgctccgtgtagctgccatagccctgtccgggttcagtgccgagcgttccggcctgtggcgaaagcagtgtggcgctgctcgaacccaaatcgatgatccctatctgcggtgcatgttctccttcctggcgcacgaaaaggacggcttcgaaaccgtgaccaacgaaacggaaatttcccttagtgatcggatggccttcgcttgtaattttctctcagaccttaaactcgcagagtacatcaagggaatggtcgccaactgcatcgagtccggagatttgaatggccttcttctaacaggagccaccaacgacggtatcaaactgctccaaagccacctggatagaaccgaggatgttcaaaccgtcgccctgatagcagcgcgtttcctcacctccgatttgctaaccgactatcgcgttcaatactggatttcaacctatcgggaccttctggacatctggggcttgtgggagcaacgtgcccagctggacatcaccctgggaagaattcgttccccgccgcaaaactctcgatcagttttcctcctgtgcaacttttgcggcaagaacgtctcgatggccctgcaggaggatgcccgggtccggagcaatgcggccgtcatgcataagctttcgtcttgcccgaactgccggaaaccgttgccgcgttgtgcgctctgtctgctgcacatgggaaccacgatgggtgccatctcgcagggtcacgccgcccaagggcagatcgggtggcaatcgaagccgttctcgaagtggttctcatggtgtcagacctgtcggcatgggggtcacacggagcatctggcagagtggttcaacgaaaatactgaatgtccggtgacgtcctgcaactgtaagtgtttcgccaaagatctcccgatgccgcagtatccgcgggagaaggacatcctgtcctgataccaactcgccacgatgttctaatctaaacgtttcataatctaatgctattaggcagcattttttttttcaagttcgctcactttctattgctttgatatcgtgtacaaagtgttgttaggttacgtaagaagatttttattagaataaactttttttttctctttcgaaaggcattaactactacctttatccaaatgctcttgttcacaaagatttcaaa

SEQ ID NO: 322 - DNA, 3792 bp, Aedes aegypti
atgacactgagccgtggaccttacagcgagctcgataaaatgagccttttccaagatttgaagctgaaacgaagaaaagttgactcaagatgtagcagcgatggagagtctatagcggataccagcacttcatcacctgaccttttgcagcctttgtcacccaagatgtgcgatcagcagcagtcggcaggccaattggagctggacgatcccaccgagctcgaggatggctctccagctccaacggctgctgcaaatcaccaccaccaccttcaacaccacccaactcaccaccaccctcatcatcaccatcatcacccccatagcaataatatggataataacaacacgttaacaagcaacaataacaacaacgactgtataacgtcaccaaagttagaacatgatggcagcatgatgaaggacgatgatggcgacagtgaaagggcgtcaccagattcgcctggtttgctaatcgacgaacgtccaccttcgagactgaaacctgcggatcctggtggttgtacgccgggtgcacttcctaattcctccaattgcggtgggggcgctagtgtgatacgttcggtggcggatgagcgtccccggtcttcaagtccgccaaacagccataatttagcgctaatgaattccattcaactcctgcaacaacactacagtgcaagcggtaacgctggtagcagtagtagtagcagctctattggtgctgcccagagtgtgccaggtcatcagcaacaacagcacgtgaccgtacttgtcaccccatctcgaatgaaaccagatcatccgacgacgttggttacgctagggatgcgaaaacaggcgccaccgtcaattaatctagcaaataccagcaacaacaccaacagcagtagcactaatagtagtaataattgtaacggtagtaatagcaacgttggtagtaataagaacgaagagcctaatagacttacatcgacaccgcagagttcaacgtcgtcatcaccttcatcttcgtcgtcatcttcgaactcatcatcgaattcgtcatcaacatgtggtgtatcgccaaatcaagcaaaccaacaaccagtccatcttcagatgtttcaacagcctcctatcggtggcatgtctaagttctcatctagtcaatctttgtcaaacaattcaaatatccaacagcagcaacagcatctcgcccaacaacaaatgctgcaagcaatgcaacagcaaattcggataaaaaaggaacgcatgccccaatacacgatagttaaccaaaataccaacatgtcattaatgcatggcaaccaacatcgccagcagaacattcacatgattcctaacccacaacagcagctgtatgtgaaacgtgaacgaccattacctggtcagagtcacacagttgtgaacatgccgcctgtttcgatggctggtccggctaatcaccaaaggcaacctccgagtagtcctgtccaagtctgcaacagcacatcgccaatgcagccacctatgtcaccaagtcaacagcatcaaaaccgacagcaaagccccgttcatatggggtccaacaatatgggccaatcaccacatattatcatcaaacgagaacggcaagcagctagtcaaagtatgactaatgctatgcaactatcaccaaacaaccagcggttaccaagtcctattcaagtcagtcctaccacgtctccactaaatcccgccatgcagatacgacaccccatgcgggatgctgccatattatttcgcgtaaaaaatgaagcacaagtaccaaatctcatgcaacagcaaccacctggaatggctcaccggataaccgtttggcccggtggacagcagcgtatcaatggcgtcaaaccggaagtgatcggtggcccgttaccgccgttgcgaaaccaaatgtccccccaacagtcgccgcagcaccatcaaagtcctagccctatcgcctcgcaaacgccaccacggaacaccccgacagtcatcatgggcgagtcgtgcggtgtacggactatggtctggagctacgactctccaccgcaagtacaaaccactacgccaccaattgcgccatcttcggcgacaaacgtgacagcatcgcagggtccgctaggtcctggatcttcgctcgggatgggcaccattcctccctcgccgggtaaccaccatcaccaaaacagcaacagcagcagtagcagcagtagtaccaacaacaacgaggaggcggcgcatctacttctaagcttaggacaaaccgtaaggcaaaacgaggctcaaccatggactcccaatcgatccggactgcccctgaatatggaacggttgtgggcgggagattatacccagttccccacgggacaccaaatgcatgctctcaatctcacctcgcagcaaccgtggaatatgccaccgggtccaaaaaaggaattgcttgaggacatgcctcctgacgaggatgaacaaccgttggtgtgcatgatctgcgaagacaaagccaccggattgcactacggcatcatcacctgcgaaggctgcaaaggattcttcaagcgaaccgtgcaaaaccgaagggtttacacgtgcgtcgcggatggtacctgtgaaataactaaggcccagcgcaaccgctgccagtattgtagatttaagaagtgtatcgagcaaggaatggtgcttcaagctgttcgagaagatcgtatgccaggaggacgaaacagtggcgcggtttacaacctgtacaaagtaaaatataagaaacacaagaaaaacaaccagaaaggtaacaaccaccaaaaactcggcatgcccggtgacaatccaaagtcgatgttcttgacgtcatcgacgacgccgccgatcaagtcggaaagtattagtctgccatcgcacctggtcaatggaacgatactgaaaactgccctgaccaatccaagcgaaatcgtgcatttacgccatagactggacaacgccgtcagctcgtccaaggatcggtcgatctcgtacgagcaagccttgaacatgatacatacccttatagactgtgatgctatggaggacatagcgaccctaccgcattttagtgaattcctcgccgacaagtcggaaattggcgataagctctgtaatataggtgattcgattgtacataagctcgtctcgtggactcgcaagttgcccttctacatggacatcccggtagagatccacacaaagctactgacagacaaatggcacgagatactggtgctgacgaccgccgcctatcaggccttacacggcagcaaaagcataggtagccagctccaatcctcgaccggcgggaacggtccgggaggtggaaccgttctcgcacctgacaaacaagactccgagtttgtcgaagagatcacagcccacctgcatacgttacaatcctgcctaaccaccctaatgggtcatccgatttcgatcgaacaactgaaaattgacgtcggtcaaatggttgagaagatgacccaaattacgataatgttccgacggagtaaactcaagatggaagagtacgtctgtctcaaggtttacattctgttgaacaaagaagtcgaattggagagcatacaggaacggtacgttcaagtacttaggacttatctacagcacaccgtaccacacagtccaaatcgactggcggacctgttatcccatatacctgagatccaaaccgctgccagcttactactggagagtaaaatgttctacgtaccgttcgttctgaactctgccaatattaggtag

SEQ ID NO: 323 - DNA, 1219 bp, Aedes aegypti
tcgagagcttcgagtattcattcacgggtagaacgtacgcgatctgtgtgctattacgggtgcgacgaattataaatcagcgaaaacaatccgagtgataagctgcagttgaggacaattcgaagttcaagttcagttgataataattggcgagaggaacaacagtgtgacagtctgtgataacgtttggacagctagctctggaaacgacgaaacaccatgaggaatcaattgatcagtcagatattggaggacggttataccgtaattgacgacttcctgactccagaagaggtcacagagctgctggaggctggaaagaatcttcacaaagatgcacccaaagaggaacggaaagttttcagcaccatcaattccagcgccacccaaagccgagaccgatacttcatcgaaagtggtgacaaagttcggtacttcttcgaggaaggtgctgttgcagagaacggagaactactggtagatccatcggtggcgctcaataaagtcggccacgctctacacactgatcatgccgttttcaacaaggtcacattctccaaccgcgtgaaagaagtctgttggcagctcggtttccagaagcccgccgttgctcaaagtatgtacattttcaaaaaccccggaattggaggagaagtcaaaccacatcaggacgccacctatttgtacacggaacccagttcaacgattggtttctggattcctctggaagacgccactctacaaaatggttgcctgcacttcatcaaaggatcacataaaagcggagtccatcgaagatacattcgcaatccagataaatcctcccccgaattgttgatctacgaccggccagcccctctctaccctcagtccaatttctgtgccgccccggtgaaagcaggctcgctggtcctcatccacagtcaggtggtgcatcggagcgacgcgaaccgatcggaccgtagccggcatgcgtacaccttccacgtgatcgaaacggaaaactcggcatactcctgcgaaaactggctgcaaccggcaaccgatcagcccttcccagtgctttacgagagggattgagcgcgcagtttgtacccgtagaaggaaagaacgcagatgcatgtgccatagtcgatgatgattatattttattgttctttttctttatttctatggacaaatatacctttttactatgagtaaactcaaacaaaagggg

SEQ ID NO: 324 - DNA, 852 bp, Aedes aegypti
atgtatcattccggccttccctacaaagtgtactccggtcacgattcggtgctggcggagaagcggaaacagcgccggatacgaaccaccttcacgtcggcccagcttaaggaactggaacgtgccttccaggagacgcactatccggacatctacacccgcgaggaaattgccatgaagattgacctcaccgaggcgagggtgcaggtttggttccagaaccggcgggccaagttccggaagcaggagcggatcgcccagcagaaggtctcgagcaataacaacaacaacaacaacaacagcaacacgagcaacaacaataacaacaacagcagcgcggattcgtcgtcggtcaagagcgagcagaaatcgtccagcgccgccggaagtacgaccccgaaggacatcaaaccgggctcgccgctgtccaacgtgtccaccactccgaactcgagcgcttcctcccaccagtccaatggcgatatcaaaccgatcaatggaaaactctccgattcggatctgaacgggctgtcggtgccccaccacggagggcccggtggaggagcagggctcggatcactccaccaccaccaccacaacaataacaacagcagcagcagtgccagcaaatggagctcctcgtgcaatccgctgctgcaaagtcagaaagcatcgtcggcggtgaaccacttgggcatgaatcacaatctgcagaatcatcaccaccatgcggtggcggcgctgtcgtctccattttcctcgctactgggagctggcggtggagccgccgggtacttgttggatccgctagggggactgaacaaaactaccgcggccaatcatttgttctaa

SEQ ID NO: 325 - DNA, 2330 bp, Aedes aegypti
ggtgacagattactcgacatcccatgcaaggtgtgtggggatcgtagctcaggaaaacactatggcatctacagttgtgacggctgttctggatttttcaaacgcagtatacatcggaatcgagtttacacctgcaaggcggctggtgaactgaagggtcggtgcccagtggacaaaacccatcggaaccagtgtcgagcctgtcgattatccaagtgcttccaatccgcgatgaacaaagacgatgtgcaaacgaaatcacattacaggaggcaaacacagctgacgaagcttccacaccttattcgcccagccgggaaatccttcagcgatttcacagctcattttcactttggagattacatgcacaaacataattcgcaactaagccatcggcagctgctcctggcgaagcgaaacgtcttccactcactccaccataaattgaaggctttcgccacaaaccaaaattttgagttcaataatccccttttaacgccattttcactccagttgtactttttcgcttttccgcttctaagacggttgatgtctcgctcgcaggagataaagttttatccttttggccaacgaaagttgattgctgtcgggaattttgataaaacagctcaccatgagcgcttcaattttaatttgccattcaccaatcgattggggtatagttgcggatctatcgaacgatggcttctgggtagactcttgcttccactaatgcttccattccgtgacgcgagtgtaattaatttttcattgctttgctgttcaacacgaacgcggtccgcggaaacccaagctgcaacaccttcagccaaatggacatcatccacatcatctgggaggaccattcgtgaacacatcgtcctacggccacgttcctcattttgccaacctgcaccattcagcaatgcaacagagctcgatccttcatcatccacagcctttgtcctttgccccattgggacaccacatgcctccaacgctcctgcctccgtaaaattagaacaacctaaatttgaatttcctcccaccagcaatggacagttacctccctcattgttaccctctgtcaaactagaacagaacaaaatgtcttcgttcgacttcccgccatcgagtcatcgattctacaaacccttagagcaactccctccttcacctacaaattccaaaagttcaataagtgtagactctccatcagaaggcttaaccagtccacaaccttcgacgatagactgtggatccagtgtccttagccctaccccaatcaatgctagtaatctcagtcttccttcaccattgtcccaaactggggtgttagatatcataatgagttccgataaatgccaggaattcatccagtatcaaatgcacaataacaatctgatgttcccaggatacaattcaccggaaacaggtgaaacagttccccaaccacctcctccgcctccaccactgattccacatcccacacctttgactgctgacagccccggaatacgattacccacttgggaaattctacaggaaaccaccgcccgacttttattcatgtcagtgcgatgggtacgctgtttgatccccttccaaacgctgtccaagaatgatcagcatcttttgctacaggaatcgtggaaggagctgtttctgctaaatttcgcccaatggagtgttccctgggatctgagtgcattgctcgagagtccacaggtgcgtgatcgaataccgcatgatcctgccacccagatggaaatgaaaacgatgcaagagatactgtgtcgcttccggcagatttccccggatctcagcgaactaggctgcatgaaggcagtgatactattttctccagaaacttccgagctatgcgacgtccaaccggtggaaatgctgcaagaccaggcccagtgtgtcctgtcagatcacgtacgggtgcgctatccccgtcagccgacccgatttgggcgcctgttgcttctgctcccactgctgcggacaatccgctccgtaaccatcgaaacgcttttcttcaaagaaaccataggtaccgtgcccatctcccggctcctaatcgatatgtatcagatggaaaagtacaccgatctcgaaaccggcacaccaggagtcagcatcggtacaccgtcagtgaagcattaatcgtttggccaggtgcgaacgaaatcatcatttcccatcagcgtgagaggggtatgtagttcatagggaggacaaatgaaaaacaaaatttgaagaaacatccaggatagaaataaccactgtcatgaatttccgcgaatatactttaagttaaacat

SEQ ID NO: 326 - DNA, 3303 bp, Aedes aegypti
ttttccgattcaaaaccaaaatcaatccaacaacgctttctgtttatcaataaaaatcgcttcactccagaaattcagtccgcttgcggggcagtgttttaatgtaaaaacaaagtgtaatatcagtgaagtttgacgaaaggaatgcagcaatgctgctttattgaattacagtggattattggaagtaaccgcactagaaaatcgagttaacccagtaagatgagcttcggcgatcggattgaggactacgaagtgtacgaaattcttggcaaaggtggatttgcaagtgtttaccgtgcaagatgcctgggaagtggaaccttcgtggcgatcaagatgatcgacaaaaagttgatgcaatcctcggggatggccaatcgagtccggcaggaggtcagtatccattcccagctgaagcacccgtcaatcttggaactgtacacgttcttcgaggatgccagccatgtctatctggttctggagctggccgaaaacggtgaactgcaacggtatctccgtgagacgaagaagactttcaatgaatatgaagctgcgtcggtcctgaaacaggtggtggatggccttctgtatctccattcgcaccacattctgcaccgggacatgtcccttgccaatctgcttctgacgaaacagatgaccgtcaagatatcggactttggactggccacgcagttgacacgaccggatgaaaagcatatgaccctatgcgggactccgaattatatttcgccggaggtggcgtcccgggcatcacatggtctaccggccgatgtctggggtcttggttgtatgctatacactttcctggtggggaaacctcctttcgacacggaaggagtcaagtccaccctgacgaaggtcgtgatgtccaactacaccattccgccgtacatttcttcggaggcacgggatctgatagatcaactattgaagaagaaccctgcggagcggatcaagctggatcaggtattgcagcatccgtttatgagaaaggccaccagctacgatagctatcgtggcggaggaactctagcttccagcgatagcggactcgtaacgatgtccagcaacggaggatccaaccgatccaacatcccttcgagctacggccaggatcaacggctacaagccccaatcatccatcaaatgcctcttcggtaccaaccgatcagcgaacacgagtacgacttccaggagagcatcttgccacagcagcgacctcaatctgcatcgcacaacaaaccaacgtcggattttttctccggcattagcaacgatcctcgaacgatggccccatcgtcccgccccatgcaacaccatctgaatcagatatccctgctgcagcagttcaacagtttggagctgatggaaaagtacaacattaacaaagcggacattgccagcgtgggacgatcggcatccgagggcagctcgggagtgcttctgcaggagcatcaacagcaaatgatacagcaacatgctatttcgttgctgaattccaaacccaaatcggcttccatatcgatgctataccagagagcagatagtgctgctggtccttcgtcgtttggtgaaaaggagaactatgctcttcacaggaggggtgaccgggaaacgccattgaatccgggaaattatgatttcatcgaacactttcaacctaaagacaacaactacccaccgcgcagtgccactccgaagcgcagaagtccaaccaaatcgccgaaaaagcgtctggacataccacctctgaacactgcccgtttgctccccaatcggcacaagacgaaaaatgccatcctcagcatccgatccagcggtgaggtcgtcctggagttcatcaagttcaaaacccgctacaaagagaaccgggtggtggacgtttgtcgcatctcgtcggatgggcttcgctttgtgctgtaccatccggatggggggaaaggcgttccgatagaggaagaaccacccgatttgccgccgggaggtgccgacagtattttcagctatgagaaccttccggagaagcactggaagaagtaccaatacgcggcccggttcgtgcagatggtgaaggccaaaacgcccaagatcacgtactacagcgagaaggccaagtgccaactgatggaaacgttggaggattatgaagcgagtttctatagtggaaccaaaatcatcaaatcgcctcaggatggcgtcaaatttgtggattccagcggcatcgcgataaagaccattgctagtctgagttcatcgcagaacgcagaatatcagcactttcagcagaccctggaacactgcctcaacatcgagcgggccctttccgccatccaaaccgggaagaccttcccgctcatcatcggtcgacgacccgcaaatgctcctcttacatcctcctcctcctcatcctcttcctcaaccaaagaaaaccaactctattccaacatctcctctcccaacactccgcaaacgcctcaccagatgccttcttttgccatgtccacggcgtcccacacttcggcagggaacccgctcactcaacggccagtcctctcgtccaaacccgtgccggccaacttcagcaacgtggccatgaagaagtgcaccatcgcaggcgtaggaacggccgtccagctatcgcaaggcgtcgtccaggtccagtttctcgacggggccaccctttcgttgatcccgatcgagcaaggaggcggagtcacgttttccccggccgtgggaagcccactgcagcactattccacccaggacaatgatgcgctgcttccggcgagtctgcgcgagaaaatcggccaaatgccggcgatcttacgcgaactgaatgcggccccggtgccgtcgattccgttcaactttctagagggatcgccgcggacaccgttgacgcggtttttgcgataagtttcgtgcgggggtggaaatagttgttaaagttccaatcaacaaaatcagtttttaaggccaaacactctctactaattgtatttgtaggtagtattacgatggttaagagattttatcgactgtgaaatcacgttctacggacagtaggaaatttgcattattttctagttgagaaactgtactgaagtaatttattacacatatattttttatcgaataaaattgaaaagacaagttttattcagctggtgtgttcattatgatcaatggattgaagaagaaccgtcaaattgagtgttttaggatgttttttacattttttatacaacttttcttttagggatcgtttaaatattacgt

SEQ ID NO: 327 - DNA, 1141 bp, Aedes aegypti
tgtcatgaattattttcgttcgacgatcggacgtggcgattgtttttcaataagcaatcgattttctctggataatttcgcattgatatagcgaataccgcgaattagaagttccgtaataacgtgatcaatcgataatgggtctttgcaagtgtcctaagcggcaagtgactacgcaattctgcttcgaacatcgggtgaacgtctgcgaaaattgcatggttgtaaatcacaccaagtgtacggttcaatcatacatccagtggctaaaggatagtgattttgattcgtcttgtccattgtgcggaagtccacttgacaacgaggattgtgtgcgacttatctgctatcatgtgtttcattggaaatgtttgaatgcgaaacaacaatccttgccggcaaatactgcacctgggggacatacatgcccaacctgtagcgatcctattttcccaccagtcaatctagtctcaccagtggccgacgttctccggacaagattgggacaggtgaactgggcgagaaacgttcttgagcttccgttgctatcggaagataaaccagattattacaccactgcgaccacttcggctggggttcacaatggaaatacctttgcgtccagtatgtcccaaaccagatcgaacgaacgacccgaaagtcctcactcaattgttaacatggaatcgtacgttagtaatgcatcacctgctctagattttcacgcgagcagtcgacgtccactgttggctcgggagtccccaataggggcatccgatagggacgataataagtataagagaaggacaccccaggaaatattctcccgctggtctagaagactgtacgcgccatcctcaaagccaccatggagacgaacgtggttccttgtgcttggaggttgcattggttttgtttgcatcatttacgttctagccactttgggacgccgcggcggagatggagaagtgggcctgatttacaaccgtaatctgccgcacgaagaatgaaggaatgctaaaatggtaaagcaccaccattccaacacgaaaacaacacagatcagtcttttactattcaaattatttctatatttgttattttgtattatctaatatatttctagggtcacatctaccaa

SEQ ID NO: 328 - DNA, 876 bp, Aedes aegypti
ggcagttccagtactcttgtgttttgttgtgtgaatttacagaaaagtttttacaaaagtaaaatgccgaaaaagggccatcggaaaaactccaagaagatgaagcaccagaaccaggagaacgaagcgcgctctgccgaaaaaaagcaactcaaagagatgctaatagaacgtgatctgttccgtcccggcatgaagatccgggaaatgcgagagctctgcaccgccatcgaggagtcaatgctggaccatgaattgctccaaagaagcaatcagttcaacggaagcttcagggatgaggacttgaaccagcgcattctgcgggacttcgcccttctggagaacccggcgtcctcggaaaagctaaactttattagcgatccagccactccaccgacgaatgcgtcccctccgaagttcaccggccgtcgtccatcacctaacatgtccgaatttcctccactgacatcaccgattgcaggaaaagccccctcgggaccatgttccaaaccatccgactctgacagtgatggcgactattactcgcccgaatttccgtccgtgctgccgtatctcccatgtcgtccaagtcgaagtccacccggagccacgagcctatgattgcaacggtgacgacgataaacagctacgctggattgcttcgccggggattaaatcatcgccaaggctggtaaagccgtcagccaaagcgtgggacgccattgacgaagtgccctgaatcatacccgaaagctatcagttatcatttcaccgccacaggtaagttttttcgaacaatgaacgttgcgtagtcagagttgtgtgcttgcactgaagttcaatataatatattcagatttctatgttcgttcgttg

SEQ ID NO: 329 - DNA, 2484 bp, Aedes aegypti
ggtgaccttatcctgggtggcctgatgatggttcactccagagaggactcggtaacatgtggccctatcatgcctcagggaggcattcaagcgttggaaactatgttatacactttggacaaaatcaacatggacaatctcatacccaacgttaccattggagcccacatcctggatgactgtgacaaagatacgtacgggttagaaatggcggtagatttcatcaaagggtcaatcagcaatatagacgaagctaccgattacaacaactgcagcagcaaggggcacaagaagaaggtgatctccggagttgttggagctgcttcatcagtgacttccatccaagtggccaatcttttgcgactgttcaagattccgcaggtgtcatatttttccacaagccctgaattgagcaataaacaaagattcgaatatttctctcgaacaataccatctgaccattatcaagttaaggcaatagtcgacatcgtccggcagctcggttggagttatatatccataatctacgaggaaagtaactatggtataaaggcttttgaagaacttgatgatttactttccaaacatggcatttgcatagcgatcaaggaaaagttggtaaaagattctggagtagcggaaaaaatcgcatatgataacatagttattaaattactgacgaaaccaagagctaagggcgtgataatattcggctctgatcaagaagtggcagaagtcatgcgagcagttcgccgacagaatgttacgggcgtattctcctggataggctcggacggctggagtgcccgaaatctggtatccgatggcaacgaagccgaagttgaaggcactctgtccgtgcaacctcaagcaaattccgtgatagggttcgaggaatattttttgaatttgacagtcgataacaattctcgaaacccgtggtttatcgaattctgggaggatcatttccaatgcaagtatcctaactctcccccgacgccgtacaacaagcagtatacgaaattttgttctgcgacagaaaaattaacgaaacatacgctcgacttcgaagatcaactgcagtttgtaagcgacgcagttatggcgttcggttacgcattcaagaatatgcaccaggagctgtgtggaagtaagccaggattgtgcgatgagatgaaccccacaaaaggagcagatttgctaaagtacctaaggaaagccgactttataggcctaagtggcgatagatttaatttcgatattaacggtgacggaccggcccgatataatatcattcattttaaacaatacgaacccgataagtacaaatggatcaaggtgggcgagtactaccagggagagctgcgcttgaatatggaagatatccaattcggcataaagaatcccaacccaccagagtcagtctgcagccggccttgtgaacgaggccaagcgaaaaaatatgttgaaggtgaaggctgctgttggcactgtttcaactgctctcagtatcagatacgaaatcccgctgatgaaacacactgtataaactgccccagaggaaccataccggatatttaccatgaaaactgtcagcacattccagaggactatctgaaaccggagtcaccctacgccataggggcaatgtcgttcagcagcctcggaatcgtgatgacacttttcgtagttggagttttcctgaaaaacaacgatacccctattgttagagcgtcaggtagggagttaagttatgtattgttgagcggaatactcttatgctacggtgtcacgtacgccctggttttcaaaccgaacgatattgtctgtggtgtgcaaagattttggtccggcttttcgttcactgtagtttacgcagcgcttttgaccaaaactaaccggattgcacgaatattcaatgcaagcaccaaatccgcaaagcgaccttccttcattagtccccactcacaattagttatatgtggcatactcatatcgtttcagatattgatcaatgccgtttggatggttgtttcgccggcccacgccatgcatcactatcctacgagggaagataacctactggtttgcaattcgtataccgatgcatcgtatatggttgcgtttttttatcccatattcctgatcatagtttgcaccgtgtatgccgtgctcactagaaaaacaccagaggctttcaacgagtcgaaatacataggtaagtatgatagcttcacaatgtacaccacctgtgttatctggttggccttcattccgttgtacttcggaacgggaaacaatgtacaacttcgtatagcatccatgtccgtaacgataagcctctctgcaacagttacccttgtttgcttgttctcccctaaggtaaatgaaattgttataagatcagtaggaacccattctgacggagccccctatattttccctgtaacagttgtacattatcctgattcgacccgagcgtaa

SEQ ID NO: 330 - DNA, 3398 bp, Aedes aegypti
atggcaaacgtgtttgaaatcgaatttggtgggcgaaaaagctgccaagaaggcaaaaataccacaaagatacgttatttgaccaaacgtacatatgccgaacgagcagacattcctccggcaatcgaaccacgcaaggaacatctattcaaagcacctccagtaccacccccaagaccgaagaagaccctcgaatcaagcaacataaacctcgtcccagaaaaaccacctccaccatcgccagcgctgttggcagctgctttatccgctccatccactccagcagatttgggattcatcagtcctcaacaagctgccacctccagtactgatcacggcgaagacaacaacaaatccaaactggccaacttggtggatcttaaaaaccgagacacgaactcgcacgtagacaaccctcccagtccattcatcctggcaccgccaccaaaaccagcggaacggatcgttgcccctcccagaaaagtgccagtggcgaagcacttcttagaagggccactcgaaactccatcggaattgttcacgcctaacaaaacgaaaagtttgacgctgaagaagaaaaactccatcctatcgaagagacggaatgtttctctgaaaacactttgcgttagtgacatacagggccacttgtatcgacggacaaaggatcggagtggactggcgtattgggccaagtactactttgtgcttattgaaactacactctacggtttcaaatccaaggactcgcacaaagccaatagtatgatattcctctctggctttacgatttcattggcgaaggaagttcattcgaagccgtacgcattcaaggtatatcacccgaacaagacgttctacttcgcggctgaaactcaggaagctcttggtcaatggatggaatatatcaagcaggctacactgaagggtaataatgctgctccgggcagcgggtcggcagaccacagtgtgaaggaactgttttcggaaaccgacagctcagaagacgaattcagtctaatggacagtcaaaccaagctcaatctcttgtgcactccgtcaccgcaattgtcgtcttccgttagaaacacggataatcattcaacgcatagcgatagcaatcacagtagcaccccaacatcctctaaacaggaaaagtaccatctgaatttcggatcgttgaaaaagtttaccaaaagctatcctttcaattctgacggaaatggctcgagcggtagcggcagcagtgaaagcagattttttgggttcttcacctccagcaagaatgtggaaaaatccaattccagtgaaatgccagttcccacatctcagtttcggagctatcgaaaggtaccggctaacagtgctgtacataatagcaccattcacccaatttctgctgaaattatgccatctgtagcacatgaccaaatcaaaacggcaagcaatttgtccctggcatcgatcagcaccacccaattcaatgttcctccggtcgttcatgctcaccgagcacccacccctcctccggtagaagaaaaaccccaacctgtgatagtggaaccgccgccgtcggaaccatcaaccccgattccttgcgaaaccgacgagttgctgaatcgcgcaaagaaaaccaagcgaatctcgccacacaactttatccatgcttccaatcccaatctggtggaatttgatttccaaacgtccaagcacatcatgcaatcagttaccaactgggatcccaacccatcacatagtaatcatcatacaatgattaccttaaaagaattgatgctacaaaagcaagcagaagaagcacaagatatgtacaataagcgtgtttgcttaggcgtagagaaattggacgatcggagcttgaagaaaacgctttcgaaacaaaacgaaatcaaaccggaaaatactgctgctcacgttccggaagcggtcaacaaaattcaaaaacggcggcttccgattactcctgattatgctcaaagctttaaattagacgacgaagacatcctctataccagaagcaaagagggccaaaagctgcgcgattttggatatgaactcatttcaggcgatgacacgtttgacttgaaaaattcaatggcaacctctgtggctagcacaagcaatcatcacgacagcaaacgcaatgatagcagtggctcaatcaaaaagaaaacccgtaactggatcaactcggaacgacgtaacgaagagtcttcctcttcagatcgttctttgcgcgacagtttcaaaaaatccaaaaacaaggttgtaatgctggacaacatcaaggcaagcagcgagaaactgttccagttcaaacacagcagcaataacgataaggaatcgttgaaaaccaaacacatggacaaaacgactccatcgctcaatgtgaacctgaagcaatcgggaccttttggcagtcttggcaaaaaccatcctggaacacctcaactcgaacagtcgactatattcagctcaaccaccacatccggtggctacattacgtctagccatgttctccctggcggaggcccgagcagctcatctataacgagttacattcccggtggaatcaaaaagtccaacacgtgcaatagttcctcggactttaaggaaaattccaaggtgcaaaatctgaggaagaactccgctcccgagcgtacggcatcctactttacaaaactctcgttcagtagctcttccggcaagacgcccaaggaaaagaaactgctgggatcgccgggattgcacagggcgttcttcgggaagaatcaacaacagcccactgtcatagaccacgaaattttctcccccatcacatttaccaagcaaagcaatatcccatccgacagcagcatgcagtccagttccaccatgaccagcacgataacgatcgggaacgtccaatcgacggcaacgaccacctcggtgctgaccagtaacctgtccaatcgagcctccccagactaccccaacatggagtatccgccggtgtttgaaccggaaacttactcgctcagtgatccgaccacgaccctcttgaagcgccgtcaaaatcaccacccaaaatgacgaccgataaggttagctacggttcgggagcacgagtgcggatgaagaatgtaagcgaaaatgactctccgtgattcttagcgattagtctgaaatgatattatgtattcttatgggataaatactaatccgtgtagattaagaatgttatacaattccaattaatcggaaggtgctgtaaacgttgttttataatgatttttccagaaatgatttttaaagactagtagggtttgtaatcaaatcaattatttattattggaagtgatttattgtgcatggaaaaaatataactttatcaaacgcat

SEQ ID NO: 331 - DNA, 3801 bp, Aedes aegypti
atgggaaggaatgcggatagcggagtgatggggtcgggtaacggattgatgtgttcgcggtggatgagtgtgcggctgattgtggcggtgttggctttggcagcatgtcatcgagtagcggcgcaggatggagaacatcactgtgtgatgtacggggtctgcaattatattggaatgcacaagcagaattgtccaactacggagaaggcaaggccgctggacaatctgcaaggtgaggagatcctgaagcgacggtgcggttttgtgtttgaagatgagaaaatgcctttgtgttgtaactacgagcagctcatagagctggacaacaacttcaaaaatggagaaggtgtgttcggcagatgtgagacatgcacgaggaatatgctgtacagtatttgcaacatggcttgcaatccggagcagagtcggttcctgacggctcatacggccccggaaggatactacgtcgataaagtggactatcgaatcgaccgagaacacgtgcagaatgtctacgactcatgtaagggtgtaatcctgccctcaagtggaaaatatgcgatggacatggcctgtggaggttgggagtccacgaggtgcaccgcggagaggtggttcgaatacctcggcgatgccgtcaataatgactacgtgcctttcatgattgagtaccattatccggaagacccggacatcagatacaatcaggatgtactgcattgcaacgaagggtacaatggttcgaacagttgttcgtgcgtggattgtttcgacagttgcccagtgtcggatccacctgaagctgaggatcctggattccttgtaggcgatttgaatggagtgaccttcgtggtggccgtagtcatcggagggttcggtttgtctatggttttgttcagtggtttctacaagtccaacggatcatcgtttgagtttcctaagttctgcggaggcttcccggccgtcaatagaggattgacgaagttcttcactcattggggaactttttgcgccgctcatccggtgttgataatcgctatctgctcttggattgttggtggcctttgctacggaatcatccacctgcagataactaccgatccggtcgaactgtgggctgctcccgaaagccgatcacgcgtcgaaaaggactactttgactcgcggttctcccctttctatagaactgcgcaaatgttcatcaaacctaccacgcagaactacatcgttcacgaaacatcaacgggtaacatcaccttcggtccagcatacgataaggagttcctgctcgcagtcttcgagctgcaagaacaaattgaacaaatcggccaggaggagggtgctggtctggaaaagatttgctacgccccgatgacggcagctggccaagaaacggtcctcagcgaatgcaccattcagtcggtgtttggatacttccagaacgactacgacaacttccactccgtgcgtcccgacttggaaggatttgaagtcaactatttgaacaagatcaacgactgcacccggaatgcgtacattccggcttgcttcggtccctacggtggacctgttgagcctggtatagccgttggaggtttcccaaagcctgctctgggagaaagtccggattaccgcctggccacaggagtgatcatcacctttcttatcaagaacaaggctaacaaagacgaactgggtccgatgatggagtgggagaagaagtacatcgagtttatcgagaaataccagaacccgttgatggacatagcctacacagcggagcgatcgatcgaggacggaattgacgccatgtccgaagccgagatgtacaccgtcatcatcagctacgtggtcatgttcgtctacattacgatctcgctgggaaaggttagcggcctccggacgttcttcaacgagtcgaagatcatcctggcggttggtggaatcgtggtggttttggtgtcggtcgcttgcagtttgggattcttcggatatctacagctggctacgaccatgttgacgatcgaggtgattccgtttttggtgttggccgtcggcgttgataacatctttatgctggttcacgccttccaacggattgatagggtacagactccggaaacggataaggccatcggaaaggctttgggtcagattgggccatcgatcttgctgacgtcggctagcgaatgctgctgctttgcgattggcggtttgtcgccgatgcctgcggttaacacgttcgcctggtatgctacggtggcactgttcgtggattttgttctgcagataactgcgttcgtggctttgatggcattggacgagcggcgagttgctagcggaaggttagacctgttctgttgcgtgaagagcgagaaaaaaatggttggaaacgaacagataggaattttggaaagtttcttcggaaagtattacgccccgtttctgatgaagaagccggtgcggttgacggtgttggctatcttcatcgtgctgtcgtcactctcgttaatggttgttccgaatgtggaacccggattggatcaggagctatcgatgccgaaagactcgcacttggtcaagtacttccaattcatggcggagctgctgtggatgggtcctccggtgtacttcgtactaaagcctggattgaactacacctcggtaccggaccagaacctggtttgcggaggagtcatgtgcaatgcggactccgtccaaacacagctgtatttagcttcgcgatatccagagataacccgaatcgctcgaccttcttcgtcctggttagatgactatattgattggctagccatcgacggctgctgtcgatacaacagaaccgacgggtcgttctgtttgagctccaacaccttttgcgaatcctgccctcgggagtttgacgaaacgggtgttcgcccaacggtcgaacagttcgagcggtatatggagttcttcctgtcagacattccggacgaccggtgcgccaaggctggtcgggcagcgtacttgacggcactaaactacgttacagactcggccggtcatctgaacgtccatgactcgtactttatgagctaccacacgacggtagtggtgtctagggacttctacgaagcactggagtgggctcgcaaaattaccgacgacatccagcggatgttagacgagaaagggaccggagtggagattttcccgtacagtgtgttctacgtgttctacgaacagtatttgactatttggggggatgctctgctatcgcttggactgtcgttggctgcggtattcgtagtgactctcttggtaaccggactggacgttgtgttctctctgattgtactactgatggtgttcttgattctgctaaacatgggaggcttcatgtgggcttggagcatcaccttgaacgcagtatcgttggtaaaccttgtcatgagcgttggtatcggcgtggagttcatctcgcacactgtgcgctcgtacaagaacgaagccggcagcaaggttgagcgggcagccgaagcgctaaccaagaccggtagcagtgtcttctccggaatcacgctgaccaagttcgctggaatcgttgtgttggccttcgccaactcacagatattccagatcttctacttccggatgtatctgggaatcgtgctgataggagctttccatggactgatcctgttgcctgtgttcctcagctacattggacctagatctacaaagcaagtgattatccacgcgaccacggatcccctgagcgaagcaaagtattcagcttcagaaaatcataacttctag

SEQ ID NO: 332 - DNA, 603 bp, Aedes aegypti
gcccgggccaaaattatcggttcacaggaggtgcacgtgaagaaaggcagcaccatctcgctgtcctgtgtcgtcaacgttctggcgtcgtccatctcgtggtaccacggatcctccgttgtcgacttcgattcggcccgcggaggcatcagcctggagacggagaaaaccgaaaccggcaccagcagccgtctgatgctgacccgggccaccctacgggactcgggcaactacacctgcgttccttcgggagccatctcagccagtgtgcaggttcacgttctgaacggtgaacatccagctgcaatgcagacaagcaacggagtggtactctgttcgtcacgatacgtgctagtttttgtactacttgcagccctaaatagttgtaatttaagtaaattaatctcctccatatcaacaaccgtactcaaaacggaaaggcaactgcgtcggacggttttgctggcgtcaacggcatcagtcggactcagtccaggaaggactgttgatggaaattcgagcggtttgggggaacttttcggaacgcgtgccctaactgcacgtggaattgagagagagagaggaaaagcgttcaaacggtga

SEQ ID NO: 333 - DNA, 1285 bp, Aedes aegypti
actcgccatctgtcaaacttgacagccaacgatattagaccagtttttgacggttcaaacgtttccaaagggcgcgcagcacgtgcgcgcgttgtttatgtttactttcactgttcgcttttgcttcgcgtgaaaccacccccaaataacatgaacaagtcgcgtaatttcaaaaagaaaaaccaccggaatcaaaccaacaccgggcgcaatcggaagcttgctgaaaagctttccgacctagcagtcgagtccagttcttcatcggaaaattcagcggaggaaaacagcagcgatgaggatggaagcggttcggaaggcccctcccacaaggataagttcgatctggggaaaccgccccaatttccggtcagtatgtgggatttgaaccattgcgatccaaaaaagtgctccgggcggaagctggcccgccacgggttgatcgagaacttgagactcgggcagaagtttcctggtcttgtgctaactcccgttggggtcaactgcgttagtccacaggacaagagtatcatccagagctctggaatagccgtcgtcgactgttcgtgggcccgacttgacgaaactccattcaacaagatgaaatctccccatccgagattgctcccgttcctggtggccgcgaatccgatcaactacggcaaaccctgcaaactgtcgtgcgttgaagcgatagccgcctcgatgtacatcaccggtttcaaggacgaagccctgtggtatctgaacaagttttcctggggccattcgtttgtggagctgaatcaggaactgctggattcgtatgctgcgtgtggcagcagtaaggaaattctagaagttcaaaacaaatacctggaaaaggcggaagcggagcaaaacaatcgaacgtatgaactggatctgcccccaagtgagagcgaagaaagtgaagaggaagatgttaaggaaaatgagtgacattagcgctagatagtaaattcataaaaagatatataatttggaaactaatcaatggttcggcttgtaggattgatcacatcatattcatttccttgatttatgctaaacttggacagcatttctggataagccagacgttttttgattattctgcgacacagaccccacaatcatccctattcttgttatcgttcgaaaatctttttacatttaattttacagtcaccccatagttatgaatctactattaaaaacattcgaaaacaatataataaaaaaaaacctgaagcgcctagacacatgtcaatttggacaaattgag

SEQ ID NO: 334 - DNA, 4115 bp, Aedes aegypti
tgaaacaagagtcgctttgtgtcgatcaatgaagattgtttacaccagcagaagtagcagcgacgtgcctcagggcaggggaggaattcgtacacgatccggtgtgtttgtgtaaatgtatacaaaacatccgaccggggcgagatctagtagccaggaagttcgggccgttgtttgcgctgacgtcggttgatcggcttctcgcctacttctcggaaggttcctcgaatggagatttattttgtaacattcttctgcggagttagatcagacatggcgtcgtcacctcacacagcatcagcgtgggaacaggtagtcgacggatcgacacccggacacgtacatacgtgcaagattgagcggcttactgctgagttattgtgttaacacagacggggaggaagcgacacgaggaagatcggaatttaagaatgaactctgccagaccaatagccgccgcctgattcggtgctcaaaactagaaagagaactgaagtcgtcatctgcttcgtcctccggcccctattcccgtcagcccacacttaccttttgtatttacacgagacacttttatggctccgaaaaacgaggcactgtgtgaatgagaagtgccgaacacaactgccggagataatcggaaccgatcgatcccatgaaaagccgtaaaaatatggctgtgcttcggatcgcccaccctggtagccgaaagccgtgggttttagttcgatccctcgtcgacatcgtcgtctcgtaacgaatgaaaattaatcatatttcttaattttcccttctccctacgctgattagccggaacgtccctctccgtctcattggaccgagagcccgggggcattgattaattgcggccggtataaattgaatttacacctcttcgggacttcgggaaggggcgaagaattgggcgcttcgactcttctgatggatgacgctcttgttggacgatgacggatgggtgttccgtgaagagagtgtcccgtggtgcgccggcaattatggccgatttttatttccgaagagctacaacaatcactacgacactgggatgactcattccgtgcggagagaggaggctgtggcggagattgcggcctcctacgcttcaaatgattccgagagatatatttgagacagtgcagtagtaggcgggaagttggacggagcgtccaaaacgggttgctttgttttggacggatcggatgctgcctcgttggctttgttgcttggagcaatcaattttgaaacacccaaacgtctgccgcgagctttcagattgggattcgttgctttttggaacggaaggagaactggacccaggaaaatgtctattcggcaaaacgctacgtgaactcggatccacatggttcgccgacttgggtcccccattcggtgtcatgtactgcatcaaatgtgaatgtataccggtgcagaaaaagcgacgaatcgtggcacgcgttcagtgccggaacatcaagaacgagtgcccgaagccgacctgcgacgagccgatcctgctgcccggaagatgctgcaaaacctgtccgggggacgcacacagtcctgacatcgtccaagatcttccacaagcagtgatgcccgaagaagaggagcgcagcaaacatttcgccgccctcctaaccggtcgcacctcgtccatcctgaaacgggacgacatgaagtccgtgtactcgacgatcaacccgctgaacttcgtcgccaccgggagattcgcgttccacaagaagaatctctactacagtttctacatctcggagaaggccccacgcccgcgcacgatccaattcgtcgaccatcagggcaacatcctggaggaacacccgctggtcatcccggccgagggtcccttcagcgtctaccagaacgcaaccggtaagatctgtggcgtgtggcgtcgggtaccccgtgactacaggcgtctcctgcgtgacgacatgatgaacgtcgtactgctctggggcggcaaacatcaagctgaactggcgatcgctggtccgatcggcaagtatccagccctaccgcaggagctgttcagttccctgctagaaccagctcccggaaccaatccggagcagatgaacggcgcaggtggcacggcaatcgtatccaccaagagcggcgtcacctcgtccatctacttaaccatcgtactgaatggcgtattctctccggacgatattgccgacgttcccctaaacatccgcctggagatgcagaacaaagatcaaatcgtcctggaagatactcaacgcgtcaggaagccggcccacgacatcaacatcattgaagtgtcgtccccgctgtccgtaaacgacctccgcctgttaactcgcggtaagctcacggtagtcgtcgaatccaagcgcaaacccgaagccttacgtatccaaggagtcatccaaacgcgcgtagcctgcgaagtgttccaaaccttgctggcgtcccacaatccagactcgcgaaccgatacgagcggcctcgcttggatgtacctcaacaaggaaggctccttggtctacaacgttcaaactcacaatctccacatgaatcacaacccagtggtcacgttgatcgacgacagcgccaagcgcaaggccgacctcgagacgcttaacatcgactccagtcacatcaccaacatcgtcgaccgcatgggtccacgtgtgctggaaccgctgtactccggcgacctcgcgataaacgtcgccaatgaccagaaccccaacctgatccacggcaagttcgttacccgaccggtcgctgacgcacgcgactccagcgcaccagtccttctgaagcgcatgggcaactcggccgtaccgctgcactccgtcggtatggcttggatggccgtcgataacgaatgcaacctacactacgaagtgacactgaccggcgtccccagctcgtaccacccggttcagctctacctcgatgaactccccatcgaagccccgaacgctccgatcagccaaacctccctggaagaattcaccggcaactacctcgaagggttcatcctggcgctgccgtcggccgagctggccaagctggaaaccagtgtcatctatctggaaatcttctcgaaatcgaaaaacgaaaccatcctgaaggcgaaagtcaagtcgatcaaggtgccgaaccactgcaccggccaccagtaccacgacaacgacgtccagaacaactcgttcgccccgatggcccccaacgacaacaccgtcccgacggtggaaacgaaatgctaccactcgtcccgcttctacgacgaaggggacatgtggcacagcgccctcgagagctgcaccatgtgctcgtgcgtacagaagcgcgtcaagtgcgaaccgatccgctgtccgccgctcaagtgccgcaaggaggacattgtccagaagcgcggcgactgctgcccgacctgcgcaggatcgaagtactcggacgacacccgggtggcgatgccgcgcgggtgcaagctcggcgaccagttccacgatgccggttccacctggcatccgtacctgccgccgaacgggtacgacacctgcaccgtttgcacctgcgacctggccacgctggaaattacctgcccgcggacgcagtgcccgccgctgagctgcagcgagaaggtggcctaccgaccggacaagaaagcctgctgcaaggtgtgccctcagatcatcgaacgcaccaaaccggttcgctcgggcaacccggacgaaatgggcgaccagggcagcagcagcggaacgctccgatctccccaagcgattctggagaacggcggctgcaagtacaatgggaacgtgtacgagaacggacaggacttccatccgatcctggcgtcgcacggcgagcagaagtgcgtcaagtgcacgtgcaaggacagcaaaatcaactgcgaacggaagcgatgcgcgcgcgcgttatgcaaccgtccgaaaaaggagaaaaacgccgccatcgacgagtgctgtcagtgtcagaaggcggtccggcatcagcacggccggagacgtcaaaatcaacagcaacagcacaacaacaaacagcagcaggcggccatatctgtaaagagttga

SEQ ID NO: 335 - DNA, 2139 bp, Aedes aegypti
atgccatacttgcagctaccggacggggctagcattatagtgcagaaggatgccaagggaacgatcacacacgccaacaagggcgtccggcggatgatcgtcgtgaacgatccatcgccagcagggcacaacgcagcgatttttatttcttttttctctcctctaacacacaaaatacttcacctaatcacggaaacggaaacactttgtatatacaccataaccccggaatttttacaaaactcaacacgaaaacaaccacacacatcatcagatcaatctaactccgctctagccaacggaatcatcgactcgaagaccaagaccatcctgaccacaggcgggaatgcggcgttcatgtctccactgggaccgattcagctgacggccgaagaatgcaacgatattctgatgaagcgagctgcagccgctgtcgctgccaacaatcaacatgccattacgaccaacaccaatgatcaccatgccggtatgtgcacggatgaatcaattgccgttcaagtgcagaaagttatccagggtttggaggaaaacgatgattcggaagccgcaaccactacgcatcagttgaagatagagccaacgttgagcatttctcccaaactagaagcgaatgagtatgtccacgactcggatacacctacgccaaatgtagtgcccaaagagcgtccctactcttgtgatcagtgcggaaagtccttcttgttgaagcatcatctcacaacacatgctcgtgtccatactggtgaacgaccccatgtgtgcgtgcactgtggcaaagatttcgcccacaagcattgtttgaacacccatctgttgctgcactcgacagaccgtccctaccagtgccaagaatgtaaaaagagcttcacgctgaagcatcatctgttgacacactcgcgggtccacagccgagagcgaccctttgtgtgccaagaatgtggtcgatcgttcccactgaagcgtcacctggtgacccacagcaagttccacgccggagagcgcccatacgtgtgcgaggactgtggcgaaagttttgcccaaaaggagcatctggtcatgcactcgcggttccacggttccttgaatccgtttgtttgcccggattgcggggctaccttccctcgtaaatttcaactggtgaaccatggtaaactgcacggacgtattccacattcgtgtaccctgtgcggaaaggagttcctccagaagcgaacattggccgctcacatgagcagggcggtaacaggtctctcagaaactccaaagacttctcgaatttattttccatggattaaaaaaacaaagttccatcagattatccacactttctcaaatggtccagaaatttcgaaacagacccttgcaggaaatcatcagctttatctcaaaaagtttcatcagggatggtatctttataaatttacttttggggtaatctttttttctatttggtctgtgtttttatgccaaagttcgccggaaacgtctccgcggcctcagtatgcctgtcgggagtgcggcagtgccttcaacagccgcgaagcacttgccctccatctgcgtctacacacgggcgataagagcttgatgacggatctttgcgcccttaccgctgctattcccggccatttgttcccagctgttaatcaaggtggcactaccgttgttagcgcaaatcctgtaatgtcatcatctcccgttccagtacaaattatcacctcctccggtcaggtggtacagcaaacgttacaaccacagagtccaccacaacagcaggttcaagtacagcatcaacagacacagcaacaggtccagcaccaacagactcagcaggtacaggtagtgcagcaaccggcgcaggttcagcaggtgcaacaccagcagacggttgtggtcgcccaggcgaaacccaaatcccactattgcggccattgcggcaaaggtttcgcggctaaacatggtctactgttgcacaatcggcgccatccagacggagcctgcaccgtgcggacacacgtttgcgaatgcggaaaggccttcttccagaaaaaccatctcatgctgcatcaacgccagcatctggagcaaaatcaacgaacgggtcagggccaggcgcag

SEQ ID NO: 336 - DNA, 1026 bp, Aedes aegypti
atgtacatcatctgcgacgcaaatgccacatcccacacctcaccgctccacaccccgaagtcaccggttaatcagctcaagtatccgagctatccgccatcgtccccgcagcacctgacccatcaacagccacagtaccagcagcctcagcagcagcagggtggttcctcaactgtggccttcagcgggggtcgtgccgttctgccccaaaaacaacaaccggctcgtcccgtaagcgccccatactatcaacagcaacagcagcagaaccgctactcttcgccatcaacggcttcactggcctcaccccgttcgccccatcccatcggtggtggtcaaagccctcgcggttgggcacacgttcaatcaccggttccggtgtaccgtccgacgcctcagcagcagcagcagaaccagtaccagcagcaaccgtacgtctcaccgccctttcaaacgcaaccagccccgtaccaacagcaacagcatcagcggccaacttccggcgccagtgctgggtacgggcacggttacggaccgagaaagcccgaaccatcaactcaacagccacagtatcaaccacaaccgacgcaagctttccaaccgctagtgtcttcacagcaacaacaacaacaactttatcagcagccagaggccatcccccaacaacaacaacaacaacatcaacagttttatcagacaactgcagcggacagtcaaattccattcgtgaccactctccgcaaagaagcaccaatgtcgcaggaaccatctcccgtctatcagagcgagcctgttgctgcaatctatcaaggcggtaccaatatgcgcggggatcagaaatggccaccggcggactacaagaagcaatctgatttggagaacgaagagcgccgaaagcttgcccagcagcctgccttccgcccacgcaaagtgcaaaaagattactccgactttttcgccaaaaacgccctcaacgcaacctatccaggctaccgggcaccacccggcactcagcaccattcgtaa

SEQ ID NO: 337 - DNA, 3095 bp, Aedes aegypti
atgataaagcctctgcagctgcgagccgtttctagtccatcactcacagagccaacgccaccggcgacggttctcagagaccagccggacgacagccatgtgaccaaaaccgcagattctcgaaatgtggccaaccacatccaccatcataatcaaccacagaccaagactgcattgctgagcgccaaccagaagaatctgcaccactcgcagcaagcttccgagagcgtgctgcaaaagttcaagaaaaccttttcccagttcaaaccggccaaaggagtgccaccagtgctggcgtccgccaacagtaatagcctaagcagtagcaccagtagtagcaatagcaatcacccgcatcatctgatagtgaacagcggaatgagcctggacggaagaagtcaggaacggccagttttgcctccacccccgccggtacagtctcagcaaacgagccaccatcatcggttcggtccgttgatatggcgatcgagcaaagagcggcggaaaaccaaatcgcaccggagggataagtgcaacagcggggactcgggcattcaggtcgaactggaggccgatgagcagctgctgcctgatgcgggaatcgatggaacggatcccatttcgcccaactccgtgacggttcggcgggccaactccgccaaagtgtccacctccggaggtccatcactgctcaagcacaaactatcgctcaaaggaagcaacaaggaaaacgtggccaacatatcacgcctaagtggcaaatcgcgcagtcagccctccggactggaccgactggccggcgatgaccacgacacgcgcctcagcgaaaccgacagtgacgacgaaaacgacgacggagtggatcaacgacgacacgacccccgtcgaggaatccgcgagtcggaaccggtctttgcggaagtcctgttctcgttccggcccgtgggacctcaggaactagccctagagaagggagcactggtggaagtgctaaggcgggaagctggtccctggtggtggggccgaatcaaatccgatgccattctgtccgacgagcgggaggaacaggaccgcaccgtggacaactccgactgcgggtggttcccgatggatttcgttaaactgttacctacgtacaataagccaaaacagatcatcatcatcaacaacagtagcaatagtgggctcgaagaagctggtattcagaacggggacatgggaaagaactgtgatatgctgcaagatggcgctgcgaccatgctgccaacggaactcgacggagcttcggcgccgaacgagccgatgggaggtgctagtcaggagcaaacgaaggagaacgtgatcaaggaactgctcgagacggaaatcaacttcgtcaagctgcttaattcgctttgcttaggatatatcaaacctctgagggaacgcgaggatgttttcccggcggagagtgtgaacattatcttctcgaatctggagaaaatttggaggtttcagcagacgtttctggatgcgcttcggatagcggtgcccgccaataggattggcgaagtgttccttgaatatcaatcggcatttatgatctactcggcgtattgtaactcctatccacgtgctctgatggaactggaaaactacaccaacaacaaggaggcgtgcaccatcctggagagctgtcgcgtgtcgcagaatctcccggagctgcccctgtcggcgcacctgttggcgccgatccagcgcatctgtcgctacccgttgcacctgagcgaactagtcaagcatacgccgacgcggaaggagctgctgccgctgctgaacctgcgcaagtgcaccaagtccgacctggaaaccatggactgccgggaggtgttcgagctggccctgaccgcgatgaagcgcgtgaccgagatggtcaatgaaggcaaacgccacagcgagtacctatcgcggatgcagtcccgcttcgagaatttccagggcccatcgatcaacgtgcacagcacccggctgttcctgcaaaccgacgccatccggatgactccgaacctttggaacaacacctacacgctgttcctgttcgaccgtcagctcatctactgcaagaaggatctcctcaagcggaccaactacatctacaagggccggatcttcctggacaactgccggatattgaacctcccggacgggaagatgttcggcgtaacgctgaagaatgcgttgcggttgtactgtgacacccggaacaagtggtttgatttctgcttccggagcagcagcagtaagctgcgcttcctgaacaccctctcggcggaacggcagttctgcggcgaaagtctgttcgtgtccgagctggatggggcgtgcgtagacgacgataacctgtcagatcgtgagtatttccccttcaatgacgaaaaggaaggatgcagcaatacggacacggaaaccagcaatggcgcagatttaacggacagtatgcagttccttttggggaatatgtcccaaagtgccaggaccagcaattgcagtgtgctcaaagaatctcccacgaatataggcggtaagcagtcgggaaataccctaccgaagaagtctcgaaaatcatccaaagaacaacagcaacagcagcaaccagtagaatacaattcgcactccctcggacgacgaaaactgggcaattggttccgcaaggccaagagtacgaatagcaccccgtcgcagagtccaactcatcatccgatggcgctttcgctagccgccgtcaaccacgtgggtgcgtcggatagctcttcggccagcagtccaggtctgggataccatcaccagcgaactctgtcggctttgtccaccggtaatggatccaacccctcctccttggccaaaggtaaatctaaagataacctcatgactcagtcgtccatcatatcgtcctgagggtacgagagcacgctgctctagttctaagttattcatccttcagtcgcaaggaaccaaacacacacacacacacacccaaacactcgagcattgtcacaccctcagaaccataagtgttgccaaataaaggaaggattttcacccagtttagtcaagtc

SEQ ID NO: 338 - DNA, 4343 bp, Aedes aegypti
atgacgcaatcgctaaaatcaggattgaaaccattcaaatgtccaatttgtgaaaagtgcttcacacagcaggcaaatatgttaaagcatcaactattgcataccgggcttaaaccttacaaatgtcccgtttgtcagaaagcattttcgcagcacgccaacatgatcaaacatcagatgctacacacaggtttgaagccttataagtgtccagtgtgccaaaaggccttcactcaacacgccaacatggttaaacatcagatgcttcataccggcttaaaaccttataaatgtcctgtatgtgacaaagcatttactcaacaagccaatatggttaaacatcagatgcttcatactggagtcaaaccgtacaaatgtccaacctgtggaaaagcttttgcccagcaggcgaacatgatgaagcatcagatgctccataccggactaaaaccatacaaatgtagcacgtgcggtaaagcgttcgcccaacaagccaacatggttaagcatcagatgcttcatactggtattaaaccgtacaagtgcagtacgtgtggtaaagcttttgcccagcaagcgaacatggtcaagcatcagatgcttcacactggagtgaaaccctacaaatgctcagtgtgcgacaaagcattcgcacagcaagccaatatggtcaagcatcagatgctgcacagcggaattaaaccatacaaatgtcccacttgtgacaaggcttttgcccagcaggctaacatggtcaagcaccaaatgctgcacactggtgaaaaaccattcaaatgcaagagctgtgataaagcattctcgcaacgtgccaatcttaagaagcatgagatggtgcatctcggaattcgtccgcacacatgtccactgtgctccaagtcgtactcgcaatattcgaatctgaagaaacatctgttggtccaccagaagcagtccatgaagcagcagcaacaaaatggccaggttatgatgattctgtacaattgtcaaacctgcaaaatgcagttcgagaatatcctcgaatttgaaaggcacaccaagcagtgcaatgagctgaacaatgggaaccatggccttaagctggaacagatcaacataaagagcgaaatcgatatggatggcagctctaatccgggaattgcccagcacatcaccatacctcacagtcaatcccagccacaaatgcacataccgtcggcgatactgacttcggtgatctcatctgcttcgacgataggtaacggtcataccttaagcacgagccacattcatcatcctacaaccggccaccagcaacatccacagcaacaacacactcctccagctgtgatcacacaacatcaacagcagcaacaacaacagcaacagcagcagcaacaacaacaacaacagcaacaatcggctgctcaccagcaacaacattctccagttggtcatcaacaccttacgctccagcagcagcacaatttacccatccatctccagcagcaactctcacatcacctgatatcctcacaccttccgcaccaggatcacgttacggcagacctccaccatcaggtaaacttccatcatccacatatctcccacatcccaaacctaccgcacaagatcctatccccattattccacatcccccccttcaacaacaaccacagtacataatggaacgcacggcggggatccccactgagtggggaatccccagaacaggctatagctaagagtccttccgcgtccgattctgctgctgctgacgactccgttgattgtaggacaccaacaacgccacctcaataatgcttgaccatgagcagcaaacagtaactctaatcaaaactagatacgacagccaaaatgcaacgttgatggcagtacactactataagaatactcagagagtattactgataaaaaaaaacacggcaatgaatatgttgaaacagttctactattattaggattctagtgagtaaaaaaggaaactactgcgaacgttgcagtagattaacgcaaaggctttctctaactgattttttttactattgaatagtacgaaaggcacaacacggttcagttgttgatgcagttgaagttgactaggaatgtaaggaacacaaagagggaattctgattgttgataagcatagcatgttacttatatttgcgtggtagtggtcgtcccgtgcgaacccatgtcacactgtttcgttttcttcttacaacactacactgtgtgtgctgtaaaggatcgtgaaagatgattaggcgcgcccattttttgggagtgagtctctgttatagaagctgatatatagatggaagtacgaaacaaagaaggatcattagttagaatattgaaaagtcgataaggcgaaaagatgagagaccaagataataaagtgaaaggattgtgattacgaaagtcgtgaagttttcgtattcgttcagcaacctgatgtgatatttttccgggacatgagcagggtttctcccgacagcacactgcgacggatgaagaatggttaatctaagaaaagggaaaaaaggactaacgaatgaggaatgatatatcgatgtgtcacttgtttggttttgaaacgattttttattgctttttgtttatgatgattgtagtaggaaaacaccatttagaatcatggttgagcatcgaagaatttacaatgctattaggtttttcgataattagaaaagcatatgtaacgttttattaaggtaaaacagcttagaaaccaaatacaataatgtgccaaaacttcaaaggcactcatatcgcgaaagatgcatcaaatcgcagtgcaatttctattttagctttttacattgggagaaaataaaagatgacttcgtacgttaattatctttacttttacaacggcattattatttgcccgaggtttcgacacgttgtcgtttacccctttaggaagtcgcaattcccatgtcgaaacgtcgagcaaacaataaggctgttaaaaaaaataaaagcagcttagtcaagaaagttacttgatagctttttattttttatggaatgaccaatgctgaaaactatttgttccaattggtattgaatgcttactaaacagtcattgttcagctcccacgaacagtttgaaatgtcgaagaatggctcaaaaccgataaatgaacttattggcggatctatttatttatttgatttatcaaacgggcccactagacccatatactctttgattcagtatagattaacacgattgtagacgcataggtttgccagtacagagatttgcttactaactttcgtcactaagtaccatgcccacacagttacggatcacccacagtgacggatcactttggcgttcaacatcggataactcgctcaaaacataaacgttggcgtaaaacatatttttcccatgttatactatttgtcttccaccatttgtaatgttgagcacaacattcaaccgctaaataacggtgtttttggcaaatgtttagttggtaccacacagctatcattatatggtcgttttctgtaagaagtgccgtcagcattcataagctcccacaggtggtaaaattcaaatgttatagcatgttttatgctcgttcgcttcgatttagtataaattcatctttggaaaacattttacttgaatttttattcaaaataccgaatattagcacttctaactagtgatccataatatggaccaggaaatgattgtttaccacggttatggatcacttccaaagaatgtagatttctgctattttatgcattggattcgacatttttagacaacagcactaaggataaaaaaaggcttgtaaatttcaaattttagcagacaaaaatgggtggaaaacttggtgtggagcggaaacagttcatgtctcagttactacaatgcagtatcacaaaaaaagggcattttacccttgtttccagctctaacactgctattttttgcagtaatatatgacacattgttaactttcgccataccatgcaatacagatgcattgagttgaaaatatcttgattttgcgcactgatccgtaatatgtcacaatttgatccataatatgaaaattgatccataatatggttttcaggaaccgacacaatttttaatttttatgcaatcctatgtaaatattacactcaaaacagtttactaaccgaagttccaatttgaaacgattcgattcgtgcttttaaattacaattttacgttttccatgtcgttttattgaattttataggttggactccacactatttgatccataactgtggggtcatggta

SEQ ID NO: 339 - DNA, 1604 bp, Aedes aegypti
tccggatagcggaagttcagattgaagaggacgacggtttaccccaatcggtgtgcagtacgtgtttcacggacctaggaaagctggaacggattatgcaaaagtgtagagaatccgaccagcacttccgggcaaatgtcgaaagcttgaaagaggacttggtggaatccgttgaaatggtggaaataattgaagacgattcggcttacgtggagtatgtcagcgaagatgacacttctcagccggtagaaatagtcggtaccccatcctgtgtggacgacctgatcatcgtggacccgatggcgcaagtggccgagagccaggaagccaattacacccaatgctgtggatgcgtgcagagttttacgacccacgaggaactgctgaggcactcgcagctttaccacaaatcggaacgcggcatctgtggcccagtgccggacaacttgatagagtgccgggtgtgctacaaaatgttctccgggattctctatctggattccatgcatcggttgaatgccttcaaagaccgcctgagttcggttggcttccctgaagagatgcagtgctgctcgtgcgaaactatgtgcttcagtagtgaggaaatggttctccattcacaagagcatgccggggaccggacggaacacgacccggccaagccgttcgaatgtgaaatctgcttcaagcggtacaacaagaaacagaccttgaacttccaccagaagttcggttacagttacaagaagcaaatgaccaccagaagccgaggctgtcgcgccatcaggaagcgtaccgaaatcgaaagctccggggacagccggaaatgctgcggatgttcggcggagttcacttctgccgactcgttgaaacagcactcccagatgcaccatgagttgtatcgtcgtcaatccgatccaagcaatgctccattcgaatgcgaagtatgtttcaaacgattccccactcaaattaagctggagcagcatcggttggttccctacaccctgatgcacaagtgtcccgaatgtgataaatccttccgctccaaatcggtcctcaccaagcacctggcgagtcacgagctaccaaaaatcgttccctcacgatctcccacaatctcagaacctgctcagtgcgaagaatgcggccaattgcttccaaacgcctacagacttcgcgcccacatgaaatcgtcccactcctcggagaaacccttcagctgcagtttatgttcccgtcgcttcaagtggaagcacagccttcagaaccacctgcgggtgcacaccaaggagcagccctacgcatgtactcactgcccgaggaccttcgcgcagctggcggacaaaagcagacacgagctgacacacagccagaactatccattgcggtgttccatctgtgggaaaggattccccgccgggaggaggaaactgctggagaagcatcaccaactgcatcagcgaggcgaggagtatccgtacacgtgccagttttgcgaccgaacctttacccggctgccgcagcgaaatcggcaccaggcgaggcacgttgccgagcggaacagaaacatggcaatggtggtgcatgtcgatgcggtttag

SEQ ID NO: 340 - DNA, 1999 bp, Aedes aegypti
atggcaccggctaagaaagctgccggcggcggaggacgcaaaaaagccgccaacggttatcagatgcccgagccggttcctccggggacagtgctaaccgacatggccaaacgacaatggaaggttggaccttcgatcggaagcggcggatttggtgaaatttattgtgcttgtgaagtcggttccggcgtgaagaagccggacgattatccgtatgttgtcaaaattgaaccgcatggcaatggacccttgttcgtggagatgcacttctacatgcgcaatgccaagcaggaggacattgaaaaatttaggaaaggtcacggcttgaaacacttgggaatgcctcactttgtcggtaatggatctcacgagttgaaaaatctaaaacatcgattcctggtgatgccccgatacagcaccgatctgtggggtatatttctgaagaacgaaaagcgatttccgttgcacacagtttatcgcatagcccttcaaatgatcgatgtcatggagtacattcacgattgcacctacgttcacgcagatttaaaaggagcgaacattttgcttggttttggaaagacggctagcaagcagcagttgttcctggttgatttcggactggcaagtcactataccaacaaagacttcaagccggatccgaagaaaatgcacaacggtacaattgagtatacttcccgtgatgcccatcagggagttccgaccatgcgaggagatatggaaatcttggcgtacaacgttgttcagtgggctggcactttgctgccctgggaggctgagaaactcttggccaatcccgttaaagttcaggaatcgaaggaaaagcacatgaaggatgttggtggtttcatgaagtattgcttcaaaaaggacattcctaagcctataaacgaatatgtaaaatacgttgcaaccctgaagtacaacgataaaccagattattcaaaatgcaggaagttcttcgaagctggtctcaaggaattgggaaaatcaaattcaggagacttggaattcgaagcaaaaccatcgaaagctgcaacacctgccaagaagagaattgctgaaccggactctacagaatcatcgggtccgatggctcgaccacgcggtcgaccaccaaaggtcatcagcacaagtcccgatacgacatctaaagacgaaccgcccgccaaacgaaagcaggaaacgccctccaaacctgtacagaagaagaaaaagcccactgtcgaggaatcccccgcgcccattgtcaatggacacacgtctacaccgtcgtcggaagtggtatccgctaagctgtccgcccaagaacaaaccggatcgattcgattgaatacgaaggtcggtggaggcacacccaaagctggcagcaaggttaagaaaacctacgccttcaactttgaactggacgtcagcattgacgcggatgtgatcgtcaatgttcgacgaaagaagaaggctcccacagaatcacctgccttggaatcgatagaaccgtcaccggcaacacgaaggaaatctccctcgaaatcgccttcgccggccgttttgccgaagcgatcccggcgacagaatgcctccatccaggaagagaacagcatcatatcgctgaacactaccgagggagatcagtcctcggtgcacccggacgacgacaccattccgaacagtgaccccaacacgccggaaccgcgctatctggcatcccggtcgattgtgaacacaccacaacggaaggtggccgcagctgtggggcgctccaatgctcgtctaggcgaggcaccagcccgcgccggggagtacaaaggcaagaaggccaaatcgtaagctaggtatgcaagtatttcagtgtactaactgtccattctaattttctttgaatctactatcttctttacgtatttagtgttccacatgttgataatcagtttcgattaataaatttagctaacgtgactgctctctccgtctgcgggtaccc

SEQ ID NO: 341 - DNA, 3258 bp, Aedes aegypti
atgcgtgaagccttgttcagccaggatggatggggttgccagcacgttaaccaagatacccagtgggatgtaccagcctcacctgaacctgccaataaagatgctttgaaaatgaatatcaacaacggaacagaactatgggaaacgaatcttcgcaacggtggccaaccaactcaacaaccaacgcagaaaaccccctggggaccatcgaacaacattggtggtacatggggagtcgatgatgatagcaatgccgaaaacaatagtgtttggaccggtggagccactggtggtgcaaaccctccagttgctggacaacagggttggaatcaaaataataacgccatgtggccaccaaatgttgcgaatgcaccacccaagaaagaacctgaatggagcggcaatgttccagtaccgggaggagctaacaactgggagaatcgtggaacagctgctccacctccaccacatatcccagctccaccactagatatgcccaatgtcgacatgcgtaatatgcgcccaccgggtgctattgaacctagccgtgaattccgtggagacccaagaggtatttcaggccgtttgaatggttcatccggtatgtgggatcagcatccaatgcctaatgctccgctcaacaagatgccacctcaagcacctatgttgaatgctgcgggaggtaaccaatggccggtaggagctggtggccctcaaaatgtaccgccatctaaactaccaacatcatgggatgaagcatcaccccctgctagtcgtcgtaatatgtccaatttggatgatgggacctccctctggggagccccaactaatcccaatcgtcctaatgggcctaatgatggtatggtacgtaatggaagaaatccactcggaggtaactctggtccgattgggccaggaggaattggtggaccaagactcagtggtcctggtaatcccatgaaatcagacatgtggggtcatggaggacccggcgcaatgcgaaatggttcgtgggatgataacagtaataattgggaagacaagggtccagggccacttggaggcggtggtggtggtaatgctggtggcgctgggggatctacttggaatgatggacctggaaatccatcgacatggaacaacaaaaaaccaattgttcctggtggaaatgtatggccggagacttcggatctcatcggaggtgactggggtgccggcatcggcgttggtaaaccaccaaataagcacaatccacaggagataattcgtagcagcaagcagttccgtatcctctatgaaatgggcttcaagaaggaagatatcgaacaagctcttcgcacgtccaatatgagtttggaggaagccatggaaatgctgcaacgcaacaacggtaacaatatgcccgattggcgtcgtcacgatgaccatcctggaggattcgagccaccattctcgggtggacgtttccccggtggtggtgctgggccatctctaccgttccctcagaatcaaaatgggcccaacaacaatatgccagctggaatgggcagtggaaatccgaatcttgcaggtttgaatgcactgagcaaaccattgcaaagctatctcaaccaagcaccaccatccggtcctggcccattcaaccaaggaggtccaaatggcggagttggaggaggggcagccggcattcttggtggcgctggggctggccaaaactcatcagctcaaccctcgacgcaacagttgcgtatgttggttcagcaaattcaaatggcagttcaagcgggatatttgaatcatcaaatcctcaatcaaccgttggcaccacaaacgctattcttactcaatcagttgctgaataacatcaagcaacttcaagtgacgcagaataatctacagcgaggtggtggtggcggtaacaatcagatgtcaatgattccaaaaataaagcaacagattgctggactacaaaaccaaattgctactcaacaagcaatttatgtaaaacaacaacagcagcaacagcattctggaaacacctctaatattaatcacttggcaaacaacttccatcgtgaacagaacgatttgaccacacttcaaaatagtttatccgaaatgggattaggaaaggatcataatggcggtggcggtggcggtggtaacagcggtggctcaactagtcaacagtctcgactgaatcagtggaagttgccggctgtggacaaagatgcaggtcatgatttgactgatttctctcgtgcacctggaaccacagcgaaatctacactctctactaccgggtcaagcatcagcggtttgagtggtttacaaggagacaacacatggtccacgggccgcggaggtattggcgatggctggccagactcctcgaccgaaaccggaaacaaagattggcccgctactcaagatacattcactgatctggttcctgaattcgagccgggaaagccatggaagggtacccaaatgaaaatcgaagaggatccaactattacaccgggaagcattgctcgcagtccaattgcgtccatttcgattggatcggccaaggattcagacttgtttgccaatagtagcaagccatctccaactgattccatcagcttgtcctcctctacttggagtttcaatcctggtaacaacaatttctccagctccatttccaaactgggtggcaacaaaaatacatggtctgatgccggggcctcggatttgtggggaaccggtttgggtagcggcacagctggtggtaaaacgccacgtggtcccccaccgggtttatctgctggtaagaatccaggaggattcgggtcaaatggctggaatcaacgtccgggaccaggaggcaacaattggccaaccggcggcggcggtggtggtggtccaggctggtattcaacatggattttgttgaaaaatttgactactcagatcgatggaccaactcttcgcacgctatgcatgcagcatggaccattgcaaaatttccacttatatttgaaccatggaattgcattgtgcaagtatcaatcccgagaggaggccaacaaggcccaacaggcactcaacaactgcgtattgggaaatacgaccatttgtgctgaatctcccacagagagcgaagttcaaactattctacagcaccttggagttccagggggaaacaacaacaataataataacaacaatggcaacatgggctctgctggtgggcttggtaataacaacaattcc

SEQ ID NO: 342 - DNA, 2568 bp, Aedes aegypti
atggctccaaatagcctcctgggatgggatatcaccctaggtcgcctcagcgtacttgatcacgtcgccggcctcactacgtgggatgtcttccgttcaacgctttcggaagaccagctggccacactcggattgttaatttcttcactgttgaaactattatggttggcgctatttgtgacgggtgtggttcgtgcaacgagtaaactcggacctgatggatatcaagattcaaagcctagtactccttcaaatattggagagcacatctgcatagctggaggagtgtggcctaattgcgcatcacctaccacaccgataccagtaactccgaaacccacgactccagcgccaatcgctacatcacctaagcctagttgttcaaatggaggatttggacctaactgcgtgctacccacaagaccacctccaccgcagataagttgcgcaaatggagcaataccaccattctgttgtaataatggaggagttggaccggaatgcgagattcctggcccattgggaccaccatcgataagctgtgctaatggaggagttccaccgttctgttgtgagaatggtagggtaggtccagactgtgaaatcgcgttcccaattgcgtgtgacaatggaggtgttccaccatactgttgtacaaatggtggatttggacccaactgtaacattaagcaaccaacatcaccttctccagtgtccattccagaacctttgcaaacctgttctaacggtggaatcccacctaattgtgagattccaaggcccccgtcctgttctaatggaggaattcttccatattgctgtaccaatggaggtagtggaccaggctgtgaaataccaacacctccagcttgcccttacggtggagtacctccgttttgctgtactaatggtggacaaggtcctttctgcttaatcgtacaaccagccatcgaatatggtccagcagttgaagtgatttatcaccctcctagccatggaacttcatctgtagatagctcttacttctatccagcgccttgtccttacggaggcattccaccttattgttgcgcaaatggcggaattggtccgtactgcgaagttccagttcaacagataggctgttctaatggaggccaacctccatattgctgcaccaatggtggagttggtcctgattgttttattccacaacctcaaccaccagttcaacaaataggatgctccaatggaggacagcttccttattgttgcaccaatgggggtgatggtccagactgttccatttctcaaaatccaattcaaccaatcggatgttctaacggtggacagcttccgtactgttgcaccaacggaggtgacggtccaacctgcactattgctcagccatcctgttctaatggaggacaactgccgtattgctgcacgaatggaggtgtaggacaaaactgtaatcttccaactactcctaaaccaactacaacaacccgtagaacaacgaccacaaccaggcgtacgacaacgcgcccgcaaaccaccaccactcgccgaacaacgtcaactactcggactacaactagggcaccgacaaccactacgcggagaacaacgactactactcgccggccaacaaccaccacccgtagaataactacaacgacccgtcgaccaacgactacaactcgtcgtccaacaaccacaacccggagatctacgactacccgttctccctcggtttgtcctttcggtggcagccctccattctgctgcaccaacggaggtctaggtccaacatgttacgtaccaaccgatcgaccaaacactagtcctcgcccaacgatcataaccacacgccgaaccactcctacaactcgtcggacgccaccaactactcgcagaactacgccaactactcggcgaaccacaacgactactcgacggccaacgcccacgaaaccagtttgtccattcggtggaatccctccgtattgttgtaccaatggtggacaaggacctaactgtgccgtcccaactagacctccaactagaccgccaactcggccaccaacatgtccagccggaggaatacctccatactgttgcactaatgggggacaaggacctaactgtgccgtcccaactagacctccaactcgaccaccaacttgcccaggaggaggagttcctccgtactgttgcaccaatggcggacaaggacctagttgtgttgtaccaaccagaccgccaactagaccgccaactagaccgccaactagaccaccaacgcgacctccaactaggccccctacctgtccagctggaggaatccctccttactgctgcaccaacggtggacaaggtccgaattgtgtagtccctactaaacctccaacctgccctgccggaggagttcctccatattgctgtacgaatggaggacagggtccgaactgtgccatctccaaaccctcacctcctacggtgccaggatatctcccaccagacagcagcaatcctgtcccaagtggttacaagtacgacgtcggtgatccaccgtttgcaacctaa

SEQ ID NO: 343 - DNA, 1881 bp, Aedes aegypti
ccctaactgcgttttcgtactgtttgttacgaaaatcttgtgtaactttgtttcacagtgataacataacgcaggcacgaaaaacatcattgaaattgatgattgtttatgtttgcggccttgacttgacagtgccagctactgattgaaaaaataaacaccctcatccaatcttgtttcattcacgcaaaattttcattcaatattttaatggtttttcaaatcaaaaaccatcacaatgagcggcagccaagacttgaacgattcaattcgaatatacaatgagcagcttgcccaggtggaacaagctttggagggcacaagctctggcccagaacgggaatctttgattaatttgaaaagtgatctcgaggagctggtgaagctcactctcgaaacggtccagcacgagaatggagatgacttgaatgccgcagcttccggcagcaacgaagacgatgagttcgctctgttcatgcgggaaataaatgcattggatgacccagggagtgtagatgcaaagcctcccaaaccggatgaagtcagcgtggatgaacaagaaccgttcaaagatctggtcggtagtaagtgctccgctccgcatatccataagtggggatcgaagtcctatcacaatgctttgatatgcagtttggatgcttctgatctggatgatgttgcagccaaggtgctgttcatcaatccgacccatcaggagatggttccgtgcgcctatttcttggaaggagactgcaaattcaacgatgaaatgtgccgcttctcgcatggtgaactaatctctatcaacgaactcaaagagtatcgcgaaccgagatttgaactgctgaggaagaaaggttgtaaagttttggccaagaacagaaatcgcatttggagtaaagggacgattcagacagcggattttgaaactaaaacgtgcaagatacaaatggatgaaggccggcacgaggttgaattgcaatttgagaacgtgctaccattagagggcgatgatgtgcccagttctgattcggagtcaaattcagatagtgatgaggaaaacgaggacgatgttgtctcacttcaacaggcacaaattatcgagcgaagtcttttgaatcccgctcctgaccaacggttgggggattgggaaaagcatactaaaggtataggctcgaaaatcatgcttaaaatgggctatgtagtcggagccggtctcggaagcaaaggcgaaggaattgtagtgcccgtgagtgcacaggtacttccccaaggcagatcgctggactattgtatgcaacttcgggaacaggccaatggagacaagaatttattcagcgttgaaaagaagcttcaacgggagaagaggattcaagagaaaagggatgcaaagaactatgctgcaaataaaagcaaaaaggacgtgttcaacttcctcaacagtgaaatttttggttccagcaatggttcctcaagttcatcgggaagtaagaaacccgcagcgaaagacaaccagatggacctacccagctgttcatcgaagaatttgaacatcgccagtctgaagctctccgagcagatgcgaaggctggagttagatatagaccggttgtctcattccctgacgcgtcatcagccgggatcaaagatgcattcaaatctacagaagcagatcgcagagaaacggcgggagatttctgaaatcaaaaagaccgaatattcaatctcccgagagcaacagttacgaaatgataaacgtaaaatgacagtattttaggaatggaataaaacaatgcaatgcataactgagataagaaaagggagatgttacttgttggtgatgacatacattttgaactcgactctatagatcaggcttgt

SEQ ID NO: 344 - DNA, 4631 bp, Aedes aegypti
gttctattcaagagaagaaaacagaaaaatcgaaaattgattgaaactccgtaatgttattacaaattgaatttggggtcaattgcacagacagcaggctaaatagggaaaccctaagaatgtgttatgatttgctgacatcttcttcgcgcatccttaagagctcacagtgaagcaatcgaaagaatatgatatgaagcgcttccgagccggccacatgctgataggcacacacatagtgtaaatcataactctacgggattccccagcgcttgataggattacagtccaaaagtaacttccagcgttacagcttgattatttttctcactctgtagactgatctcgacctgttcgctgtcagtaattcaagagtgcgaatgaaaacattaccgtagtgaaatgataatgaagagtgttatcgttctggtgtgtagtttaatagtcgtggcaaaatgtcagagctcgagtgtgctggtcatcggtccaaagtacatcagaccaaggcatccgttcaacgtggcctttgccaattcgctcaattcaaatgtgaacctcaaactaaccttgcaatgtgacggcgataatggatttgtgaagaatgcatcgctacggctcaattatcagtcggcaaaatccttcagttttgatgtcccaaatatcaccagcgggactgattgtaccttttccgctgtcaacgacggtggtagtgtaatggtggaccatatggcgaatttactgttgccagcaaagacactatctgtgttcattatcactgataaacctgtctacaaaccaggcgatatcctccgatttcgagtggtggtggtcgatatcggtacaaaaccggtaaaacatatggagagtatcgtgatcgaaataatagacagcgacggcgcatttaagagggagtggttgcaagctaggcttttcaacggagtattcgaagccgcatatcggttgccgtcagttccggccttgggcatatggaatattacagcgacggccaatgataatggtttcgaaaacacgaaagttcaagattttgaagttcgagaatacgtcattccaaaagttgtcctcaaagtagtaccttcacgcactctgctgatcgctgagaaagagatcagcttagacgttaaagcgcactacacattcggagagccagttgaagggaaacttcgagtggatctgttcacaaatccattatttcgtagagccacgcatagcgttgaaaaatctttcaacacgaatgcccagatcaagttcaaattggacagggaattggctttaagggatgcaaatttttgtatggtgtctgccaacgtttcgctgacggaaaaattatcaaatgtaacaacggttgttaccttggaatttcccgtatttcgacacccgtacaaaatcgagctgataaatcccgccatgaactatcggcctggtgtaggctatacttgcaaactatctgtcaaagatcattttggaattccagtggacgcacaaggtaatagcataacggtccaatctgatacggacagtgttactggacaattggaccgtcaaggaatggcaactctaacgcttccgatgccagatagtgaggagacggtattaatatcggttgtatatgaaaatgttgaatataataagattatagaagtcgaagcctcggaagatctatcaacacaatacttgcacatttccacaaaaactagaattattgtcggcaatagcattacgtttaccgtcaactccaatcaacatttcacgcatatgtcctactttgtcacaaactggggaggaattctgtttgccggacatcagaagttcagcaggaagaaaactaacacgatcagattcaaactaacagccgcaatgagtccatactctaggctgcttgtctacaccatcagcggaggccaattgatcatggactatttcgaattggatttcgagttcttcggtaatgagtttgagttcatgctagatgatgcaaactaccgaccggatcaggacatttacgttgacgtcaaggcggagaagaattcctatttggcttttcaggcaatcgaccaaggtgcccttctactgggatttgacgaatttggactcacgaggaaacaagtgcaggaagatttagcatcgtacgttgacgccgatgaagagaatcggctcgaccttattcattcgttcggtcttttcttaagaagtagtttaaatgaaaccaaaacccaatcgtcacgtgccaagcgatttgctcccgaaagacgagatcggccatatagaaatgccatacgtctgaggactgatttttcggaatcatggttctggaaaaacagcaccatgaagaaccaaaaaacgcaaacgttccatgacgtggtgccagattctattacctcctggtacgtgaccggattcgccctgagccctaccctgggtttgggactgatgcatgctccccggaagttcacggttacgaaaccgttctacatggttgccaatctaccgtactcgataaagcgaggtgaagtagtccggatacagataatgttattcaacttcctgaactcggacttgacgacagacgtcacactgttcaacaaaaacgacgagatcgatttcgtggatcgactttcgaacaacccacattttcgcacgaaggccatcatagcaccgcacaaccaggtaaaatccgtttcatttttgataaaagccaaaaagttgggggaaatcgcgatcaagatcgaagccgtcaaccaattggagtcggatgggcttgagcacatgcttcgtgtcactccggagagtcggttgtatgagaaaacggaggcaagattcattgatctccctactagaaataaaactaactttccgatcacctgcaacattccacgggacgctgatccaggatcgaccaaaatcgaagttttaatagaccctccacttatgggatttttagcacgaaatacaacagattcattgttaaaaattcccaccggtgcttccaatttgaacctactgacttttgttcccaatattgtcttgttggaatatctcaaagaaaccggtaaggttacacctagtattgaaaaagcaagaaattatgtttccagtggatataaaaaccagttaaaatacaaacactcgaacggggcgtttggtcaatggaacccaccaacagggaatccaagcgtatttctgacagcattggtggccaatgctcttgccacggcatccaaacacatcgacatcgataaaaaaatcgtcgagcaagcctactcatggatatctggaaaacagaaaccaaacggatgcttcgaagacgacggcgaagttatctacacacctttgcagaacaactcgtcatcctttgcactcacggcgttcatagtgtctgcgatcatggaaaacgaaaatatcgccagtcagtttgctgcagtcgtacagaaagcaacaaactgtttagccggaaactttgattccctcaacaacatgcatgatattgctttggcaacctacgccctagcattggtacgacatgaaaaacgacagatctatctcgatagacttattagagattccatattcgagaaaggcagtagcacggaacgatattggaacgaagagctgaatgttgaaattgctgcgtacgcacttctgagttacctgcaaattggtaacgtcattgataccatgcccatcatgacatggttgaataagcaaagatattccacaggagtgttttctggagttcaaaggacgtttgtcgcacttaaagcacttggaaaaatggctacgtatcttaacacgagtaaaaatgactacagcgtctatatctcatatgacaaacacaaatcaaaattcgatgttttaagtacgaaaagcctggatacatttcatcatgaattgcctgatagtgtgcgtaatgttaattttgctgtcgagggcattggttttggttatttacaattgacataccagtatcatagaaacattcaaaacgccaaagcaagctttatgctcgatgtaactgttctcgatagcagcaattacaatgttcaagacttgcgagtttgcttaagttataagccgaaggaaaaatatactgtatccggagtagcattggttgaagtttatcttccgagtgggctgattgtgaaggaatctactgttcgcgacattagccggaaaatacagagaactgaacgtgctttcgacaatactgccatgtttgtgtacttcaacggattggacacaaattcggtatgcttcgacattactgctcaccgaaagttcaagattgcaatgcatcggccgtcttatgttgtcgtgtatgacaccaatgatatgagtggcttcgctataaaatcctacgaaggcaaagtcctccagatatgcgatatttgtgacgatgaggattgcagatcgatgagctgttagtcattggaatagagctgtgcgctaccgccaatgcattttgttgaacgctgactctaggcaatatatcggaggtgcgataaacaacacgccgccgattttgacgcaaaattatgattcagcaaaagaaaaaaatatttacaattatttgtacagaaaagcttcaaaatatatgttcaaaagtttatacatat

SEQ ID NO: 345 - DNA, 1563 bp, Aedes aegypti
atgcatggccgaggaaatcgattatgtgctaaactatccagcgccttcctgagaaagtggtggtttgtgatagcattcgctttgggtctgctagtactcggagttctagtcacatttggatttaccacgctagttagagcagtaattaatcatcaagtagcgctaaggaaaggaggacaatctttcggatggtggtcaaaaccacctgtggagcccattatacgaatatttgtatataatgtcaccaatgcggatgagtttttgaacaacggtaccaaaccagttctagacgagctgggtccttatgtatatgtgcaaacatgggagaaagttaacatagttgaaaatcccaatggcacaattagttacaaccagaagcgagtgtatattttcgacgaagagcaatcggaaggtacagaggatgatgtggttatagtgccaaatattccaatgctcagtgctacatcgcaaagcaaacatgctgcaaggtttttgaggcttgcaatggctagtatcatggatattttgaaaatcaaaccatttgtcgaagtttccgttggacaacttttgtggggttacgaagatcccctgctgaaactagccaaggatgttgttccaaaagaacaaaaattaccgtatgaagaatttggccttatgtacggtaaaaatagtacatcaaaggacagagtaactatttggtcaggcgtcgacgacattactaagtatggtataatcgacaaatacaatggcaggtctcatcaaacccattggctctccgaacaatgcaaccgtctcaacggtactgatgggtctattttcccaccccacataacgaaaaacacgacattgcatgtatacgaaaaagatctttgccgtctattaccactatcctttgagaaagaggtgactgtaagaaatggcgtacagggataccgcttcagccccgcacctgatgtattcgcttcagtagatattaacaaggacaacatgtgctactgtcctgcaggaccaccttgtgcaccgaatggaatgttcaatgtttcactttgtcaatacgattcacctattttgcttagtttccctcatttttatctggccgaccagtctttgcgaaacgctgtcgagggaatatcaccaccagagaaggagaaacatcaactgttcatcgatgtgcaaccggaaatgggtacagcgctgcgagcaagagcaagaattcaaataaatcttgccgttagtcaggtggttgacataaaacaggtggctaatttcccagacatcgtcttccccattctgtggttcgaagaaggcattgattcgctacctgatccaatactggatttaatgaaggtggctacgaccgtcccaccaaaagccaaatttgttcttacaatagcattatttgccattggaggctttctgttcgtgatagcagtgttttgccttgtacgaaaatcacaccggcagagcacgcttcatctagaaggttcaaactatctagcgacagcatcaatagatcaagccaaaaagaaagctaaacttgaaaatggaagtcacaccaattga

SEQ ID NO: 346 - DNA, 462 bp, Aedes aegypti
atgccggctaaagcagtttgtgttctgagcggcgatgtcaagggcaccatctttttccagcaaaatggagattcggatccggtgaaggttactggcgaagtgaccggactgaagccgggcaaccatggattccacatccacgagttcggtgacaacaccaacggatgcacctcggctggaccgcacttcaacccgcacggcaaggagcacggtggccccgatgccgccgaaagacacgccggagacttgggcaacgttgtcgccgatggcagcggagtcgccaaggtcgatatctccgacagccagatttccttgtccggaccgctgagcatcctgggacgcactgtggtcgttcatgccgatcctgatgatttgggcctgggtggacacgaattgagcaagtctaccgggaacgccggtgctcgtcttgcttgcggtgtcattgggatttgcaaagcataa

SEQ ID NO: 347 - DNA, 1149 bp, Aedes aegypti
atgtatccatcaaaaggaggagcgtcgtcagctggaggtttcacgcacctttccctttcagagggtcaaaataagcaggacaaattttccaccgacagcggagcgatagactcgggcttccattccgggcagaacttcagctcggacaatctgttcagctcgtcttcgtcggcgtcagtgcaaccggaagaagctccggtgcaagcgctgtaccaatccggtagccagaaacaacccctggaggaagacagccgcaccttcgattccggtgtggatctagactcgagtcaacagaacccgagcagcgccgatccgatgaaggtggacgacctgtgcatcagcctgcgccaaatgcagatgaagtccaaggagcaacaacaggcgctgcatttgatgaaatgggaaaagtacttccaccagaacgacgacggtgatacttacctacaccttgccgtgatccacgaggctaccgaagcggtctataatttgattcacgcggcaccgcggccctggctggacattcaaaatgacattggccagacgccgctgcacctttcggtgctgacgggccagccgaaaatcgttcgccggctgatggtggccggtgccaagaccggaatccgtgacgtcgaaggcaacacaccgctgcacctggcctgcctacaccagaggactgactgcgcaaaagaactcctgaacccgctgagtcaagatctggaacagtggaactacaatggaaaacgatgtgttcacattgctgccgagacgtccaacattgaaattcttcggtctttggtcagcgctggagccgatatcaactcccgggaaggaaaatccggccagacaccgctccacattgccatcgagtacaacaacgaacagttggtgaacttcctgctggacgagtgccccaagctgcgactcgagcaggtgacctatgccggcctgaccgcctaccagctggccgccatccaacacaaccagaccctactaaccgggctgaaaagccacggtgcggaacccctgacaccccccgagagcgactacgaggaagaggacagcgaagaagacgaacagatgtcatcgtattacggatccaatgcatttggtgccactttccctggcctttccaccatcaatgttgcgtga

SEQ ID NO: 348 - DNA, 1992 bp, Aedes aegypti
atgcgtaggaatgccgacaaagaatttctggtgaagcagaaattcttcttcgaagtgttccgcaatatccatctgcctctcatgttcgaggagtacatgccatacaccaagacatgggttttcgatgaaactaagtacacgaactacaaggaagtcgtcgagttcttcgactactacaagcttggattcctgccgaagggtgagatgttcaccatctacaacaaggagtacatgaagcagacttatctgttgttcaactttttctacaatgctgccgactgggaaactttctacaagaacgttatttgggctcgcgagaacgtcaacgagggcatgttcatctatgcagtgacaatggcgaccttccaccgtccagacctcaagggcattgtattgccagccatctacgaaatctatccctactatttcttcaacaccgacatgatccacaaggcaatgtacaagacgatgtatgagcccaaattcggatttgctagcaacggtaaatacaacgtagtctactccaacttcaccgctgtgtatccgatggactatttcggcgaagataagctgagctactttgaagactttggtctgaacgcttactactactacttcatgctggactatccattcttcgtcggagacagcaaattcaacctgttcaaggatcgccgtggagagttgtacttgtacatgtaccagcagctcattgcccgttactatctggaacgtcaagccaatttcatgggaccgatcgaagagtttagctgggatcaaccaatcaagaccggatacacaccaaagatcagctactggaatggaatgcctttctatggacgcaacgactattactctctccccaaggatcaatactacaagattgacctgctcaaggactacgaagcaagaatcagacaagttatcgaccagggatacctgtatctagatgatggaaccaagattgacttccgccagcccgaatccattgactaccttggaaatctgattaacgccaacccagacagctacgatacagattactacaagtacattgaattcttcgctcgtctcatgtacagtggctctgactatttctacagcggatcgaaggtctggccaagcgctttgatgcacttcgagacatccatgcgtgatccattcttctatcagctgtactacagaattctgagctactactggcagttcaagagctacttgccatactacaccttcgatcaacttaacttcaagggattcgagatcaagaatgtcgttttcgacaaactgatgacctacttcgagtatttcgatgccgatatcagcaacgccattccatttggcttctcgtcggacaagttcttcgatttctctgtcttcgctcgccagaaacgcatcaaccacaagccattcacctacaccatggatgtcttctctgagttcgccggcaagggtgtcgttcgcatgtacatgggtcctaaattctacgacttcaagcagctgcaatacctgaagaaatacttcgtcgaagttgatcagtacgtgtatgactttgtggttggcaagaacaccgtcgtccgtaactcgcgtgattacttctggagcattcgtgatcgcacctcatacagtgatctgtataagaagatcatgatggcgtacaagggagaagacaagtttgtcctggatatgtcggaagctcactgcggattccccgatcgtctgctgctgccgaagggtcttccgagcggtttcgaaatgactttctacttcatcgtcaccccgtactacgctcccaaggtcgagcagttctccacctatgaatacacctacagctgcggagtcggttcgggctcgaagtatgtggatgacctgccgttcggattccccttcgatcgcgagatcaacttcgcctacttcttcaccaagaacatgtacttcaaggatgtgctggtctatcacatcgacgacatgaaactgaaccaatcgttctaa

SEQ ID NO: 349 - DNA, 4131 bp, Aedes aegypti
atgctgatcgagcgtgtccagagtcaagggtcagtcaaagtgtttatagatggctcatctgtagcggctttccgtaggggattccctgcattgcgaaaatccccgaccttttcagtgattggaccgaaaactatacggccatacagtacctattcagtggctttcagcaattctgtcaataaaaatgttcacttaaatgtaatcctcgaggatcaaaataacccctcagaatttagtcttaaaaaactcgcagtcgttaacagaagaacagtcaaaaaaattgattttgatataggaaatatcaccagcagtgaatatcagttgcttgttcaaagtgcagatcgcacatttagctttgaccagagggtagagcttctatatgaaccaaaaactatgtcggtattcatacaaacggacaaaccggtgtacaccccgggagatctgctacgttttcgggtaatcgtggtggatgctgacactagacctgtgactagtattaaaacggtaaatatagcgatcgacgattctgcagaaaattccattcgaaagtggccttatgccaagttgttaaacggcgtctttgagtcacaagttcaattagcttcttcgcctgttcttggcacctggagtatcaccgtaaaagcttccgacgacatcattgtcaccaaacagatagaagttaaggaatatgtgttgccaaaatttttcgtgaaagtttacccttcggaggttctattagtacaaaatgagaaggtttctcttaccttggaggcctattacacgttcaaagaacccgttgacggcaattacaaagttgagttgttcttggaccataccaagagaaagcctgacttcataaaaagtgatcgaatcaccggtaaaacttcacttgagtttcaattgaaaaatgaagtagacattgatggcgacgagcagtacactgatgtcacggttaaagttgaagttgtcgagacattttctaatcgcacagttagtataactgagaaaattccaatttatcgtcagccttatgccgtgacccttcttccatctgcaccatcatttcgaccaggagttccatttgatgtaaaaatatttgtgaaagatcagcttggacaccctcctcccgaagaaaatacggcgtcaattgaccttactgtagagtttcatttgcctacagacagtgacaccaaatctttaactgtggatctggacgagaaaggaacaggtcagttcatattattgccccatccaaacgcccaggagctgaaagtgacggctacatatgactctcaagaatacgaagtaattcacgatccgatacatggtttcagttcgcaaagtaagcagtacatcaaagtaactctgaatccaaaatactataacaacattaaagtcgataaggacatcgtactggacatctcctgcactgaaacaatgacgcacttctcgtacatcgttgtcaccaaaggaaacatagtggaggcatcgaacgttcctgtcgcgaaaaaaaagaaacattctctgaggttgaaaatgacttcaaaaatgtctccggagtcgaggcttctagtgtactatacaaacagggagtatctcatctttgatgatatagagctgaagttcgattcgttcaacaacgacttcaaattcgatttgaacgatgatgagtattttccagggcaatcagtttatatcgatgtatacgcttcaaaggattcatacgttgcgttcagtggaatcgatgaaagtgtactcctggtaggcaaagaacgccatgacttcaacaaaggagatgtgctcaaggaactcgctctttacggagcaacaaatgatgccgagtttgacttgttccacaaatatggattgttcctgaaatctactgctaccgttgatactcctgtaactcgctcacagaatgcacgatttggtactctactaggcaggacgaagcaagcgattgaaattcgaactcaattcctagaatcctggttatggaaatccttttccatggatggtcgaaacaacttcaaagcaatagaagactcggttccggatactattacaacgtatcacgtgtcaggatttgctttaagtccaacactaggtcttggagtaatccaacaaccagtgagtttcaccgttcgtaaaaaattctacttggttgcaaatttgccttactcgatcaaacggggtgaagtggcgttgattcaggttaccgttttcaacttcctaggaagcagcgtcacaaccgatgtgacgctgttcaataaacgtgatgaaattgagtttgtcgagaaagcatccactaataatacacatcgaacaaaggcggtaattgccccgaacaacaatgggaaacctgtatcatttatggtgaaagcgaagaaattagggcagattgcgatcaaattccaggcggaaaacttgctggaaacggatgcattagagcacatgttacgagtaaccccagagagccatcgctatgagaaaaatgtagctcgattcattcaactaccaacgcattcaaaagtacctttcgatgtgaagctggatattccgaaaaatatcgacgagggttctgctcaaatcaaattcactttagatccggacattttgggaacgaccattagcaacctggacgggttgatccggaaaccatctggatgcggcgaacaaaatatgctccattttgtgccaaatatagtcgttttggattatcttaacgaaaccaacacagcggcagaagatgtgaggaccaaagcaataaattttcttagcagcggatatcaaaaccagctacgctacaaacgttcggatggggccttcagtgtctggggacaatcgcatgctggcagtacatttttgacggcttttgtggcgaaatcattcaaaatagcagccaaatacatacaggtggataagtctatagtagacgcggcattcgactggttagcgaaacaacaacaatcagatggacggttcccagaagtggggcaagtaatccatgcagatatgcagggtggacttcgtaataacggttttgcgctcaccgcgtatgttctgatcgcttttgctgaaaatgaggaagtatacagaaaataccgatcacagctgattaaaactactagctatatagcaaataatcttgataatatggagaatccatacgacctctcgctgtctacttatgcgttgatgctagcaaatcatggcaagcgcaccgagtttcttgataaactggtcgaaatttcaatatttgacagcaatcaaacagagagatattgggacagcaaaccagttgatattgaagttgctggatatgctctattgtcatacgtagctgccggtgacttattgcatgctacgcctatcatgcggtggctcaacaagcagcgttatggtctcggaggctttcctggaactcaggacacattcgttggattgaaagcattggcaacgttcgctgcgaaggtatctagtgggagaaacgactatcgtgtaacgataattcacgaaccaaatcgtcgacgtacattcgacgtagacaggcacaatgcgtttaatattcaagagcttgatattcctaataacatcagaaaaatgcgggtggaagtcgtaggcatcggcaacggctacttccaagtggcatatcagtactatcaaaatattcaggtggctaagcccagtttcagtcttacaattgatcaactcaacaccacgacggaacacatgcagcaattggacgtgtgtgtgaaatacataccaaaagaggcttatcaaaaatcgaatatggctttggtggaaatattcttgcctagtgggcttgtagcagactcagatgccattacggacaagactggaggaattcgaagaattgaaagacgtttttcggacacctcagtagttatatattatgataatttgggccccgaagacgagtgcttccgagtgactgcttatcgtcggtataaaattgcattgcacttgccatcatatattatagtttatgattattataattctgagcgctttgccattcaacagtacgagggaaaggtgctgcagctctgcgatatttgcgaagatgaagactgcgaaactttatcatgtgaaaatagctcgaaatag

SEQ ID NO: 350 - DNA, 2135 bp, Aedes aegypti
gaaactttttacttacatttaatttatatttctcgcggaagaccatataaataattgatcaaacacagtcataacatctatgtttgcgaagaatttccgagttcaagggttatcactaagtggatgcagaaagctcgtttatttcaaggggataccccttgaatagacgatggtttaaacattgccttccttatcaaaccaatttcccattcttctttgcctgatatttttatcattttgtgtttacgaaaatgggaacgactcttgaactaggccatcgtccataactgtttttgcatcttttattttaaaatgtgaatatttcagagaaaatatacctacgttaattacgaagagcaacactgaggaaggctgcaagtaatcgaaattcacgtatctgctttaaagtgcttattttgcatcaatcgccctaaagtaataaatagattttgaaataaaattttcttacaatatcttttcaccttcgaaaaaattcctgaatttttaaacatatcagattaattttctgattaccataatttgtccttaaaaagaagcataacctagtgactggagttcttccatttgtctaccaattagagaagttttcatcgctattcttcattctcacgaaaagtaaaataccaaggcgtctcgcggtgcttcacgattgtttagttcattcaagttcaatatgcgacgaagactcacgcttgtcctgcttgtacttctgagtgtacaattttcttattcggatggtctgcaagatagaataaaatgcaatggagtatgtgtgccgctgaaccagtgtaaaactgacgtaggatcattcagcactgtggatattagtgacgatgtcgaggtaacgtgtcatcactatcttgaagtgtgttgttccaaggaaaatgttgtaaacggttcggcaaataaatgtgaaaatagtgccatcaaaactttccgagactgtggcagaagaaacgaagatggaatcggattcagaattacacacgccaagcataatgaaaccgaattcggagaatttccttgggtggtagcagtaatgcaagtggaggaatctcagatggaacttgttaaacccgattccaaattgatatgtggaggttctctgattgctccaaacgtggttctgaccgctgctcattgtgtgatgaatcgttcggcagaaacattgataattcgagctggtgaatgggacattgctactcggaacgaagtgatcccgtatcaggaacaacgagtcgagagaatagttctgcatcctaatttcaaccgggagcttctgtttttcaatttggcgctgctcatcttggaagacaatttcgtagccgacgaacatattcagctcatatgcatgccaccacaaaacaaagctttttacgatgaaaattgcttcacaaccggttggggcaaagtggattttagtgcaccaagctaccaaacgatactgaagaaaatcgaagttccaatagttcctaggcaaaaatgcgaaacacttttgagaggtacccatcttggtgcatcgttccgactgcacgattcgtatatttgcgccgggggattggaaggaatcgatacctgcaccggagatggaggatccccgttgatgtgcccaattccagggttcaaaaataagttttaccaagctggaattgttgcgtggggaatcggttgtgcgcagaaagatatacccggcgtctacgtaagagttagtttgtacacggattggatcaaggaagaaataaaaaagatcgagtaggtgagggactaacacttataataataagaaaccctaataattgaagattgatcaaagcttaagccagtaacaacgaaaagcattaatagataaataaaatgaatggggttttcaaacataaaaaaaactaaaaaccaagattcttgaatcgcgaataaaaataaatagctatccgaaacaagctaaaaatttcaaacgtgtgctacacgaaagtccgtttttcatcaccaagtgttcgttttctatcgtaaaactcgtcgcttgaaaactccatgtgcttacagttccttcccgatcatagtccttgtttcgtgcccgtagcagactaccagtcctgtgggcgttttgtaggtaccgt

SEQ ID NO: 351 - DNA, 1441 bp, Aedes aegypti
taccgacagttaaagttaatcgtgtgtgagctgtgaagcgtgctacctctgttctcaattaagtataataatctagcaatcaaaatgatgcttcggtattccaccgtcgctacgctggtggtgctactggccggggcggcatatgctcaagacgatctcgactctctgtttgagtcggttttcaacaatccagacaacaacaacaacaataacccagctgctgcaacgccagctccactacctcccgttgctccaccacaaccaccagcacagcgtccagctccagctccaactcaacctcaaccgcaaccaacacccgaatacacatgcaagggaacctgcgtcccatactacctgtgcaacgataatcagatcatcacagacggcactggcatcatcgatattcgcgtgggagaggactccaccgttgaaaacgaatgtgctaattatctagatacttgttgcgaaaaggaacaagttttggtggagccacctccaacttatactcaggccccgccagtgggcaacaaatactcgtgtggtatgcgtaatgccgacggtcttggattcagaattaccggcaacaagaatggtgaatcggaatatggtgaatttccctggatggttgctgttttgcgggaagataaggtcatggactcgacgttgaacgtctacgaatgcggtggttccctgattgcccccaatgtgatcctcactgccgcccattgtgttgcgaacaaacagcaggacactttgctggtacgcgctggtgaatgggacactcaaactagaaatgaactgtatcctcaccatgaccgtcgtgtgcgtgaagtgattattcatgagcgtttcaacaagggttcactgttcaacgacattgcactgttgatcttggatgaaccattcgagtttgctgaaaacgtccagccagtttgcctgccaccaaggaaccataactttgatcacagccggtgtttcgcctctggatggggtaaaaatgtttttggaaaggaaggcaaataccaggtcattctgaagaaggttgaattgccggtggttcctcaccagtcttgccaatcgtctatgcgtaccactaggctgggaatgcgatttattctggacaagagcttcatgtgtgctggaggagaagtaggacaagacacctgccgtggagacggaggatcgcctctcgtatgtccagtacctggaagtccaacccattactaccaagctggtattgtggcttggggtattggctgcggtgagaagggtatccctggagtttacgccagtgttgcagttttcagagattggatagatcagcaactatcgcagcgccacgtcgaagcaaaacattatacgtatgcttagagatttcgataaatatgttttacactactggtagagcaataaacataaacctctggaatgcagtgtaaat

SEQ ID NO: 352 - DNA, 1522 bp, Aedes aegypti
cgtcgcttctgatcgtgtctgtgtccgcgctgagtttattgcatatatagcgttgtgtatcttctgttattggccacgttagtttttttttctggagaaccatcgtactagcggtcactgtcagtgacaagttggaccggtttaactgcattcgaaatgagtcgagccgtcgtgctatcgtgtgctctgctcgtgtttgcagtggcttcgaccagtgccgaagatggcgatctggattccctcatcaacagtttatttatctcatcgccgggcaccgtcatcgcctcaagtacgtctgcaccacgaccaacgtctcctccaataggatctcaggctgcttgcgaacgtgggcaacgatgtgttcagaggtatctctgcaccaatgattcaactagtggagccggtttaattgatattcgcttcgatggtgacaacccttgtgtgaattacttagcagggtgctgctatgaagaagatatcatcagtgaattacctaccgtaccggttttggataatccaacttgtggaaagcgcaaccctgatgggataggattccgaattgtaggaggcaaagatgaatccgaatacggagagttcccttggatgattgcagtattaaaacaggaacaagctttagatcaggttgtaaatgtatacctgtgtggtggatcattgatacatcctagcgttgttctaacggcatcccattgtgttcaaaataagtcacctgttcagctgaaaattcgagccggagaatgggacactcaaaccaaaaatgaagtctacccgcatcaggatcgccaagtagttgagatcgtaacgcatccagattattacaaaggaggactgtacaacgatgtggccttaatattcttggactctcccctaaaactagatgatggaattcaaacagtgtgcttacctccaccgaatgcaaagtttgaccatcagcgatgttttgtgtctgggtggggaaaggacgtatttggcaaggctggaacataccaggcaattttgaaaaaggttgagctgccagtggtgcccaactctcagtgccagacttctctgagatcgactcgtctgggaccgaagttcgtgttgcacaacagctttatgtgcgccggaggggaggtaggcaaagatgcatgcaaaggtgatggagggtctccactggtgtgtcccatacaaggatctacgcagagctatcaccaaaccggcattgtatcgtggggtattggatgcggtgaagcaactcctggagtgtatgccgatgtgtcccatttccgaacctggattgatcaacaaatgcaaagccgtcatttcgatgccagcagctacacgctgtcgtaaaagctgatagtcttcgacctagttattttttgtacggtttctgtattcctatctaatgttacgctttctcaaagcattcgtttgatgacctcgtacattaagttatcaatattggtgtcatcgtcaaattaataaacataaaaaaaaaaaaacaaataaatctgtagttcct

SEQ ID NO: 353 - DNA, 1149 bp, Aedes aegypti
atgaaactcttgtcgttttttgttatactatcaattactaatggattcaacatcggagcaaccactcccagtgaagcatcgatacagttttcgttgagcttctttcgtgcagcctacaatctgaacccaaaccgaaactgtgtcctatcgccgattgccattcagcatacgcttgctatgttgcatcatgctgccaagcggaaggaatccagccaaatgcatcgcctgcttagaattccagagtcaagtgactcatacttcgagagaaatgaaccattttcaaatgacctgaataacgatgcgctagagatgatcaccaaggtgtttcactcgcaggttgaactcaatcccaatcttttgccggtgctacaggccgagtactccgttgacgttcaggtatccgacttcagtcgtccggaacaggtggtggattctgtgaatagatgggcctctcgcttcaccaacggattggtgggagatgttttcaacggaaatgggttttccgacgatgccaacttgatgatcatcaacaccctcacgtttaatgcttcctgggagcatccattctcccctcgaagcttgctgaaagacgatttttactttctgaatggagtaagaaaagttgacacgatgcgaagttacaagggttttagatactgcgagatcgacgatattcgggcagtagagctggcctacgaaagaaactctgacctgtccatgctgatcatcaaatctgactcacaaccgttggacacagtcattgagaggttcgatatggaaatgtatcagacgatcaacgagcgtctgtatcatgatcgattcaagttggttatcccgaagttcacgattagtacggggatcggggcgaagcgcattctgaaagctatgggcttgagtgatgtttttggcaaagatacgttcgatgtgttcgttggattcagcagtcgtttggcaaacatctatcaagcggtgcggatcgatatcgacgagaatgggacacgtgccgcagctggaacctactcagagaaatcgatgcgggtagggacggatttcaagtacgccattgatggaccatttatgtttgtgattcgcaaggatacgaccaaagacattgtgtttatagggcattattcaagttatgtagaataa

SEQ ID NO: 354 - DNA, 1470 bp, Aedes aegypti
atgatgagcaatcgaacaatagcaatggcagcagcctgtcttctgacggtgctttttgctgtcacatcaacccaagcacaacatgactcggagcagcagcaacaacagcaactggagcaatacgactcaaacacatcgccacaacacaacaacggagaacacatttccggtcaccggttcaaacggatgtacgccatgtgcccgccggaattctcccgcatcggcaacgagtgctactacatttctcgggacaaacaaaactatctggatgcgcactttgagtgcaaagttcgcaacagcaagctggccgaaccgatgaagtacgacgacaaaagcctacggaagtatctactgaaactgaaggagaagaactatatttggattggcggcaattacaactggaaagcgaacaagtggcagtggggttacagcggaaaggacatcggctatcagtccttcagtcagatgattccagggagcagccaggatctgagattccactgtgcagtgcttaaccctgacctcaaatacagatggtcagccaagctatgcacagaaaagttaaatttcatctgccagcacaagatgccgctcgttagcagcctcagccgcgccaaggtctacacccggtggaacgaaaccttcccgaacgagttggccaacgaggtggaagtggtcgtggccgatcaaccgcgcatcggtaacctgaaggacagggactactacagaactcaggacagccctaagctaaatctaaccaggttgaacaggaattggaaaaagatcaaccgaactcatcgtatcaaaagtttccgcaatcgcaaccgtgctcaggctagaaatgaatatattagcaatgatatcatccgtcgtccagtcgtagaatacgcttcggataattcgtacaactccatcaacggtaacggtaatggcaatggaaacggatatcgcaacggaaacggcgcattcaatcgcggtttcaacgtggacattcatcgtcagaagccccataaagatcgcatgtcgaacgaagtaaacggtgaattcagacatcatcgtcatcgtcgtccgtcgacagaagctactcctacgacatctacaaccagtactacaactaccacgaccacttcggcaccggaaactcttccaacggaagctctacaggtagtcaccgaaaaccatcgactcccgaaggcagataggaagtctcgtcgcgatcaaatccgagagcggctatcacgactcacacccgaagaacgagagcaattctacacgaaacgtgcttcgaccaccgaaaaatatctcaacaaagcccaactgttgtcgcacgaagagaagaaggctcgtcggaacaatctccgggaacgactagcacgattgacgcccgaagaacgtgaaatgtacttcaccgagcgtgccaaacgaaaacagtccaagaagctgcggaccacaaacgaaaccattccgtaa

SEQ ID NO: 355 - DNA, 870 bp, Aedes aegypti
atggacaccgcggatgagctagacgttctcggttttgggaacaaaactaatgagtcatcaacatcaaacgagaatcgtcccctttctcgacctacttgcgatgagtattatgatatgtcaaacaagcgacgtggcatagcattggtgttttgccacatgaacttcgcggtcatggccaaaaggaacggcactgataaggatcgcgatgacatctgtagtacgctttctgggttagatttcgatgtacgtgtgttcaacgacctgagaagaaaagagctactgcggacactgaaaaacgtatcccgcgaggatcactcggagaacgactgtcttgtggtagttgtgatgtctcacggcgatcagggcgtcctctatgccagtgacaagaaatactacgtggactcgttgtgggagaagtttaccggaaatgcgtgtccttcgttgataggaaagccgaaactgttcttcgttcaggcttctcgtgaaaggcagcctggaaaaaagggagaaggaggaagagaagaagaatcacaagcatccgtagatgtagttgactcgcccaacgattcttcggccctgtattttatcccaaccatggctgattttctagtcatgtactccacatacgatggatattattccgggaaagacccactgcagagatcatgcctcattcaatctctctgtatggaactggatgaaaatggacgagaaagggatttgcttgcactgcttaccggagtttctaggagagctttatacacatgtgaatcatctgttccgcataatgagaaggataatgcactaaaaccaattccttgcgtcgtctcaatgctcacgaaaactttctttttcactaagaaaacctaa

SEQ ID NO: 356 - DNA, 321 bp, Aedes aegypti
atgaagtccataaccacactgtgcttagctgtggtttgctttatcgcccttctttcagtgggggccgcggcgccacaagagagtgtttccattcaggacgctgagcatcccgcagaatttgacaccgatatccaaaaggttcagcatgatcaagccagacaaattccggtggaatttcaacgtcgaaagcgcatctcatgtgatctattgagtggtcttggatggggtcacagtatctgtgcgggacactgtctagccataagctggcgctaccgtggaggatactgcaatgatcaaggagtctgcgtctgccgcacatga

SEQ ID NO: 357 - DNA, 2373 bp, Aedes aegypti
atggcgaagaaagtattgctgctgagcctctactcggcggtgttgtctacgtggttcgggttcggatatgtgcagtgtaaactacccacttcaaggtctgaaattcccaattttgattatacggttgctcaacagccagatcaaagcgacgcatgcgaacaaaatgaagtctgtatggtgtcagtcgagtgcattttggacgccaaaaagaaagccatcttgaagccatgttcaactgtgcccagcgtcgatggagtttgctgcccgtccagcgagtataatggaactagtagccgtgttcagcaaaactctgaagaacatgccgctgatcacttggtactgcaagctattcacgaaggtcgtcgcgagtacgacgagaagcttcgatttgaagatgaacaccgcgcggtaatgactgccaaggagaaaccagaagccatgttccaccgtatgtttcttcccggcggtttgaagacccatggtaaggaagttgtcgatgcggaagagcaagccaatgtttacgggcatgttttcgccagccgaaaatacgccgagttgaccaatatgaccttgaaacagcggcaaggtgataggtttgcgagaattccccgggcaattcggaaacgctgtttgccaccagtaccttgcaacccacactcccgctaccggaccatcgatggttcatgcaacaacccgttgccggaccgcactagttggggtatggagggttatccttttgaccgggttttggagccagcgtatgaagatggcgtgtgggcaccaagaatccattcggtgaccggaaacttgctgcccagtgcccgagtaatctccgtagctcttttcccagatgagtacagaccggatccgcgcttgaacatcttgttcatgcagatggggcagttcatatcgcatgacttcactcttagtcgtggttttacaacgaagcacgggcaagccatcgaatgctgtactccaaattgtacggcaccgctttttggtccgcatcggcattttgcgtgcttcccaattgaagttcctccaaatgatccgttctactcccgcttcggagtccgctgtttgaacctggtccgcattcggctagcgcaaggccctgaatgtcaactaggatatgccaagcaagccgacctggtgacccacttcctcgatgcgtcaactgtttacggttcgactaatgatgtagcagcagaacttcgagcatttcagcagggtagactaaaggactcgtttccgaatggtatagagctgcttccattcgcgagaaatcgtacagcttgtgttccttgggcacgggtatgctacgaaggtggcgacatccggacgaaccagttgcttggcttaaccatggtgcacacgttgttcatgagggaacacaaccgactagctgtgggcttgagtaagatcaaccctcactgggacgatgaacggctataccaagaggcgcgtaggattcttatagcagaataccagaatgttgtgtacaatgagttcttgccgatcttgcttggtcatgagagggtacagcaattaggattagccgatccatttgatacgtacacaaattactatgatccaaatcttcgtccgatgacgcttgctgaggttggggctgctgcccatagatacggacattctctggtggaaggtttcttcaggttccttacccgggaatccccaccggaggacgtattcatcaaggatatcttcaacgatccctccaaaaccctcgagccgaacagcttcgacgtcatgatgttctcgttcaatcagcagccgatggaacaaatggatcgtttcctcacttacggtctaacacggttcctcttcaaggagcgtaaaccattcggatcggatctggcatctctcaacattcaacgaggtcgggactttgccgttcgaccatacaacgactaccgcgaatgggccggattaggtcgaattaccgactttaaccagttaggtgaagtgggtgcactcttggcacaggtttatgagtctcctgacgatgtggatctgtggcccggaggtgtgctggaacctccagcggaaggtgccgtagtgggttcaacatttgttgctctgttgtccgctggctacactcgttacaagcgtgccgatcgatactatttcaccaacggtcctgaggtaaatccgggggccttcactttgcaacaactcggcgagataagacgtacaacgctggccggcataatctgcgccaatgcggatcataaggaagatttctaccaggcccaggaagctttaaggcagtccagcgcagataatgttcccgttccttgcacccgctatgacaccgtgaacttaggtctgtggcgagaggaaggtttttaa

SEQ ID NO: 358 - DNA, 2163 bp, Aedes aegypti
gatacttgcgctaaaaatcaagtgtgtgttgccgacgtgaaatgcaaggctgatcttctcgaattgacgccatgttcgactgcagacaatacgatcggcatttgctgttcaacaaacgatccaagcgacaaactgtgggccagcgctgtggaagatggccgccgtgaattcgaggaaaaactcggccatgttgaaaaacaccgacacgaaatgaccgccaaagagaagccggcgtcggtctttcataaactgtttaaaccggagggccttgaaaaagatgcaaccaaaaccgatccaaaggagcgagccgatgtgtatggaagtgtttttgcaagccgaaaatacgccgaaatggccaatttgacgaaagaggaacgtcaagggggccgttttgcacgacatctcgtagcgaggtggccacgacagattgagctcggtctagcgctgtgtgatcccaattctcggtaccgaacctacgatggaacgtgcaataatccgatgccggagcgcgccagttggggatgtgccgagtatccatttgaaaaacttttagcgcctgcctacgaagatggagtgtgggctccgagatcccactcaataaccggtaacctgttgcccagcgctcgcgtcgtttccgccatcttgttcccggatgttgaccgacaggatccgcacttgaactacctcttcatgcaaatgggtcaggtcataacgcacgacatcgctcaaagccagggcgtaacgcttgacaacgctaaggaaatcgactgctgcaccaaggaccgatcgcgagccctctccggagaaaagctacactttggctgtttgccaatcgagatcagtcctaacgatccgttctattcccagttcggagtcagttgcatgaattttgtacgcatcaaactttcatgtggcaccgcatgtctcggttatggcactcaagcgaactctgtaacgcacttcatcgatgcatcgttggtatacggaaacagtgaagctgtggcagcttccctgcggacattccagcaaggtaaactacgatcttcccactcagctggaattgagctgcttccgttgagtcgtaaggcaacagactgcgtaccatgggctcgggtatgcttcgaaacgggagacttccgggtgaatcagctgctagcggtaactcagtttcaaacgatgttcctcagagaacacaaccgccttgcagttggactaagtcacatcaacctccactgggatgacgaaaggcttttccaggaagccagaagagttctaatcgccgtacttcagaacattgtgttcaacgaatatcttcccattctacttggcagcgagaaagctatgcagtttggtttgactgatcccttggaaggttatggctattcgtacagcccggatgtaccaccgataaccctggcggagagtgctgttgcagcgttccggtttgggcattccaccgtcgatggattcttcagactactgcgacatggcacagcagcggaagccgtccccataaaagatctctacttcgatccctcaaaaattcaagaaccgcatagtttcgatagtatgatgtactcttttggccaacaatcgcagcagctggcagacaactccatgtcagctggtctaacccaccacctgttccagagagaaaatccgttcggtttggacttggccgcactcaacattcaacggggccgtgacttcggtttacgtccatacaatgactatcgtgaattggctgggctgcctcggatcaccgatttctacgaactgggtgagatgggctcattgctggcacaggtttacgaatcccccgaggacatagacttatgggtaggcggactccacgaaatgccctcctatggggcggtagttggaccaacctttgcccatctgttagcggaaatgttctaccggcttaagcttggagatcggtactacttcgccaacggaccggaagtgaatccgggagcttttaccctgcgacaactgcgtgaaatacgggcaaccactctggcgggactgatctgtgcaaatgtggataaccggtacgatttctaccaaaccccgaacgcattctttaaggccagttgggaaaatgagccgatgccatgtgtcaactatcggctcttggatctggaagcctggcgggaatga

SEQ ID NO: 359 - DNA, 2367 bp, Aedes aegypti
atggcgagggaagttttgctgctgagtctctacttggcggttttgtgtacgtgggtaaatttcggtaatgttcagtgtaagctatcctttgcgagatctgaaattcccaatttgaactacacggtcgttcaacatccggaagaagacgatgggtgcgaacaaaatgaggtctgtatggtgtcagtcgagtgcaccttggacgccgaagtaaaagccaatttgaagccatgttcgacggtccccagcgtcgatggcatttgctgcccgtccagcaaactcaacgaaactagcagccatcaccagaaacgctccattcaacatgccaccgatcgcttgatacaaaatgccattcacgaaggtcgtcgagagtacgacgagaagcttcgccttgaagatgaacatcgcgagcttatgactgccaaggagaaaccggaagacatgttccaccgtatgcttctccccggcggtttgaagaccaaacacgtcctcgatccgcaagaggaagctgatgtttacggacacgttttcgccagccgcaaatacgccgactcgaccaatatgaccttggaggaccgccaacgtgaccggtttccgagggtacctagggcaatacaaaagcgatgtctgcctcccgtaccgtgcaatcctcatcgtcgctacagaactatcaacggatcatgcaacaacccgttgccggaccgcaccagctggggtatggcgggttatccgtttgaccgagttctgtatccagcttacgaagatggcgtgtgggctccaagaattcattcagtgaccggaaacctgctgcccagtgctcgagtgatctccgtagcacttttcccggatgcgtatagaccggatccaagattgaacatcttgttcatgcaaatgggccagttcgtatcccatgacttcactcttagccgtagttttacaacgaaacatggtcgtcccatcgagtgctgcacacataattgcacggcacctctgtttggatcgcatcgacactttgcgtgcttcccaatcgaagttcctccaaacgatccgttctactcccggttcggagtccgctgtttgaacttggtccgcattcggctagctcatggacccaaatgtcatctggggtatgccaagcaagccgacctggtgactcatttcctcgatgcgtccactgtctatggttcgactgatgatgtagctgcagaacttcgagctttccatcagggtagactacgtgactcgttcccgaatggaattgaattgcttccattcacaagacatcgtgaaaggtgtgttccatgggctcgggtatgctacgaagctggcgacatccgggtaaaccagctacttgccctgactatggtgcatacgttgtttatgagggaacacaaccgactagcatctggcttaagccaggtgaacccccactgggacgatgaacggctgtaccaagaagcgcgtagaatcctcattgccgaataccagaacgttatcttcaacgagttcttaccaatcttgcttggtcgcgagagggtacagcaattgggcttggtcgatccatttgatacgtacaccaactactacgacccgaatctacgcccgatgacgtttgctgaagttgcagcagcagctcaccggtacggacattctctggtggaaggtttcttcagattgcttttccgcgacgaaccaccgaaggacgtattcatcaaggatatcttcaacgacccctcactgaccctcattccgaacagctttgacatcatgatgttctcgttcggtcagcagccaatggaacaaatggatcattttatcacaactggtcttacgagattcctcttcaaggagcgcaaaccgtttggatcggatctggcatctatcaatatccagcgaggtcgtgactttgccctgcgaccatacaacgattaccgcgaatgggccggactgggtcggataaccgattttagccagttaggtgaaatgggtgctcttctggcgcgagtttatgagtctcccgacgatgttgatctatggccaggtggtgtgctggaatctccaacggatggtgccgtcataggaccaacattcgccgcgctgttaaccgccggatacactcgttacaagcatgccgatcggtactatttcaccaacggtcccgaggtaaatccgggtgccttcactttgcaacaactgggcgagataaggcgtacaacgctggccgctataatctgcgcaaacgtggacaataaggaagacttttaccaagccccggaagcttttatgcaatccagcaaggacaatgttcccgttccttgcaccaattatcgcacagtgaatctgggtctgtggcgagaggaaggattttaa

SEQ ID NO: 360 - DNA, 1113 bp, Aedes aegypti
atgagattactggagagtggctgccttctgctgttgatcgtgacgatagcggtggatggccagcaaacttgtaccggaccggacggaagagccgggaactgtatactgctgcgatcgtgtgatagcttgttcacgttgatcaaaaagaagcctctcctcccggaggatcgttccttcctgagccggagtcagtgcggatggtctcagcaggagaatcatccgttggtgtgctgcagtgatcctctggacactccaatccgtgttggcgagtccttgctacctccggtgggagtatgcggtattcagactagcgatcgtatcgtcggaggcgtcaacaccaagatcgacgagtttccctggttggcgttgcttaagtatgccaaacctaacaacgtattcggattccactgtggaggcgcgctcatcaacaatcgttacgttctaactgcgtcgcactgtgttaacggcaaggatatcccaactacttggactttagccgaagtccgcctgggagaatgggacacatcgtccgatcaggactgcgaaggcgttggagtggacgttgattgctcgccagacccgatcgacgtggtgatcgagcgccgtataccccatccggagtacaacccgcagacgttggaacagttcaacgatatcgctttgctgcgactggagcaacgagtagagtacaccgatttcatcaaaccgatctgtctgccccggacgcccgagttgaaggcccgggaaaccgtgggtcagaagttccaggttgccggatggggaaggacggccacggcacggtacagcagcgttaagcagaaggtcggcgtcgatgggatcggtctgcagaagtgtaactcggtgtaccagcaggagcgtgtgaccttgatcgagcgtcagctgtgcgccggagggcaagcgggtaaagattcctgtcagggcgattccggtggtccgctaatgggcgtggcgcagaacgcaaatgtccagttttggtatctggtgggattggtgtctttcggaccgacgccatgcggacaggaaggatggcccggcgtgtataccaatgtggcaaagtatgtggactggatcgaggcaacgttggagcagtga

SEQ ID NO: 361 - DNA, 1843 bp, Aedes aegypti
attcttcgttgatcgcgtgatcgtctacacggaaagaagttttggcgcgcgcgcagttttgccgttcggttggcaacttggagcacacatacacaataggctccggttgttggttttattatcgttcgggcggtgaagaagtgcaaccccgaagacaattgcactaataaatagtgaggttatcgaaagctggttgccgcggattgccccccccccctcggccagaatcacatacaaaatgacaaaattaatcactcaagcaacctcccggttgctcctgctggcagctattgccctattaccagcagccctcggtggatcaccatttatgcactctcgccctagaaccatcacacgaactgttagttccaacatcactctcgatgaaccgaccctcgcaaatccatacctggccccgggcggaaaggaagcccttggcacgaaacaagtgtcggattttagccttagccaaggcaagaacgtttttgatgtaatctaccagtggaagattatcgatttcttgtacccgagcctgcaggctcgcaacgatgccattcgtactaaacaattcatcccggagaacaacctcccgctgggcgttgatcgcttccgcaaccgcatcttcatcaccacccctcgctggaacccaggtgtaccggctaccctgtcctacctgccccttcccgttcaggacccaagtctacctctgatcccctacccagactggagtttccacacgtccccccaaaaccccgactgtagccgtctcgtttccgtgtaccgtatctacgtggacgaatgcgatcgcctttgggtcctcgacgccggagttatcgacaccctcaccaacctccaacagatctgcccgccaaagatcctggcgttcaaccttcacacagatgaacttctcttcagctatactctcccagcggatcaggtcaaacaggactcgctgcacaccaacatcgtggtcgacatccgagacgctcagtgtcaggatgctttcgcttacgttgccgatgtgtggcgctacggaatcaccgtgttcagcttgcgggaattcaagagctggcgcaccaccaactacctctacaacccgaatcccttcgccagtgactacaactacaaggagctgaacttccagtggtctgatggagtgttcggcatgtctctttcacctgtccataggaatggcgatcgcatgctgttctaccacccgatgtccagttacacggaattccaagtcccaacttcggtcctgcagaacgaaaccatctggcagaacttcggtctggccaaggcattccaaccggtgggcagtcgcggtaaggccggtcaatcgtccacctccggagtcgcccacaacaacgtgcagttcttcacccttgtgcagcagagtggagttggctgttgggatctggccaaaccgtacaaccgcaataacttaggtgtggtcgagaaggacatggacaagctgacgttcccgaatgatttgaaggtggatcgcgagccgaagcaatcgctttgggtgatcagcaacaagctgccggtgtttttgtactcgcgactggactacagcgaggtgaacttccgagtgctgaacgccggagtgcaggaagcgattaagaacaccgtgtgtgatccacggatgcctccgagcttggcctacgcaaaggagccggagtgcgatgtgtagagatttgatttgttttatgtgttttgatgtgtaagttttactactgttgataagaattatctagagcaaggtttaagttttgaatcagccgtgctgatatggtaatagtgaatccatgctcgaccagtgaaaataaatgattcaaag

SEQ ID NO: 362 - DNA, 1445 bp, Aedes aegypti
cttggagttcgaatccccctcctaattttccccttcatttgggaaccactgtccatttactgggaagttctacttgcaaagtacctgccaaacaagtggtaagcacaccgaggaaccagtacacacaccaagtgtgcctttggcggaaggtaattaaaattccgtttccctgtcctttgctctataaacagggggcgaggacgacgacgacagtcaactttaccgttcgatccgattcggacgaactttttattatttcgggggtgggtggtggataaaatttgcattcgaaagttcgaactcgggcagctaattggaagttacgtttagtcctgcttccggcggttatcctcaggaattagcgggatctctgtatctctccgggaggaaccatggagtacgtgttcgacatcttcttcgaggagtgcttcctgacgatggagcgcagcgggctgaaaagtcgcagcggtcggagggacgtgattgaccacctgaattcggtcatttccgggtgtattgagggtcgaccgacggccacggctcagttggcggtcgggttggccgttaaatcggctattgattaccaccggaagatgaaggacgacaattttagagtctgcatgatgggaaagtatcacaacgtgctgtatattgcgatgaggatcgcgtgggactggagcttggaggattcgcatgtgatccgattgctactggaggaaatctacgcgtgtgagaagactttcgagaggctatttttgggagcgttgtttggatcgaatgctccgcatttcattgccgggtggaagagcgatttcaaggatcaggatgaaaatctgagagcgatggtcttctttctgcaccatgccggtaaaacgagactgaaatttccaagttattcgtatatctatcgagatattgtgccaacgaaattcattgacattccaattgagtcctgtggtaaggccgcgcctcttcgcgttgccatacaggcttctgctccagatactctgatgattctgttgcgccaaggagcggatcccaatccggacgacggaggatcttccccgatcattagcctactggacaagctccgcgaatacgaaaaccgatcctatccgtaccagctggtgtcctgtctgaaactactgctccgttgcaccatcatggtcgagcttccctacaagccccaccttttccacgtccgaaaggagatgttccaaaccaagtaccgtctactcctcgaggataacctcatccctatagatcagctattcggagtgccaaccctcaaatccatctgccggtgccacgtacgtgatcagcttcggaacaacttccagctaccgcgcggtatcaatcgactcaatgtgccacgtaaaattatgaaatatatcgacttgttggattgattgcttttgctcactctcgtacttacttgtatgtcg

SEQ ID NO: 363 - DNA, 1344 bp, Aedes aegypti
atgatcgccggcgacaaccggcttcgaactgattggtatttgtatttacagtcagagttccactcgaagctggaattttgcgtaaaagccctgcgctcgtcgctcggaaatggttttcgtttgaatcgatgcaaagagatttgcatcgtagcatcatgcacatgtacggatgataatttcatcaacaatgatgatcagccatttcgaggacagcgtaatgtggaattcgactggaaactaactaagcaagtgttccaatctcaaaaagccaacgcagtgatatcgcctctctcggtgaaaattttgttggtgctactgtacgaagccaccggagatgctgccgaactttccgaaacacaaaccaaacgcgagttgcgaacagttctggaaccaaacggtgatctgaatgcaacccgcagcaagtatcgccaatggctggattcggcactgtcttcccacaaggactacgatttggaaattgccaccaagttctttgtcgaggaatacattgacgtaatttccaaatatcagatcatttcggatcattactacagcgccacggttgacaaagctcctttctcgaaaccgaaaatcgccgcggaacagatcaacagctgggtgaacaaaactacacatgggcgcattgcggagcttgtcaccgctgatggattggatggagcggtcatcacgttgatcaacgccatctacttcaagggactgtggacttatccattcccagagtatacaccaacactgacgttctatggcaatcagaaacaagtgcaggcaccgttcatggagcaaaacggtcaattctattatgatgattcggccgcattggattctcaactgttgcgattgtcatatcgcggaggaaagtttgccatgtatttcattctgccccaccaaggaaagactgtcgatgatgttctggataaaatgactctcagcacattgcatcaagcgctttggtacatggatgaaaccgaagtgaatgttaccattcccaagttcaaatttgacttttcagaagaattgaaccaaccactgaaggatattggaattcgtgaaattttctcccaaaatgcctccctgccattgttggcccgcggaaagggcgcccgaaatgaagttcgagtatcacgagtgttccaaaaggcaggaattaacatcaatcatctaggaagtgaagcatatgcggccactgaaatccaactggttaacaaattcggaggagatggaacgcaaattttcaatgccaaccggccattcttgttctttattgaagatgaagactttggaacgttgctgtttgctggcagagtggaagatccaacccaatga

SEQ ID NO: 364 - DNA, 1383 bp, Aedes aegypti
atgggtgtgttgggccagattccgttgctcataggggtgatcctgtttttgaggccggcccttgccaacgacaacctaagggtggcctatcaatggagccagattgactttgaattcccgtccgaggcggcacgatcaagtgccattgcctccggggattacattgcggaaaatgtgattccggtcggactggaagtgtacaagaggcgcctgtttctgacgctgccacgctggaaagctggaattcccgcctcgctcgcttacatcaacatcaacgaaaccagcagccaatcgcccaagctgcgaccctacccgagctggaatgcccacattcaaatggccgagggtgaagccccggaaatcgtttctcccttccggatacgatccgatcgctgtggacgtctctgggtgcttgacaccggcgtggcagaactccttggcgcagcaaaacccttggcgcctacgtcccttttggtgtacgatctgcacaacgacaacctgttgaggcgttacaagtttcccaaagatcacgtgaaggaggactccttctatgctaaccttgctgttgaagattcagactgcgatgatacctacgcttatgctgccgatcttggagcacctggtttggtcgtatattcctggaaatcgcaggaatcatggcgagttaaacatcacttcttctaccccgatccactgtccggaaactataccatcaccggaatatcgttccaatgggatgatggcctgtttggaatggcgctttcaagacctcagcccgatggatatgcaaccatgttcttccatcctttgagttcaacaaatgaattctcggtttctacgaaaatccttcgaaaccaaaccttggccacctcgggtaacatatataaggagtttaaggtgcttggatcgcgaggacccaacggtcaggctggagtcgcatttcttgatcaaaaaacgggagtcattttctacgccctgccgaatctgaatgccgtgacgtgttggaaaacttcaaaccgtgcttatacaatcaaatctcttggccgcgtgtacatgagcacaaccgatatggtgttccccaacgatgtcaaagtggatgacgagagcaatctgtgggtcctctcagatcgccttcatcaatacatgttctccagtcttgacccgaaggacgtcaacttccggatactgaccgcaaccgtgaaagatgccattgaaaacacagcctgtgatactaagatcaaacctcttccggatattatcaccaatttgggtgatatcctgcggccgtccacaacggctgcacctccgaaatccggagcacaagtgatgcttatctcccacatggcacttgtactcgcaattattgtcaagctaatactatga

SEQ ID NO: 365 - DNA, 4755 bp, Aedes aegypti
taagtacagcttaattattacgtctttggtttaatgatcttcaacagatatttgcgtttgcaaagctcgatttttacaacgcttgtttactttagaagtgttccgcatgctacagcattgagaaccactatcgttaaaccaaaacagcattatgcaacgtcggacgcacttacacaatcacaccttttccaacccgcaatcacccaccacccacttttccacatcctcctcttcccacacacgcaacaaaatccaatcaaaacaactccatctcacacgcacacaaccgcacactcatatcgataggcaaacgtcacccacacacgtttgctgttttcgtcgcagtgtgcgtaccatctcgcatcttccgttccggcagcagaagcatatcctttcccgtgccgagcgcaacccgactttaatccatcggcgacagtcgagcgagttggacgtgttttttctctattcaggtgtttccgaatctattgaaacagtttttgccctgcaaaagtattgtgctcagttcagtgtgatcatcatccgagaccgaaaatcgtgttttgacgcgcgtgtgtgaagaggaaggaagaaagaagtgccgaagcggtcttcttgtttttgtgcggtgcgtcttctcaccgaagaaccgagaataaagtgttcctctccttgttgcgcacccgcctgctgctgctgctgagcggggaagaagaagaaaggaaaggtgtgcgagcgagtgagtgagtgaggtgaaattacgcagtatttttcccgaaaaccagacggacgaacggaaaaaaaaactcgaatcggacaaagtttagaaagaacgaatcgctgtggttggattttatttgcggaagtttttcgagtgtgaaaagtgtggaaactccgtttcgggtgtcggaattcgccggttaagataaggaaagcgttttggagtgactttcgcgggaggattagttgacgaaagtgttttatgtctgtgtcagattgattgaaaacggagtgccggattaattggctgccggaggatcccttcccaggaacaataaccgacagggccggccgcctttgctgttctgcattcaaggccgggaggacattttgtttctgtgtgtgatcgggaagaagtaacttctgctgtgcgaaaaaaacaactcaacttgggtgatttaggcaacgtaagtgatcgtcgtcggaaacgggacccggtggattattcaatcgaccgactcgaccaaagaggacagaacagaagaatccgaaaatagcttgaaaagtgttgcgtttcgtgtggtggtagttttgggtgtcggaggaatcttcccggtaagaaggcgaaagtctaaagaagcagaagaagaagcaatggagatcgagaagcctctgaacggaaaccacgcgctcctgaatggtgtcccggagaaggccaacgggcaccatagcgaggactcgttgagtccggtcggaagtccgaagggggccgtcgctgtcgctggatcgccgggcagcgataacctcatgaagaagccgcttccgatcctggacgagcgactgaagaaacgggtccggaagttgtcccgttccaacagcaaggacggagtgctcggagtcgccggaacgcccaattttgttgccccacacagaaaatggaagaacagtcggcgatcgcgcaacggctatggccgtggactgccaaagaagggcggagccgggggcaagggggtttggggtaaacccggctcggaaatctaccaggaggtggacgaggacgaccagaacgatccgaacttcgacctggacgcgtacaacagtcaccacaatatcgaactcaaggaggtcgtcccggagatgacggacgaggagttccagaagaaggtcgaacccatcttcctggagtactacgaacacggcgatacccacgaggtggccgagagtctggacgacttcatcacgccggaacggcgaccgctgctggcgaagattgccgtcgagatggccttcgagcacaagcagtcccagcgggagatgacctcggtgctgctgtccgatctgtacggccgcaccgtcaccagcaaagatatttgcgccggattcgacatgctgctggtcaacatgccggacctgatcctggacaccccggaggcgccgcacatcctcggcaacttcattgcccgtgccgtcgcggacgattgcgtcccaccaaagtacgcttacgacatcgagcgggaggagctgtgcccgcaggctcgggaggccctcatccgggcctattcgctcctgtcgcaacaccagggctggggccacctggacgacgtctggggcgtcggcggggcgctccggcccgtccaaaccctgacccggcagatggccatcctgctgaaggagtacctgctgtcgcgtgatctcgaggaagcgcaccgctcgatcaaggagctcgaggtggtgcacttccaccacgagctgatttacgaggccatcgtaatgacgctggaagcgttgaacgagcaaaccgaggaggcgatctgcaccctcttcaagtcgctggacgaaacctgcatcgtcagcccggaacagatggagcaaggcttccgccgggtctacgaggacatgaccgacatcgtactggacattccgctcgcctactcgatcctggatcgattcgtgcagcgctgccagcgtgccgggttcctcagcgatgccctcatcaaggatttgccttcgagaggccgcaagcggttcgtctccgagggtgacggtggccgcatcaagccagtcaatctgcttgcccgtgacttttaagtgactaagcgcgctcctctagcgccatctgcattgagaggggagttgtggcccaaccgcgagcgtatctgagttgaatcgaagggacaaacgcggccgaaggctctccccctcccgaacaagaagtataacaagaaacaaggcagcaatgttctattttgtttgcgtatgggagcggagaacagtggacctctaccggagaaaaagagttgcaagtgttgaaaatgtcgatgaaggaagattgcctataatagcattgccgccgccaaaccaagtcaaaatcagagaaaaagagagaattgcaggtttgtcacaaaagtcaacctaatctactgttaatctacaaaacaattcacagcccgagcgcatcctacctatacatacttgtattttgatataaaaccggccacagaaaagaccgagtgagatttgaaacaaacaaaactcaaaccatctacctgtcgcgagagagaggaagagtgtcgtcggcttcaagaaattagatgtgcactctttctgctttcgtctagcagttaaggcatcatttaccatcaaagctactaaactacgggaaggaagtgtagaaaaggatcagccgaatcagcactgcaggaaacgaacgtaaagggggaagtggaagcaaaagaagaagaacgaggattggacataaaacaaaaggtagcagattcaagcaaaaagcaaggtaaatttatcataaaattaagcttacatttaaaactcatacaaaacaaacatataatatgcaaaaccatacaaaaaaaaactattcaaaccaacatataacaaaaaattaacgattaataggtgagataaagtgcacagttattcacttgattcttatttaacatgaaatacttcttattttcggaataaatgtgtcaccaaaatattgcaaaagttctaatataaatttatcatccaagtaggctatcgcagcagacaaaataggcgaaattcacacaacttaacacgaattttagagcattttaggccattcagaagcatttgtctgtctgtaacctccacactaaatacttaagttttagacctacattagaaaaggaatcagaaagatttgaattcaaaaaaagttagaagacaatttaagcaccttcttagcttgtaggatttgttccatttcaccccctcggcaaaatgaaatttgtttcagtgtagagagttgcatccgtggcagtggtccacactttttgatcgtttttagtttagaaagagcaagagcatcgggtcctttagaacgcgacctttgtttgaaacacttttgaaaccactaatattggataagcgaatgaagttgaggtcattgaattcgggataatacagaaaaacatacatacacacatggaaaaatgctacctgaactttttacttgtttgatgaatatgatgagaatagagagagaaagagagtaaacgggcaagccaactctcacggaggatgctaggaaactgagacaaatcgacggtttgtaaattgtagattctccaaatgaagtcaaaacttgattcgttcttaacgattgtgatcggtttgtctcggtttcacctcccgcaaagtaaaaacacctgtctatgaatgatggcccccactagctgttagtctatctttttggaacctggaacctgtccctccccccctgtctggtaagggaaagaaaaacgaacattgcattgaatgagcattgggaagcagaaggaaggacacggatcgaagggaaacgatgattgtaagtgttaattctttgaacttgagagaaaaggcagaaacaaatgcatataacatttagaattactactactgtatcgtactgagaataaatctgaaaacaaagaaatcagtgacataataaacctatgggtccctatgatataggggtaccgaatgaagcaaaagcgtaaaaaaacaatgaaa

SEQ ID NO: 366 - DNA, 624 bp, Aedes aegypti
atgaaggtgctaatcgttttggcggttgttagctgtctagcttcagtatatgcttccaaaaaggcgatcgtatttctgcaaggcacttccggcgtgtctggaaacgtaactctatcccagccatcatgtaccgagccggttttgattgaagtcagcatcattggactcagtcccggaaagcatggattccacattcacgaaaggggtgacttgagcgatggatgcactagcacgggaggccactataatcccgataaggtgactcatggcggcccagctgatcaagttcgtcacattggtgatctcggaaatgttgttgccgatgaaaatggaatagcaaagacctcattctcggacacggtcgtttcattgttcggatcctacagcgttttgggccgtgctattgtcgtccatgccggagtcgatgattttggcaaaactaaccatccagattcgcttaaaaccggaaatgctggaggcagactggcttgtggaatcatcggaatcctatcaccattcgatgaaccagagcagctatgcagtggcggtcaatctattagacccattcatgttgtgctaggattgatgataggcagtttgatagttcgtgcccttggatactga

SEQ ID NO: 367 - DNA, 918 bp, Aedes aegypti
cacagaccacgaagcggacaagttgaaagcccaatggggaacacaaaaatcacatgggctgttacagcccttctagttcatgcggtatcagccaccggagttaatccttttatggtaggaggtgtcccagtgaccttaggggagtttccagcgcaagtaggaattcacattggcccgactgtattctgtggtggcaccattctgaacagccatcatattctgacggccggaagttgcgttctggatggccaaaacaacctggtcgcagccaatcagatgcaggttcgagcaggagtgatcacaatcgacgcaaccaacccgaccacgctagtcgatcgagttttcgtccatccacattacaatcctttcacgtttgaaaatgacatcgccatcctgcgaacaaccacagcgttcacatttccggaaactgcccaacctcacattgctcccgtggagttgaaccacaaaattgtcccggaaaatagcggatgcgaagtagccgggtggaactggcaggccggaagcacaaccacggcacttcaacggttgtttgtttcgatctacccacgagcgtattgcaaccaggtttacaacggaatgattcagagacagatgatctgcaccacgacggccagtcagaaccaggcactctgtgtggcgaatcgcggcggtggactgtactatggcggccagttatccggaatcgcttcgttcggctttggatgcggtgcgaataacacggcggttttcacccagattcgctactatgagcagtggatccagcagcagtttgctcgcacagacaatcctcctccagggcccactccgatgccgggaattggcgggggatcgacaatgctgaacctatcgatggtggcccttcttctagcaacaataatcatcacacttgtgcgatag

SEQ ID NO: 368 - DNA, 1103 bp, Aedes aegypti
atcagtagtgtaagcagatcagtagtttgtggactcagtatgggatcagtcacgttgcttttggtgctgcttggaatcgccgctgtgcattctattcctgcttctgatggagcgcgttccaggcgtgatagtccttcgttgccggagcctggcgtatgcggtttgagtttggcagatcgcattgtaggtggaactaggactgccatcaatgcatatccgtgggcatccttgctgatggcccaacataaggatggtggccaaacaattccattctgtggagcctcgttgatctcggaccgtttcgtcctatctgcagctcactgtttccccgaaccgtccgatagtttcataatagcaaaggttcgactcggtgaatgggatattctgagcaaaaaagattgcgaagaagattactgttcagataatccgatcgatgcaacagtcgagagcttcgagattcataaggactactcgggtgaaccggatttccacaatgacattgcattggtcaaactcgcgaatccagtcaccttcacggagttcatttcaccggtttgtcttccggcggcggagaaatttagaactaaatctattagtggacgaaagtttaccgccgttgggtggggtgacatcaagtatgatgctaaaaaccgagatgttcaaattggaaaccgatacaagtttgaggtcaaacttcctggagtgggcctggaaacgtgccgcacatcttatcccaacctgaaggatacggaaatgtgtgctggaaagaccggtaaggacacttgccagggtgactccggaggtccgctatcgattgcggagaatgacggatactggtaccagtatggcgtggtcagctatggttatggttgcggttggagaggttatcctggtgtttatacccgagtgaccagtttcataccgtggattaaggatacaatgaaaaaactaagcaagactactgcaaagccaactaccaccgaaagctcttcaatttcatcagactgggaatatttgatccatatacttaataacatatatgttgactgagaaaatgactgtgctaagaaataaaatatttagtaatatttgacaaatgccat

SEQ ID NO: 369 - DNA, 1053 bp, Aedes aegypti
agttcttcatataatgatagcgatatcatgcatacttcacatttgattgtttctttatttttcactctactgtcgacttataatcatctctccacagcgctatcaactggtgattctcgtcagtacagatcgtgttcagaagcaccgccccaatccggagtgtatacaatagccctacaaaacggtttcgcaccattccaggcttactgtgaacagcaaaagtacggcggaggttggttagtattgcagaaccgctacgatggatcaatcagcttcaacagaagctgggacgaatacagaaacggcttcggaaataccgaacaagagtactggttgggactggagaaaatccatcaggttacgatgaatcagacgcacgaactgctgatcgtcatagagaatttcacggatttttcagcccacgaaatttactcgggattccgggtggaaaatgaagctacaaactatacgctacgtttgtccaacgaggagtactcgtaccacggtacggcaagggattcattttgggtatatcggaatgaacaattcagcacatacgatcgaatcaacgacaaatcgattttggactgttcaatccttaccggaagtggacactggcactatgattgtggaactgggtacaaaagtagtaatctgaatggtgaattcagcagagctgtcctcggaggacggcgtggtatgtggtggggcacttttggtggccaacaatttcctttgcgaaagaccagaatgatggtaaaagtaggcgaaaactagcatagtatcgtgccactgaacttgttattcaaatttattagtgaaatataatgccccatacttatataattgatgcaaaagatcaaccaaatatgacagaacagcttccagaatatacttgactaaaagttgttagattatttacttatttatccattattttttcagtttagtgcaacatcaataatctttataaaacctcatctcttaataaaatttacagatactctggcttcattgggccaacacatctgtgtattatatccacattttcac

SEQ ID NO: 370 - DNA, 2302 bp, Aedes aegypti
gttgcatatgcgatctaggaagtgtgtcgtccacttttgatgccatatcaggacttgacactaattctgaaacaatagaattcaattgcagttttgttagaaacacaagaagaaaaattcaagttcttcaagttctttgtgaccccatcagtggacgaaccccctgcggtggagaatcggggcgtaaaaagctcaccactcgagcgcgatcccactcagtctagtggagcgcctcgtcgattacggtgatcgagagcaacttcggaagaaacaacgccgcgccgcgcaattaaatattatcgtcgagagtggattgtatattcagttgcaatcgacacaacgcagtctcgcaaccgacctcgtggtggttggaccggttttcgcgcgcttactaattttgaggtgtttctgattataagttgtacgaaacggtgatcttgcacatattgcagcagtgacgacaatctgtagtgaccatagtgagcggtggcaacacgcaacacaatagcagtcaatcaggaaaagcagcggaggtagcatcagaaaatgagatcccttccaacggttgtgctactcgtggtagcactgtctgcccgcaccatcagcgcccagtgtctggcccaggatgacaacattcagcacaccaaggcggacaatcccctgtcccggaatcggctctacaagggtgaatccatcttcaccctgaaactgctggaggccatcaacaccgcaaccccgacggaaaacgtatttttctcgccgtacagtctgtaccacgtgctgctgctggcctacttcggagcacgagccgaaacggagaaaatgctccgaaatggccttgaattgcactggaccgaggataagcccgtggtctggcaggcgtacaacattggcaagaagtcgttggcggcccgattcagtcagagcggagacattcagttcacttcagtcgacaagcttttcttcggcaaacaggtcgccatccgtgactgtatggaggacaaattcttcgaggaaattgaaaagctagatttcgaaaaggatgctgatggtcaaagactgtacatcaacaactgggttgagaatgttacctacggtgagatcaaggacttgttgatccctggatctatcaccaagcagaccaagctggccattgccaatgccgcctatttcaagggaacgtggcagactgagttcaaaccagagcaaacgaagaaggaaatcttttacgtctccagcgaacgtcaggagttcgtcgacatgatgcacgtgttgggaaccttcagccacgctgccaatgaaaaactcggatgtcacgtcctggaaatgccctacaagggtcaagacgaatcaactcgcatctcgatgttcgtctttttgccaccggctgtccccaactcgctggagcagctgctggctcgattgacatccgacaccggtatcctgagtgaaatcgttaacgaaggtatcccccgcatggtggacgtcaaattccccaaattcaacatcgagaaaaccgttgagctgaagccggttctggagcggctaggtttgggcaagatgttcgaaaacggtgctgattttacggctttctcggagaaggaacagatcggcttcgacgaaattctccagaagtccaagatcgaagtcaatgagaagggttcgacggctgcctcgagcacggtactgttcagcttccggtcgtcgcggcccgttgaaccggccatgttccactgtaaccatccgtttgtattcctcatctacgactatggcacccaagcggtgctgttcaacggcgtctaccgtcagccggaataacaatgtgatagagcgagcggacagagtgttctaggtgataagactttgttttaatttgtgtactatattcaaccacacagaaggtagctaacatttccaactgtggagaaatgatcccgctggcctggcagtgagcgaagcggaatcaccctaaccaaaacgttttcttttatttattaaagaacaaacaagagaccaatcgagcttgtaacaaccgaaaaaggatctgaatccaaaaactctggaaataaactgtgtttacaaaacggtatacgtgcgaagttacacattttaatcacacatccatggggtggtccgaaagattataatcataaatattcagactgtattttagagggaaatgttttggtagacattgctaaaaagatgttttcgtttgacaatcgctcaagttaacatttgcttttaagcagtagggcaatttggttgactccttcccgactagtggattacaacagagttg

SEQ ID NO: 371 - DNA, 1746 bp, Aedes aegypti
aaatattgtggcgcagtgaatcagcaaatcgatcgccactttcaattagttttctagtgaaatttgaatctaatttcatgttctttgactttttgcagcacttgatattcaaacagcagaaaatgaccgaccgagaaagtataaagatagggtttgccgtgcagatatccggaaacaagtacgccgataaggtgcgaactgccctggaaggcgttggcaaggtggacatagacgtggacaagggtagcgttctggtggatacggcgctgccctggacagaagttcaccggttgattgagaacaccggaaggcgagcggtgctgtccggtttcggaggtcagtccgccgttgcgatggtggatcacggcaacgagctgagcaaggtacgaggcgtagttcggttctgtgctctgtcgactaacgagcagggagccgttgtggacggagtgatcgatgggctgcaggaagcgcggccctacaagctgaacgtgcacgagtgtggcgacatatcggaaggatgtgcctcggtgggtgaggtttacgactccaatgatatacaatcggacgagaccggaagggcaacgattcggttcgtgaacgaccggctggcagtgtgggacctcataggaagatcagtggtcataacggaagcggaaggggaccgaaggctgtcatgcggaatcatagcgagatcggctggcattttcgaaaactacaagaagatatgcgcctgcgatggagttacgatttgggacgaacgggagagacctctggccggcagtaaacggcgagagaatgctccagcgtaggtaggactcttcgatgggggtgggaattgatatggccatttaatggataatggtggactgagaaggtaaataatacagggcttataaagctatcaatggtttttaatcatcatcgatgacaatggacgtttcacaatccatgctcacattgtcgcgtgtcctttcattgagcagtttagctagatgggctctgcatagctgtttgtagttcacaatcaactccatacactttggaggagtactcaccgagatgttgatgtgcaccttaagcacttccggatccttttccaggccgatcaatcttgtcattagttccaccacatgcgcaaactgctccttcttgattcggtaactcatttcacctatcgtagccttataccaaccggaatagcttcccaaaacgcgttcgttggacatgcaaatctccctagcgctcaccatcaggatcatgaaggtttcaaagtctccggcatctaccactcggttgaacaggtccttcaaaatgcctttcacgcgaacaatttcaaccttatcgccttcgattgcaaccgccaccatgtgcagcagggcgagatagtacttccaggacaagctcttcgtttttgccgaggcgaaaagcgtttcgatcgcgttggcctggtcttgtaccacttccagcatgattcgtcctaatgtggtacttcggcggtcttcgcattccgctctccactgctcttgcagaccaacagcctccgataacgcatgaagtttctccttcccaagaagcagttgcaggtgttgggtacggagccgagtcaggtccggatccggtagatgggattttagccgttccagatagttgcacgggaccacattaggttcggcgataaggtcgtccagaacggaattgaaactgtcgtgaaggacttcccggagggtcgtagagtaggatgtgtct

SEQ ID NO: 372 - DNA, 1421 bp, Aedes aegypti
acagtcgtcagtcgagcagccgtgcagaggcaaccagtaataaatcgagcgaaaagggtgaactcgaagaacgagcggcggtgactaaaatttacgcgacactaggcaatttgaaacttgatcgttttttgttcgttgcttccgaaaattttcacccataaatcgtgcaacgtgataggcagtagctgtgcgaaaccgaccgctaaaagcaaattaagaacacagtgaaaattgcccggagtatttttcgagaggattaacagtttttgctgcaatttgcaggacaatagagagaaccgaatgcggctttaccgaagttctatgaaaacagattcgttattttgaaacccggcaaacagttcattactcattgttgcgtgaataccctcgttccggtgttttggtgctttggagtgcagaattgtgagcagcaacgcgtgttaccgatctcacacactagcacctctgcccacgtagcattatcacgtcgaacccatcaaagaatcgttccactggagactgcagtctgacggtcgaaaaatgaagttcaacttgtttgctgtgctgttgattgcggcatttgtttgcgccggctatggggccgaaattccaccacctacagttcccgaaaatggagatgttgtgcggacataccaaggagtgaacgtgtacaaaactgaaagagcctgtgccagacagggaggcctgtgcgttcagagaaacgactgtaaatcacttaccgccattaaaggactttgtccggaaaatgccaaccgcggtgtggagtgctgttatgaagtgaatccacccaaaggacttcggtgccgtcagtatgatgcaaaatgtgacagatggtgccatcgtgtgcagcaaatgccagccgtagactgcgccgaagggcttgtatgttgtgcaagtgacagcaaaaaatgatgacttgttatgttttcttgagagcttgcctatataaagtacaaattttaaaataagttagttaacgatatatgtctaccgaacgtttgcttaaattcacttttataacgccatcaatgagtgatacaatcggaagcggttcatacctgtgctgaacatttgggcgaatgtatgacgcattgtcgatcgcaagctttgacacgtagagcaactgattgcggtgaagaagaaacatgttgtgtgctggtggtataaatgcatttctatgacaatgataaatttgaagatcaaacataggtgtatgcaacatttataatgtttttttttatgaatcaagtgtaaaactgagtacaaataatcgatgtgtttaattaatgttagtatgtattatataaatgtttttgaaatatggaaataaattacagacaacagttcaataaaactattaaaaaactggatggaaatacattacatgtgtaaaatatagg

SEQ ID NO: 373 - DNA, 2143 bp, Aedes aegypti
cctcatcaatatcgtagcaaaagtcgatcagttgacacgtgtatttgatatagttctgaatagactcggaaatggattacaattggttcgttatattcacatgtgccattttaggagcggtctcgagctcagatttgggaagtgaaagtgtctccaatataaccacatctgatgatcgtcagggcagagagtttccattctattcactcggacggattgcgaatagggtgtgtacgggaactaatggtttattgggaacgtgtcagattcgaggtgaatgtgcttcaaatggaggaataggatcaggacggtgcagcaccctaactgtccaggctgtgtgttgcgtgtatattagcacctgcggtggatctgggtcgaataatgtaacctatttccagaacgctggctaccctatgccttacaatggaggaggagcctgcacatacacggtaataccaccagacagcactgtttgccagttgagagtggacttcagcgcatttacgctctcgcaaccgaacggagacggattatgttcggttgataacatccaaatatttggcggtagctctcgggtgccaacaatctgtggtgataataatggacagcatgtgtatgtcaacttcaatgggcagaactcgatcactattaccgtttcgaccactgcggcaacatccttcaaccgattgtggaatctacagttgagcatgatttcttgtacgagcacttatatagctccggccggatgtttgcagtactttttggacagcgcaggaaatattcaaagtttcaattatggctcatcagctaattcggcattcagcgctatggggatggttggtactcgacagatgtccaaccaaaactatggaatttgcattagagcaggagccgatcaatgctcaatatcatacaacgtgccctcaggagacctttatgcgtttacggtaacgggtgacgtattagcattaacacaagatatgctcggtactcctggcgtcgctatggtaggaagcggttgtatgtcggactatctcattattccgaatccaactggtgtggcgagtgacaggttttgcggtatggcaatagaaccagttacaaaattcccattttactcgcttgggcgaattccgaacacggtttgtacgggcactgatggattatcgggaacgtgtcaaattcgaggcgaatgtgctgcaaacggcggaattgcatcgggacgttgcagcactctcacgactcaagccgtatgctgcgtttatattggcacgtgtggtggatctggatcgaacaatataacctatttccaaaacacaggatatcctacgccattcaatggaggtggaacgtgtacttatacagtagttccgccggacaataccatctgccagttgagagtggacttcagtgccctgacgctgtcgcaaccgaacgcggatggagtgtgtaatgtggataacatccaaatttctggcggtagctctccggttccaactatctgcggcgataacaacggacagcacgtttacgtggcctttagtggaacgagctcgatcagtatcactgtttcgacgacggcatctacatcgtttagccgagtgtggaatctccagttgagtatgatttcttgtaccagtgcttacgcagcacctgcaggatgtctacagtattatttggatggcactggcattgtgcagagtttcaattacgggtcagcagcaaacccgacaaccacttcctcagttggctctcgacagctggttaatctaaattatggcatatgtttccgatcaggagctggacagtgctccataacctatactccgccatcgacagatatttatgcgtttactttgtcggaccttgtaacgagcgaaaacatgaccaaattgggaaccgcttcaggcggttttaagggaacgcaatgcaccacagactatctaattattcctaatccaaccgggttaacggatgacagattttgtggtatgggaattggaacaactataagtaatacgactccctttgttttgtactacatcacaaatggtgacgaaaaaggagatgatggaaatcgaggctttagttttcagtatgcccaaaatgcgtgtccaatttccgttggctaaatgttaaataa

SEQ ID NO: 374 - DNA, 827 bp, Aedes aegypti
ggccgtctccgtctgtctctttaactcaacggttcgtcggcactctcgtcaatcgtgtcgaagccaccaggaagtgaagacatttttgcagctgttttcttcgaaacaatttgatagctaattcccagtcaaaatgccggctaaagcagtttgtgttctgagcggcgatgtcaagggcaccatctttttccagcaaaatggagattcggatccggtgaaggttactggcgaagtgaccggactgaagccgggcaaccatggattccacatccacgagttcggtgacaacaccaacggatgcacctcggctggaccgcacttcaacccgcacggcaaggagcacggtggccccgatgccgccgaaagacacgccggagacttgggcaacgttgtcgccgatggcagcggagtcgccaaggtcgatatctccgacagtcagatttccttgtccggaccgctgagcatcctgggacgcactgtggtcgttcatgccgatcctgatgatttgggcctgggtggacacgaattgagcaagtctaccggaaacgccggtgctcgtctggcttgcggtgtcattgggatttgcaaagcataaaccttccaaactgtaacggttacggaagagttccacagaaaacattcgaacgggattcgagttgcatcctcgtactaacctaaaaccttcccttgggaaatggaacctgtgtccttaaaaaaacgtcgatttgatagacggaaagtcccttagttgtatccatatgttctatgaacaaattgtctactgttttgtctggtctgaataaagtcaaaagttcattactcaaaaa

SEQ ID NO: 375 - DNA, 3207 bp, Aedes aegypti
atgtacggtggtaaactggcgtaccttgtggcgctgtccagcctctggttggtacacgccgtagattacgcgcccaaaatggagactgttaagcagtggagcttcctgtcgtacaattttccctgggactaccccgcaaacgataaggagttctacaacccggaaaacatcgttgcgaccggtatcgaagtaggctacgatcgcatcttcgtagcaacgccgcggttgttcagtggagtgccggcaacgctgtctgcgatccctcgcggtacccatggtgattcgccagcgctccaggcctaccctgattggacgcatcacaccgccggcaccaaggagtacaactgctccgacatcggactggtgtcggtctaccgtatccgaattgactcgtgcaatcggctgtgggctttggacgccggtgtttcgcgatcgctggaagacttcgaagtgacctgccctccgaagattttggtctacgatctacacaccgatcaggttgtgcggagaatcgatttccctccggaggtcgtccgacgtgaatcgctgtacaccaacatcatcgtagacgaaaccggatccaggccggagaacaactgtgacgatgtgttcgtctacattacggacaccgtggcgccaggaatcgtagtctacgacagtggaaaggatcttacgtggcgtgtgagccatccggccatgtacccggacccagactttgccgaatccaccatcttggagcaccgcttcaccctcatggacggagtcgttggcattgctttcgatcaggaagccggcatcatctacttccaaccattggctactgacagattgttctctgtgacgacggcggcacttcgagctggacctcttccattcggaaaggatcttcccgtcaaactggtcggccgtaaatcatcccagggaatcggtctagctgtatcgccacgtggaggcaccatcttctattcgcccttcacggaaactgccgttgcatcgtggaacccccgtaccaatgagcatcagatcgttgcgcaagaccaggaacgtctgcagttcgcagctgacgtccgcaccccggcccgcgacggaaccgccctctacgtcctgacctccaagttccaccgattcttcctcaagaacgtcgacgccaacgagttcaacacccgtattctgcgcatcgacggagtcgtcgctcccaccctaccaacgatagccccgtccggattcggaccaaccgtcgagaccaactctccgttctacagcttaccggccgtaaccccgtccgttgccaattccttcaaaccacttccaccatccgtccccttcaccaagttccccgcgcacaagtcccccaaccccaagacctacgccttcatccagaactactacgtgaacaacaagcaaccatacgtttacgaaccggttccagtcatcgacaaaaccaaaaccaatcccttcttcatcctgaacagtggcgagaagcccttccccgcgacgcaacagcgaccccagtacggtctcaacggagaaatcttcttccccaagatcaaccaccacttcaacgacttcaacggccttcggtacgccaaaagcttacgggccaatctgacggcgacgccattgttctctgtgacgacggcggcacttcgagctggacctcttccattcggaaaggatcttcccgtcaaactggtcggccgtaaatcatcccagggaatcggtctagctgtatcgccacgtggaggcaccatcttctattcgcccttcacggaaactgccgttgcatcgtggaacccccgtaccaatgagcatcagatcgttgcgcaagaccaggaacgtctgcagttcgcagctgacgtccgcaccccggcccgcgacggaaccgccctctacgtcctgacctccaagttccaccgattcttcctcaagaacgtcgacgccaacgagttcaacacccgtattctgcgcatcgacggagtcgtcgctcccaccctaccaacgatagccccgtccggattcggaccaaccgtcgagaccaactctccgttctacagcttaccggccgtaaccccgtccgttgccaattccttcaaaccacttccaccatccgtccccttcaccaagttccccgcgcacaagtcccccaaccccaagacctacgccttcatccagaactactacgtgaacaacaagcaaccatacgtttacgaaccggttccagtcatcgacaaaaccaaaaccaatcccttcttcatcctgaacagtggcgagaagcccttccccgcgacgcaacagcgaccccagtacggtctcaacggagaaatcttcttccccaagatcaaccaccacttcaacgacttcaacggccttcggtacgccaaaagcttacgggccaatctgacggcgacgccattgttctctgtgacgacggcggcacttcgagctggacctcttccattcggaaaggatcttcccgtcaaactggtcggccgtaaatcatcccagggaatcggtctagctgtatcgccacgtggaggcaccatcttctattcgcccttcacggaaactgccgttgcatcgtggaacccccgtaccaatgagcatcagatcgttgcgcaagaccaggaacgtctgcagttcgcagctgacgtccgcaccccggcccgcgacggaaccgccctctacgtcctgacctccaagttccaccgattcttcctcaagaacgtcgacgccaacgagttcaacacccgtattctgcgcatcgacggagtcgtcgctcccaccctaccaacgatagccccgtccggattcggaccaaccgtcgagaccaactctccgttctacagcttaccggccgtaaccccgtccgttgccaattccttcaaaccacttccaccatccgtccccttcaccaagttccccgcgcacaagtcccccaaccccaagacctacgccttcatccagaactactacgtgaacaacaagcaaccatacgtttacgaaccggttccagtcatcgacaaaaccaaaaccaatcccttcttcatcctgaacagtggcgagaagcccttccccgcgacgcaacagcgaccccagtacggtctcaacggagaaatcttcttccccaagatcaaccaccacttcaacgacttcaacggccttcggtacgccaaaagcttacgggccaatctgacggcgacgccgtaa

SEQ ID NO: 376 - DNA, 6427 bp, Aedes aegypti
aactcatcaaaatagcgaccacggcggcagcatgacccgtcggtggcatccgacctggtcgggtgtgctcctgctgttattcggcttcccttcgattctaacctgggcccaacagcaacagaatcccaacgacgtgccacgatacaatccactcgatccgttcaatcgacaacgatacaatcctacctcaagcaatttccagcctcagtcaaacccaaccgcgagcaacgatcctcggaatccaaacttcggcaaccgagatttctacgggaccgactcgaacagcatcgacaatcgcttcgatcccagccgtggcgatcgcgatcgtgatcgagatgtactattccaatcgacgacgcctcgggagtttcctggtacgcgattcggcacaacccctcgaccgagaacattcaatccgcagagcaacagaaatgttttcctggaccaatccaacaatccgttgaataaagagatcacgtactttgtcgtggcatcccgcatggtccgtcccggtcagatttacaaggtatcggtgaatctgctggaggcgcaacatcctatggctgtacgcgctagtatctcccgtgacggcgtagaacttagtagcgaactaaaatcggtacgcgttggtatcccggaaacgctacttatgcgcatccctccgaccagcgtagtcggcgactataaactacgtgtggaaggttcttacgaaaacaccttcggcggatacattttcgtgaacgagaccaaactgactttctcgcaacgatcaatgacgatcttcattcaaacggacaaaccggtctacatgcagggagaaatggtgcgattcagaacgatcccgattactactgaactgaaaggcttcgacaatgccgtcgatgtctacatgctcgatcctactggacacatcatgcggcgatggctgtctaggcaatccaacttgggatctgttagcttagagtacaaactgtctgatcaaccgatgttcggtgaatggagaattcgtgtgattgcccaaggtcaaatcgaggaaggaaaattcagtgtggaggaatattatcagacgagatttgaagtgaacgtaaccatgcctgctttcttcttccaaaccgatccgttcattcacgggaaaatcatggccaattttaccaatggaacacccacgagaggtaacctaacacttaaggctaccattcgtccaattggttggatgaatcccaaagctatcaatcacatgaacagagtatggaataccggcaaccgtcgagagttggaccctaacatcccatactacctgcaatacacgaacccggatctgttcaacgctcagtcaaccttcacaagccagctcaaccaaccagacagccaataccaagatcaaaggtatcagtcgaactatcaggacagctatgtgatcgaacgacatttcaactttgatgaagagtggcctttctggatcaagaaaccgatagattctgccgagcaatgggattcgtggacaaacacctacagagaatccctgccatacttaagatacttcaacggaacgtatcacttcaagttcccgatgtcagaactgtcccaactgttccaaagtaatctcgctggaatggaagtgttaatcacggcccgtgtaggagaaagattctacgacgaagtcattgaaggctatgccatgacacggatctacaattcttcgattcgagttgcctttatgggcaactctccccaggtattcaaaccctcgatgccgttcacggtgtacctgatcgcggaataccacgacggatcaccgttaccaatcgatccgctatatccaggtcggatggagttatccggcacgatcgatagccgaagcggtggaggccgcaacacatacgacgtcaaggaattgcaaatgtcggacaagcctggcgtgtgggaattgaaaatcgatcttcgcaacgatcttaatctggagaacagcaagcagacgaatgagtttctgaatcaaattcaatcgatgcgactctcggcgaactacatccacccatcgggtgaacgggcgagcgctgaacttctgctgctatcacacttctccccgaacaaccataacataaaggttctgacgagcaccagagacgccaaggttggagagtacatgatattccacgtacagagcaatttctacattaaggacttccattacattgtcatgtccaagggaatcgtgctggtaaccggacaggaaatcatatctggtggtgtacgaacactgtccattactttgagcgcagaaatggcccctacagcaacgatcgtagtttggcacatcggccggtacggaaaggttatcgcggacagtttgactttccctgtgaatggaatttccagaaacaatttcacggtgtttatcaacaaccgcaaggctagaaccggagaaaaggttgaagtggctatctacggtgaggccggttcgtatgtgggtttgtcgggaatcgacaacgctttctacaccatgcaggctggtaacgagttgacttacgcgaatgtgattaccaaaatggcaaactttgacgaacaaacgaatggaacattcaagcaaacgtggatttcgcacgagggagatccagatgagctggtttactatcccagttcaacatttggcatagatgcgaaccgtactttcgaatacgttgggcttgtggtgtttacggatggggtgattcctcggagaccgttgagttgtgatccagctatgaactacagcgaatgcttgagcggaagatgctacaggagcgataaacgatgtgatggctatttcgactgtgaggatggaacggacgaagctggatgtgataacaggaatagcacggcgttggctgaattccgaaagtatcgattcaacagaatcttgaggcactatcagaatgtgtggctgtggaaggatatcaatatcggaccgcatgggcgattcattttcaatcttgaagtgcccaaaattccggcactgtggatcgtttctgctttcggtgtgagtactagtcaaggtttcggtatgcttcggaagcctttggaatacgtcggagtgcaaccgttcttcatcaatttggaaatgcccacggtttgtaggcaaggagaacaggttggaattcgtgtggctgtgttcaactatcaaacagtggatattgaagttactgtggttctgcatagctctccggattaccagtttgtgcacgtggaagaagatggtattgtgcgatcctacaacccaaggacatcattcggcgaacatcaattctacatctacatatatgcgcaggattcttccaatgtatacattccgattgttccgactcgtttgggtgatattgaagttaccattcacgcatccactcttcttggagcatatcaagtcagtcgaaaaatcaacgtagaacctgatggcctcgtccaacatcgtcatcaatctacgctgctggatctcagtaatcgtgcttacttcttccaatacatgcatgtgaacgtaacggaaactcccattatcccatacgaaatcgatcgttactatgtattcggttcgaacaaggctcgtatttctgttgttggagacgtggtgggcgccattttcccaaccatgccagtcaatgcaacatctctactatcgttgccaatggactcggccgaacaaaacatgttcagctttgcggccaacttctacaccatacagtacatgagagcaatcaaacaacgtaacaagaaaacggagaaacttgccttccactacatgaacatcggctaccagaagcagctcagttatctcaatgacgatggttcgttctccctgttccgtgcagattggaatcagtccgcgtcgtccgtatggctgaccgcttattgcgctaggattttctcggaagcatccttctacgagtacgaaaatttcatctacatcgatccattggtgatccagaaaaacatccactacatcctgcagcaccagaaggatgatggttctttctgggaagttacctggctaccggatcggaaggtgaatcagtcatccgagcatcctcgcaatgagatcgtccgttccaagaacatcacactgacggcacatgtgctgataacgctcgtttcggtcaaagatctgtcagggcgactgggttcgagtgttgccttggcagaacaacgtgcatctcgatacatagaacgcaacatcggattgattaaagactacggatctccgtacgaaatcgctgtggtgagttatgcattggcccaagctaaggctccgcaagctgagcatgccttcaaaatcctagccagcaagatgagatcgatagccgatctcaactactggggtaacgatgaagttccgcaaccgccgagcaagttggaaaatcaaaagtacttcaaccttccgcgactaccgtacaaatacgattcactcaacatcgaaacgacggcctacgcattgctcacctacgtatcgcgtcaggaaacgttcaccgttgaaccaatcgtccgctggttgaacagtcaacggttgatggacggcggctgggcttccagtcaggacaccggaattgccatgaaagccctcactgagtacagtacccggaatcgcgtggcggatgtcacttcgctgaccgtcaccgtggaagctacgtctcttcctggagaatctaaggtcctgcatatcggacagcacaatctggcgacaattcaggatattgagattccaaacgcatggggtaccgtgaaggtccaagcaaaaggtgtgggttacgctattctccagatgcacgtcgagtactcggttgatacgtataagttccaaacgatgcctccggtgaaatcgtttgacctgacaacgcataccgtgttccacggtaggaatcagtctcacatcagttatgtgatctgccagcggtggaccaacactgccgaatcgatccgttctggtatggccgttctggacgtagccgttccgactggatacatgattcagcagcagaagcttgactcgtacactatcagccaacgagtacgcaacctacagcgtgcacgctaccaggagaggaaggtgttgttctacttcgactatttggacaacgacttcgtttgcgtgaacttcacactagaacggtggatgcctgtggctaacatgtcacgatacctgcctattagggtttacgactactacgcaccagagcgcttcaacgaaaccattttcgactctctacaaacatatctgctaaacatttgcgaagtatgcggtagctcccagtgtccgtattgtaggatctacaatactgccatccggaatccggtgtcggttctgttgctgctcttcaccagcgtactcatagttgcccgccactaccgaatagtgaatccgaacagttggatcttttggaacgattaggaacgattgctcacaagagctgccgcacgcattaaaaacgaagagcagtgtccatcagacttctgtgtacataatccctatctaatgcgaaatcgagaatctctgcttttttaaacggagactgcgcgacagcgtgcaattgcgaattcgtctatgatgttcatttttatacaaagacttttttgagttactgtagtgtagtattgtccagacatcatactcgaatcgtactgtgtgcatttcatgtcatgtcaattttccgtgcgattccatccaaggcatttgtgtacaatgaacaattcttccctttacatttcgcaacgagacatcgcgatagacgtaggaaaaagtaagcatgaagcaatgccgtttagattaggagaaaaacgttattttctcacgtgttcgattttttttatttttagaagtgctaggaaagcgacagttattgttttattattttaaatattctttctgtagattgtatgtagtacgaattgtattcgtttactagccttttaggatttattatcttacgcaagcagaaatcttcaggccgtccaaattttctggtcataacattttttttttttatttttaagatcaacattagttttaattttactccaggaggtagcaccacaaataacttaatactgaaataaaatgacaatgatcttttaggtttcaatgtccaataaactcagcatcgtactatagtactaattccgttccaacacttcaaattttatcacattactacgtttaggcaaacgataacgaatgatacaaattagtgggtgccttaactgcaagttggaagataactatctcagcggaatgaatgcaccatcatttataagaaaacgattttgtatcactagaacctgaaaaaggacggagatctgagaagcgaatgtttctaatgaaaaatgtttagtgacaaaaaacgatcactgcatagctcgtagatgtgctgataaaactacattttaaaataaatttattgaaaat

SEQ ID NO: 377 - DNA, 1011 bp, Aedes aegypti
atgtactgctgcaacgtgaccgacatcaacaaggcgatcgcatgcgcctccaatggcggtggatcggaaggaacgtcctggcgctacatccacatgcggaacgtcaccgtccgggagctggtgctgaacgtgtccaatcggtacattaagacgctcctgtccgtgtcgtttaccgacgggtcgatccagaagattagcacctcgtttacgcggttttcgtcgcctgtttgcttcaacatctcgaacaacaatatcagcgagatcgagccgagggcgctgaaagagctgcggaatctgaaatcgttggacatttcgcacaacaacctgtcgacgattccgtcgatgggagcgaatctgacgctggacatcagaggcaatagcggcatgctgtgcaaatccctgctggagtcgctcaaggaaggcatcaaattcatcgacgaaacgtctactttctgcctcacgaatcgtaccttcaactggttcgattccacagacttcatcccgttgccgcagctgctgttaagtcaacgaatccagaacgactgccctacgaattgcacgtgcgctttggaacggctaaacttcgatctgaacaacacggatcggaaaacgttcaccgcccaagtggactgctccggactagggctgatggatttcccggagcatctcccaccggacacggtcacgctgaacgtatccaataataatataacaagtctgaaggccttgattgggaagtcctacagtaccgtgcatcgcctgtacgccgataacaaccagatcacctcgctgagcgatctcgagggaacagacttcatctcccggttcaccgtcttttcgatccggtggaacaagctaaaaaccatccaaacctatcagttcagatccagcttggacctaggttcgtacatgttcctcgaggggaacccgatgacgtgcgaccgcaccgcagccaagaaccttaaaaactggcttctcagcaagaaggccaggtgttcgatcacgacatga

SEQ ID NO: 378 - DNA, 2031 bp, Aedes aegypti
atggctgacaatggctacgagaacttcctaccgacggaaccggaaggaagttataatatacgattgaataatacacgtcatacgcctacgtcagatgaggaatgtatgcttggagtggcctacaactatatgccgtggatgtttccaaatggaacacttacagtcagaaaccaatcaatggcccttgatttatcgaacctgaggctatccgatgacggcatgtcgtccctcgtcagaaacttgaacatgttgtcatcactgaatccagaggttcgtcctaaaatgccacatctgctgtcgttgatagcattggacatgagatactgccggctgcagtctttgccaccggattttttccacaacctgcctaaactggaatatctgttcctatcgcataacttcatcagcaaacttccggccccgttattctactctttggggcgactggttcatctggatttgtcacatatggatagtcactccctccgtgatgatgaagcacgtatggaaaatccattcatgagactgatcgaaggcatggacatggatccaaacatttttcaaccgctgcagaaattgcgatttctagacttatcgtttactaaactggacctgaaggcgttcatgtcgatgagctccttggggggaaagttggagtacgttagctactgctatacagaccttccggcgctgatggactacctgtttctgatggaaagtatcaatatgcttgacttgtcgggcaatgtaggttgcgcaagagcattgaatgctggaagttttcagctattgcgagataccctggaagttttgttcttcaaaaatgctagcattcaacagctagattggataaccggtatggataagcttcgagtgttgaacttgcgcggaaattttctagcgtcatttgaaggggcgcctatgcgggatttagtgagcttagaagttctagatgtaagtcgaaatttcattcagtcgtggcaacatcgaatattccagtttaataataatctgaaactactaaatgtgagaagcaataaccttctgttgattcctagtagcatgttgagagatttcgaaatcttaagctatttggctcttggtggtaatcaattgcagtgttcatgtaattatgtattactattgaatatggtgtttggaaataactcagaagaaatcaaaaaagataacagtacatcgcaagttactacccaacagcccatttatacggttggtcatttaaacttgtacgactacaatgaggaagaatacctttgcatgaattttaccagcaagaagaaagtgaatactataaggctccccgtttgcggaagagaagacgaaggatcttattcgaatgtgagtgaagaaatgccagagtcgatagaagatctaatagaagattaccttgtgatatacatagtttcttgtgtggtagctgtgatcttgctgggacttgccgtgctgatctattggtactggttctacatcaagtacttcttcgtgctgctgaaaaattcggcgattctgagtttctacaacgacgataaagtgtatctggacaaaagttgtttggatgacgaagcgaagtatcagtatgacgtatttgtaagctacagcgataacgacagagcttgggtattagacgaaatgttgcccagcttggagcaggaagatctgatttcggtatgcctgcatgaaagagactttgaggtcggatatggaatactggaaaacataatctcctgtatggatcgttcgcggtgcctaatgcttattgtatcggaatcgtttctgctcagtcgatggtgccagttcgaaatgcacctggctcaacatagactattagagacgcggcgcgacgagttgattttggtcctactcgaagacatccccaagcgcaagtgcccgaagacactcagctacctgatgaagacgaagacctacatcaagtggccacggcagcaaacgcgtgaccgcgagcttttctggaagcgtttgcgcaaagctcttatgtcgactaagcgataa

SEQ ID NO: 379 - DNA, 2239 bp, Aedes aegypti
ggaacgatgaggtcgattttggcagtgaccgtagtctgtctgtttgctctggcaagcggcagctacatgaccaaggatgttaagtacggtgatgaaattttcctgaagaagcagaaagctattcttgagattttccaacacatccatcagcccgagctgcacacgtcgtcatgggaggaatccaagggcttcgatatcgagcagtatttggatcactacaccaatgccgaagccgtgaaggagttcctgcggttctataagcacggtatgcttcctttggaggagatcttctccattcagaacgagttccaccgcgaagaggtcatcgccttgttccatctgttctactacgccaaagattgggataccttctacaagaccatggtctgggctcgcttccacgtcaacgaaggcatgttcgtgtacgctttgaccgtcgccgttctgcatcgccacgatatggaaggcatcgtcctgccagcgccgtacgaaatctatccgttctacttcttcaacgatgtcgtaatcagcaaggcccaacgctacaagatgcaaggcttttacaagatgaagaagaacaatgacgtctacactgcgtatatccctagcaactacaccggatattacgtccacactggcccagaacagcgcgttggctacttcactgaagatattggcctgaactcgtactactactacttccacgctgactatccattctggatgggtggcaaggaatttggcctgtacaaggaccgccgtggcgaattcttcctcttccaacatcaacaactgctggcccgttactacctggaacgcttgtccaacgacctcggagtcatcccgcccttctcgtggcacaaatccatcaccaccggttactatccataccttcgctactacaatggaattccgttcccggtccgcgacaactattacagtgcctccgtcgacaagagctacgttgtggaacagatcgaagacttcgaacaccgcatcatagaagccatcgactatgggttcatcgttctgcccgatgggaaatatgttaacatcaccactccctctggaattgaatatcttggaaatttgattcagtcgaacggtgacagcgtcaacacccgcttctacggctacttggaaatcctagccaaatacttccttggtggatctttcaagctgcaacatgaataccgagcgattccatcggtcctggagaagttcgaaaccagcatgcgtgatcccatgttctaccaattctacaagcgcatcgtcgagtactactatcgcttccttgatctccttccatcctacaagaaggaagagctggacttccccggagtcaagatcgaaaccgttgaaatggacaaactggtaacctacttcgataagttcgacgcagacattaccaatgccgtggacgtggaggtattcgacgaaaccaccatgaagggaagtgacatgaagaagttcggcaagatcgcccactatcaaggcgaagacttcgtcatctatgctcgcatgcctcgtctcaaccatcttccgttcaccttcaagctgaacgttgtgtccgaaaaggcccaaaaggccaccgtcttcgtctacctgggtcccaaatacgaccagtacggaaacatctacggagtcgacgccaaccgtgagaacttcttcgagctggaccatttcctggttgatctggtcccggggaagaacgccatcacccgcaactcccaggacttcagctggttcgtgaaggaccgcaccacctactttgagctgtaccaacaggttatgaaggccgtcaccggcgaaggcaagttcccgctggatatgtccgaagctcactgtggcttcccagctcgtctgatgctccccaagggcaagaagggtggcatgccattccagttcttcttcatggtcgttccctatcacgcacccaaggttgaacagttcaccggtttcgatcacaccctgtcctgtggagttggatctggtgcccgctacctggacgatctacccttcggctaccccttcgagcgcaagatcgatgaaaatgcctggtttaccccgaacatgaagtactacgacaccctcatctaccacaaaagtgaaactgaagtcaactccgtggtgatacactagttcaaatgcccatccctcatgcgaaacccattcaataaaaattgcattccattatcggctcccgaagcactgcgtaatgccaacaattaaatgaaaa

SEQ ID NO: 380 - DNA, 1602 bp, Aedes aegypti
atgcgttttctcgcgccattaggaatagttcttttagcaatagtttctcactgccaagggcagggctttgacccaacggttggggcaacgccagaaaatcttgcagctgtgtcccaaagtgtaaccaacttggcccagaagatcagtctggccattgccaatccaaagagtaaaacggaaatattctccccagtgagcatagcaggtgccctatcgttgctgttgctcggttccggcggaaataccagagatgagctgatgaacgtgatgggtttccaacacagtcggctcacatttaccgacatccacaaaagctttggtcggttgttccaggatctggtctcgaatgatcccgcccaaaacgtgaccattccctggagggccaatgacaagtgcaacaacaacgactacgactacgaagactacgcccaatcgaagcccacaggccagcaaaggggcagaagagacaccgactctgtcgccgagataaaagttgccaacggagtatttgcgcccaaaggcatgcaatttgaccagaaatttcaactgattgccgaacggttttacggactagaaacccattatgtggacttcaggaccaaaatacagagtgttattcataccatcaacgcatggatcagacgcctaagtcgaggtagaatatcgcagattgtagcgcaacttaataccacctcaatgctcgtgatgactaacacgctctacttcaaagccctatggcaacagcctttcatcatagaaggtactaaggctaggccatttttcctagaggggccaagcaaacccgccattttaatacccatgatggtgaatggtggttgctttccttactattactggcaaaacgttaaaaccaaggttcttggatttccatacaaacaaaaaatcacgctttacgtctttttaccagatgattccacaagagaaaaaatcagattattgcaaacccacctcaatacggtggctctggacgacattttcaataaaatggagatgaaacttgttgctgtgcaatttcctaagctacacgtgcaaaactctttgaacttgaggcagactcttgaacaactaggagtgactacaatatttgaccaagaagaaagcaatttaaaccgcatttggcacaaccgcagcaccataatgccttacgactatatggatgctttcgatttcctggaggacacccgcgagaatgccatcatggagcttcaccatcagcatgggaactgcatcatagtcgagaaagatgtctccaatcgggttctgtgcgaggccagtagcctctgccgcttcaaaggcggaagctgtgtctgttgtgcagcattgacctcaagcaaaaggcttcgaagggcttacgacgggtattatttgcagtcccgtttacatgtcaacgaaattcttcacaagatcgacctggtagtcaacgagaagggaacggagagtggtgcagtggtgatgccgtttatggacaggaactttcctcaggtgaatttcaaagtgaatggaccgttcttgatattggtacgggacgagaagactaagcttccgctgtattatggaggagtgtttgatccgagactatga

SEQ ID NO: 381 - DNA, 3844 bp, Aedes aegypti
tgctggaacacaattctccgctcttctcggacttcctcgtgtctcgctctctgatatcgtctgataggcaaactgggtgtttaatcggataagttggtgtatgtgctcatatcaaccgttttctaattcaaatttttcagaacaaataagtgatgttcgcatgtccatcgtatgtacttttagttaatgaatgtctttcaatgaaacatgcctttttatcgtattgacttaggtcgcttacttatgtaggtactaaggttggcgcacgaaatgaaaattatgtcagttgcttcaaacactgttatagatcccttttcaggataaggattaaattgcgacaatttataaatcagtttacagaatcatgaattttcaactttagacatttgcattgtggaggtgttacgtaagttaagaatggattacatttaataacgaaaaatagcatatttttcattggacaaaagagtgaaacgtcctattaaaaatacgtacagatagaaactaggaatgtatcgatgaataatttttgacagtacctttcagtttgctcacgactaacggaaaatctacttttcaattgggctataagaaaagttctagttcataagtgtatatcatctcatgatctcaaaataagttcttctcctgatctgatcataagaccgattttaaatctttttgaggtttgtagtaaggtagaggtttagaggttgtagtaattaaaacacctgtttttcatccgtattaatttttttttaactttttttttaattaaaattcgaaattcttgaacgtgtttaatcaatgcaagttctacgttgaaattgcaagaaactaactttgtttaggaaaacaataagttcctagtccacattatggatcacttgttaaagctgttaatattcggtgtttaaaatcttcattaagtatattattgaacaatgatgagccagagtgcttaaggattaaattgtatcacctgtgggagcatatgtatgttgacgatgcttctaatgaaaaatgacgatattttggtaaccatgtgcaacaactcaaagttggtcgagatttatttgattttccggtttaatgttatgctgaacattacaaatgatagaaaccaagcagtataacaaatttatttaacgacaatgttttatatatcattgagcataagttacgaaccgccttgatgagggtaaagcttgggtaatgtgtaaaaatgtcaatcttgccgttttgaaccgtcttcccctaatagcggagatgttgtcagctacagctgtagtggatcgtatatctctcggaagatgggattccccggtgatcgtgaaacgagtagagcagcgatgatcgccggcgacaaccggcttcgaactgattggtatttgtatttacagtcagagttccactcgaagctggaattttgcgtaaaagccctgcgctcgtcgctcggaaatggttttcgtttgaatcgatgcaaagagagtaaacattcaaaagagattgttgagcaatttaaatttggattgtcttaggggatttttcttattgtgttcacagatttttttttctctattttcaatcggtgaataattcatgtgaaatgctttgaagtttgtttttcatctgtaataagcacggtgtttatttaaccacccctattaattactccacctcatacctaaacttggtgaacaaattatgctggagggattagtcaagaaaactcgctatactttttgttatgattaaggaaatcaatataaatgggaagttgtgtaactaaaattacacaatttggtacttatcatacattttaatgtttctcaaccttttttcaacagtttgcatcgtagcatcatgcacatgtacggatgataatttcgtcaacaatgatgatcagccatttcgaggacagcgtaatgtggaattcgactggaaactaactaagcaagtgttccaatctcaaaaatccaacgcagtgatatcgcctctctcggtgaaaattttgttggtgctactgtacgaagccaccggagatgctgccgaactttccgaaacacaaaccaaacgcgagttgcgaacagttctggaaccaaacggtgatctgaatgcaacccgcagcaagtatcgccaatggctggattcggcactgtcttcccacaaggactacgatttggaaattgccaccaagttcttcgtcgaggaatacattgacgtcatttccaaatatcagatcatttcggatcattactacagcgccacggttgacaaagctcctttctcgaaaccgaaaatcgccgcggaacagatcaacagctgggtgaacaaaactacacatgggcgcattgcggagcttgttacagctgatggattggatggagcgatcatcacgttgatcaacgccatctacttcaagggactgtggacttatccattcccagagtatacaccaacactgacgttctatggcaatcagaaacaagtgcaggcaccgttcatggagcaaaacggccaattctattatgatgattcggccgcattggattctcaactgttgcgattgtcatatcgcggaggaaagtttgccatgtatttcattctgccccaccaaggaaagactgtcgatgatgttctggataaaatgactctcagcacattgcatcaagcgctttggtacatggatgaaaccgaagtgaatgttaccattcccaagttcaaatttgacttttcagaagaattgaaccaaccactgaaggatattggaattcgtgaaattttctcccaaaatgcctccctgccattgttggcccgcggaaagggcgcccgaaatgaagttcgtgtatcacgagtgttccaaaaggcaggaattaacatcaatcatctaggaagtgaagcatatgcggccactgaaatccaactagttaacaaattcggaggagatggaacgcaaattttcaatgccaaccggccattcttgttctttattgaagatgaagactttggaacgttgctgtttgctggcagagtggaagatcctacccaatgaaaaggggtctgtgaaggaatagtacaacgcaacatcgcatttgacttccataaatattaaaaaggctcaaataaagctgattatttttaaagtgaagacttctatttcattttttttattctgagttgcttaattgaaatttcttttattgaatcgcttactaccaaaaacacaaaatcgttctcaaaagccactatgctcaagtgaaaccacactttctctcctcatactatttttgttgcagatcatgagtgagagcaagaatgcattagatgcacttggatgcccaacgacatttatctacattatttacactcaataaactaagacattatatgtttagatcaagcattacccttctttgcattgatcaaagaggtaaatgagttgtgaacaaaaactaatcgggtggaaaagagcatatggtaaatgcttcgcaatggtcaggccgtagctttcccaggctgtgtaataaatttattactcgaaccactcattcatccaacttgcactttggataatggtggaaagtagggcaggaataattttcatgttcgatgcaggaaaaaatgggtgcagcgaaatgaacttggtgtgcaaaatgcacctgataagtactggggataggcgaaacgattgagatatgcaaaattttgctcaaattcgaatgcttatgactttttgaaaaatgcatgaaattggatgcatctggaagcattagatggcaaatttggtctagttttatgaattcacttggtcatgcatattgtctactgaacaccggagttg

SEQ ID NO: 382 - DNA, 1759 bp, Aedes aegypti
agttgactgcggttcgttagttagtcaagtcgaaactataccggtacgcttcggaggggtgtgtttttgtgctagtcgtagttgtgttttgcgatcgtattgcgatcactatctcgcgtaagcccgcgtggttcgacgcgacgcactctgtacttagttcggttcccataatgcattactgcacgcatgtaattgttttcccgtgagcaacaacctagacgaaatttacacgagagtagagattcatcgttgttctgctacgtcatcactctctgcagcggacacgacaagagatacacaaatcttggataattgagttcccggttggcaagaccttcaacatgcctgctcaatgccctcgatttgggctaagcgcggtgcatatgggggtggcacttctatttttattgactacctctgcaacccttagaaatgttggaaatcatcgatcgaaccagctacaaaatcaacccgacgcagttcttttaaacaatgatcttgattggaaactcgtcaaggaagtgttccatcatgaacagaaaaacgtaattttttctccgttctccatcaaattgttgctttccctgctgtacgaagcatcaaaagaacacagcaaaacccgacaggaactatcactcgttctggctggctcagacctggaaaagaatcgactattgtatcaggaattcctggaaagttccacgaaagaaaacagcaactatcagttcaacgttggaacacggatttttactgatcaaagggcggccaacgtttcagatgcttattccgatttggtgcagaattgctacaaaactagtatagagtctgtggagtttgacagtcccaaagagactgctaacaagatcaacgaatggtgctttaacattactaatggacacttgaaagatctagtagatgaagagctcatcaaggactcagtaatggtgatagtgaacgctctgttcctgaaagcttcgtggagaaattcgttcaaagaagagctcaacagaaagcggaatttctacgtgtcggaaaacaccaccgttgaagcagagtttatggagcagactgacatctaccaatatctcgacgatcctgatatgcagcttgaaatggttcgattaccttataagggtcgccacttttcgatgaccatagttctgccctacgcaaaccggtcattggggaaaatggtcgagtccctcacagaccaaaacctgctgaaacttgaatcgaacctacaacgggacgaaattgtagtcattattcccaaatataaattcgactacagcacaacgctcaatgatgtgctgataaggctgggaataactgaagtattcaccgataaagctgagttaccggaactctccggaggcaagaactcaacattggcagtgtcaaaaatgcttcaaaaggctggcattgaagtcaacgaaaaaggaactctagctttcgcagccacagaaattcaactggtaaacaaattcggcatagacgatatgcctattcagtttaaagcgaaccgacccttcatgttctacatcaaagacgaagattcggatgctgtgctctttgttggaaaagtagagaatcccgtggcgacggaaaaactaccgtagactaaaccgtgaggagaaactgaacgctctgtgttaccaaatgaatgacgtttttttaattgtagctttaattttgtgtctagcctagatctgtatacgaatgcaaaacggaatgacgataataaaatactcagagtgtg

SEQ ID NO: 383 - DNA, 3146 bp, Aedes aegypti
cagagtactagaggttttactgtcgacaacagcgatatgccccagtgcgtgctgtagggtgtcccataaagtatgaatataagtttaacatggtgccataccgaaaaaatgtcatgaactgattgaatgctgttgacgaatataggaaacttctaaacataaaggtgtgacaattaactaactgttttttttttcaataaaatgaaaatgcagttaaagcaaatcagttaaataaaaataagattgaatctgatagttaaaaaggtcattttcaaacaaaaacaaatacttatcattcaaatttagatccttaagactgaatctgaatttagatccttaagaaaggatctgaatttgaatgacaaatgtcagttttgtgatgttcatgctcattagtagaaattcattacaaaaccaatttaaaatggcaacataatccttaaagatcgataccgaaattttatatcgtcgaacgtggattcttttgatttttttgacattcttcaacagtgaaatattgtaactctaagagttgtaaataaatattgggttcattttcatatattaaaatagtatgtttgcttcaattgtcatccttcattgaaaagcaaagcttttgtgtttgatcttctaaccaagccaagccatcagctgcttagatatttttatctaagattttttacaatttatctatgaaccagtgacaaaaatgatgtatttcaataaattcaagtaaaagatatggaataataattacggaagtgtacacaagtatgtaaataaatacttgaaaatagtatttgtgctatagaattctagagtaagtcaccaaatatttaatggtctaatttgtcactaatatttgaacaccccataatcacgggtaattgaatatttgatgagaaattagactgttacatatttagcggcttacccttattgattcaaaataatgtttttcttagcaaattacgattctgattgatgaccacaaacttgggaaaatctcttgagttaaatataaactatggctcaagttgtaaaaaaaaagtatgagtaacagacttcaagaacactaacgaacaagtcttcgctaatttattgctgcactgtattgcaaacgtgaattgatttaccaacggatctcatacggaagtcaattaatattttaccgaaccgaatttgctcaagcgtagcatttacggccgctcgatcatgaccttgtttgtaattgtcttttattagcgaaggaaatgttatgtacttcttcaatcaattgttgattgcaatcataggtgctaacgcgtgacgtagttaagaagattccaagctcttaaaaactaaacaaattgcaatgttttcctagcaaatgcgcttcgtttcacttaaatatgccatatatgaatgaactgcgtttcactatttttcattgcaatgaaaactctactaatccaagtttaacggttttttttacagccgtgtccttccggaggttcaaccgggatacctcaagccccttatcccgtcggaggccccggagaaaccggaaagctgggaagccgtgatggccgacatcgagcgtgtcatcatgcctggtgtcacccactggcacagccccaagttccacgcgtacttcccaacggccaactcctatccagcgatcgtggccgatatgcttagtggtgcgattgcctgcatcggattcacatggattgctagccccgcgtgtaccgagctggaagtcgagatgctcaattggttgggtaaaatgcttggactgccagaggagttcctagcaagctcgggaggtcaggcaggaggtgtcattcagggaaccgctagtgaggctactcttgtggcgttgctcggtgctaaagctaaggctatcaagcgtacccaggaagaacaccccgagtgggatgaaacctacatcatttcgcgattggttggatacacatctaatcaatctcactcatctgtagaacgagcaggtttgcttggaggagttaaactgcgttctctcaaggccgacagtaacctgcaactccgtggggaaactctagaagaagccatcaaacaagatttggccgatggactgatcccgttctatgccgtgtgtaccctcggaacgactaacacgtgtgctttcgatcgattggatgaactgggtccagttggtaacaaatacaacgtatggatccacgtggatgctgcctatgccggatcggcctttgtctgtccagaatatcgtcatctgatgaagggaatcgaaactgctgattcgttcaactttaacccacacaagtggatgctggttaacttcgactgcagtgctatgtggctgaaggaaccgtactggatcgtcaacgctttcaacgtagatccattgtacctgaagcacgacatgcaaggatcggctccagactaccgtcactggcaaatcccattgggcagacgcttccgtgctctgaagttgtggttcgtgctgcgtttgtacggtgttgagaacatccaagctcacattcgtcgtcattgcgcttttgctaagcaatttgaggctctttgtgttgcagacagccgttttgaaatcttctcaaccgttcagatgggtttggtgtgcttcagattgaagggaaacaacgaaataagcgaagctctgctcaagaagatcaacggacgaggaaagatccatatggtgccgtcaaaggttaacgatgtctacttcttgcgtatggcagtatgttctcgattcaccgaagcctcggatatcgagtactcctggaacgaagtctctgccgtcgctgatgaactgttggccgaaaagaaataaactggcgtttcacaatgttcctgatggcacaacgtgtccaactgtattactcactcactcaatctctctaattattctgaatggtatagaactgctatgatagcttaatcttccatgtattgtccaaatgcaacacttggagtaaactaaaaggaccataaaaaaacaatcacgcaaaataataatatatttgtgaatattgaaaagttgttgtagtggatagtattgctgccgctagattttaaaatgtcccttgatgttaaattattgttggagtatgagaataaataaattgtaatttattgtgttttaataa

SEQ ID NO: 384 - DNA, 926 bp, Aedes aegypti
ccaatcaactagaatgaaaataattatttcattactttgtgttatctgtttcatgcttgtaacgaatttatgttccccaattgttgacgaggatgattcttcctcgtttggatcaccatgcttacagccaccaatgaaatttaagaaacgttattttgtgcataactacaatcacctaacgttcttggaagcctggaggcagtgccatgccattggtcatcgcttagctactattacatctgaggaggatagccaactcttacaggaaaccatagtgaactctacaaacacgaaaggtccttggtatatcggtggcaccgatttgggaaatgaaggacactttatatggatatctaccaacacgcctgttggacacaagacaggatacttcaacttctcacccggacaacctgacaatgctggcgcaaatgaacactgtcttgagatcggtcgttggggtggtgtagaatggaatgatgtacattgtcatgcgaaatcacgctacatttgtgaatctgtcagtccaatctggtcgtagaaatttattactcaatgacaataataaatcatttgtttgtttattagttcaacctttcacaaacgaatttcaatcttttagtgcaaaccgaatcattccattgcatagtatccgcgcgaagttctacgcagtgctcagtttccccacgcataactgctgcgttcggttcaccggaggcccactttttgtaggttatctctttattggttaggccccagcggaagattcctggtttggctaaatcgttgccaccgatccaatacctttccgatggttcatctccattgtcccgaagccattcctccaagtcttgattgtcgtaccggtcacgaatttgtgcgagcgtcattcccattccattgcagtaggaaatggcctcgaaccacgt

SEQ ID NO: 385 - DNA, 717 bp, Aedes aegypti
gtacttttcagtgctactaaaccaacggcatcatccaacgatgagggttcctgccattcctttgccggaggccatgtctacccccaggaagacgtccgatcggcggaccataagctccagtggaccaaagccgtgatatcccgtccggctccgaatttcgaagcgaccgccgtggtggagggagccttcaagaagatcaagctgtccgactaccggggcaagtatctggtgttcttcttctacccgctggactttaccttcgtgtgccccacggaaatccttgccttctcggaccgggtcaaggagttcaagaagctgaacgccgaagtcattgccgccagcatcgattcgcacttcacccatctggcgtggatcaataccccgcggaaggaaggcggtctgggcaagatcaacattccactggtgagcgacattacgcacagcatcgccaaggactacggagtgtacctggatgacctgggtcatacgctgagaggactcttcatcatcgatgaccgcggcattttgcgacagattaccatgaatgacctgcccgttggacgttcggttgacgaaacccttcgattggtgcaagctttccagtatacggacaagcacggagaggtgtgtccagccggatggaaacctggccaggatacgattgtgccaaacccggaggaaaagatgaagtacttcgagaagaaccataaatactag

SEQ ID NO: 386 - DNA, 3060 bp, Aedes aegypti
gttgtttgagaatgcgtattcggggtaaatatcccaacattggaccaatccggtgcactgaccccaagcagacagcatttgtaattcgctaattggcgtgttaacaacgaaccgttatttttgtaacaaaaaacttaataaatctcacaattcgctgaccacgctgtttgctgctgtttcagctaataatatatttatgcgctattggaggggttaatccttccccaaatttccacagagagttccaggatgttggttgagtaaccaatcactaaagacaaatcaatcaccttacttaacaagacgctgctgacgactaccgaaggttatcaacgaatttaattatgtttgaaattggtggtttgggtcattttctggtgagcttatgccttggtgtatttgtgactaagtagagtagacattccgatactaattgtgttaagcatgtttaatgttctagtgtttgtttgttttcaccacgtaatgaactaacctgcatgtcactttttatttaaactagaaatatggttgaacatgaactctaacgtattttttacaactgtgcaacagcttttctggcgagaagaccatcactaaaaaggttcccgacacgataacttcctggatgatcactggtttctcggtgagcccagtttacggattgggtcttacccgtcagccaaggaaactgaacgtcttcctaccgttcttcgtatccaccaatctgccatactccgtgaaacggggagaggtggtgtcgattccgattgtggtcttcaactacatggactcagatcaaacggctgaggtaaccttccacaacaccgaacaggagtttgagtttgccgacgtggagaacgaggttcatgaaaatccaaagctcgaactgttccgcaagaaaaccgttcaagttgcatccaatacaggaaaaactatccccttcatgatcaaaccatccaagttgggtcatattaccatcaaggttacagccactactcagctggccggagatggtgttgagcgccaattgctcgttgaaccggaaggtctgccccagtacgtcaataaggcttcgttcgttgatctgcgtgccactccagaggtcaacaacaactttactgtcgagattcccaagaatgccgttccagactcgacacgtgtagagatcgctgttatcggtgacgtactgggctcgactattcaaaatctggactcgttgatccgtatgccgtacggatgtggcgaacagaacatgttgaacttcgtaccaaacatcgttgtgttggactacttgaagaataccaatcagcttacggcaagcatcgaggataaggcaaagaagtacatggaatctggatatcagcgcgagttgacgtatatgcatgatgacggatcgttcagtgctttcggcaagtctgatcccaagggcagtacttggttgactgcgtttgttgctcgctcgttcaaacaagccgccgatcatatcagcgttgatgagaaaatcatcgataaatctttggagtggttaagcgatcaacagtcgtctaacggaagcttcccggaggttggtaaagtttcgcacacggatatgcaaggcggatctggacagggaatcgctttaaccgcctacacgttgattgctttcctcgagaacaagaacctgatccccaagtacaccaatgtcatcaacaaagcgttggactatatcgtaaggaacacagaaggattagacgataactacgctctggctattgcagcgtacgcccttcagttggccgatcatagtgccaaggatttcactctctcccagttggatactaaagctactaccgatgaggatcaaaagtggtggaacaagcccatcccagaagccgacaagaagaatccgtggtacagcaaacccaactccgtcaacgttgaaatgtccgcttacggaatgctcgccttcatggaagctggactggatagcgatgccctgccaatcatgaagtggttgatctcgcagcgtaacgacaagggtggattccagtctactcaggacactgtcgtcggtttgcaagcgctggccaaactagcggcaaagatttcttccaagaacaatgacgttaccatcgtggttacttacaacgaaaatcaacagaaggaaatgaagatcaactcggagaataacatgatcttgcaaaagttcgagctcccgtcgtcggcgaaggacatcgacatcaaggctacaggacgaggattcgccgtcgtgtcgttgggttacaaatacaatatgaacgtcaccggagagtggccccgattcgtgctggaccctcaggtgaacaaaaactccaatcaggattatttgcatctgactgtgtgcacaaactttgttccaaccgccggacaaaacaagtccaacatggccgtcatggaggtaggcttcccaagtggtttcaccgccgattcggatactctgccctcgttggagaataccgagtatattaagaaagtggagttgaaggacggagacaccgttgttgtaatgtacttcgacagtctggaccgtaacgaactgtgccctacggtttccgccttccgcacgcataaggtcgccaagcagaagcccgctcctgtagtcatttatgactattacgataactctcgcatcgctcgtcaattctacaatggaccggcagctggattatgcgacatctgtgaaaatgaagattgcggtaattcgtgctcgattaaatcgcagaagcagcgatcacctaaggaggaagccaccgtgatggccaaaagcggtgccgttggaattacgatcggtttgcagctaattgttgctgcactgctggtgaggttgttcaattgaaggggttccgtgaacaacgttaagtgacaggggaaactgagagagagaaagacgaacttgcaataatcttgctagagcggaagtagacaactgcgatgatagctttatgtacctagtagaagattattgtgatttgagtggtatgatttttggataaacttatgtaactgtaaaatttgatcacaatatagataatgtaaacagaa

SEQ ID NO: 387 - DNA, 1181 bp, Aedes aegypti
atgctaattttcctaaactctcgtttgattgtcaccgttgagcgccttttcgagcagaagtactccgataaattatcattaaaccgagacagtcaaccgacactcgcccgtaccgccgccataagcagttccaaccgattgaaaaatccaatcagtcgaaatggcagtaacttatccgaatacgacctggaagtaggagagcgaacacctcttttggtttcaagggttcgtttcgcacctgaggtggacgatcgatctcgtcagattcaaaccgtacaaaccacagcccttcttggcattttaacgctgctcctgttccttctgctgggcattataatagcagtttatttgcttctgatgcaagtacctcgtccttggcccgtgtctcatccattttacctagtggagcgaaatgtctggtggaaacaaccagcagagcaattcgagttaagtccgttggaaaaacgtgcaactcagaatgtaataattctgcacacgagaagtgagacatgccacgatcaagccgcatgtattcaattggtacagaaactacaaaacgacgcgtggagtcaaaacggaacgcacattccgtataatttcctagtaggtggagatgggaaaacgtacgaaggcagaggctggaaatctcaacacgggtttccaaatctccccggaataaacgatacaattgttgtaggcatgatagggaccttcaatgatcaacggccagaaaatgtgatgtacgcagaaacaaaggcactaataacggaatccatcagaaggttttgcctatcgccaaactatcgactatttggcgtaattgacgactcaatacagaacaacgatgctgctggactatacgcagagattaaagagtggaggcattggcagggattcgttacagtttaggacaaattttatagctcaattttgaacaatcagtgaccgggactagtgttagttcgcaagtattatatgtttttgtgaaagattcgatataaactgctgattttatttttttaatgacaagtcggattttctttcaattcaaagttcctttcttttaaaaacttgggcatgtttagaaaaatatacgcgattcttctgagggcataaacatgagggcagcaccttaaaataatattattattgaagaataaatttcattcagtatttctctg

SEQ ID NO: 388 - DNA, 1224 bp, Aedes aegypti
atgccgtcagggagtgtccaccggacagcgaggattacgaggaccaccatcgacagcgccgtcaactcgtctgacattgcctcgctagcgaattcgattccgtcgcggcaacgaagacggtcctgctgtccagtccagcaatgccggcaatggttaccgatggcactgagagcgactggagtggggaccgtattgctgctgctggtggtgctacaactcctagcaccggtcacgggtcaatccaatccaccgcaaacatgtcctcaagcgggcgaaatcagcccgtgtcagtgtcaggtgaagaagaatggtctggacattctgtgcgaagcgaccgacgttcagcacattaccagggcgatgagcgcgttgaaggggaagaatcccattatcttctatctgaagctacgacataacaatctgcctaaactgcagggatttgtgttcctctcgctcgacattcgacatctcacgattcacaacagcagtttggccgccatcgaggagacttcgttaagctcgttgggtcgtggtttgactcagctggatgtttcccagaaccagctgttgacggtcccctcgagcgcactgaagaatctgcaccacttgctgatactgaacctgaatcacaatcgaatttcggttatccacaaccgggcgttcgagggtctggacacgttggagattttgaccatctacgagaacaagctgacgtccatcgaaccggatgccttccgagggttagacaaaaagctgaaacgtctgaatctcggtggcaacgatctaacctccgtcccgcaaaaagccctctccaagttggacatgctgcgaaagttggaactccaggaaaatcgtcttaaaaccataaaagagggtgactttgaaggtctttccaatctggatgccctaatcctggcccacaaccagctcaccgaggtaccggcacgcgtcttcagccatttgattctgcttaactcgctggagttggagggaaattccatctcctacatcgataaggatgccttcgagggactggaagaaaatctccagtaccttcgtctcggcgataacaatctgcaccgcattccgagcgaagctcttcgaccgttgcatcgtttgcggcatctagatcttcgttccaacaacatctcctccataaacgaagatgctttcgtcggattcggtgattcgattacgttcctgaatctgcagaaaaatgagtaa

SEQ ID NO: 389 - DNA, 1727 bp, Aedes aegypti
tcaattgaacgataactcacaaacccgtaatcatcaactcagataatgatcaagaacccatttgggcagtttgtgcaagtgagctaaacagatgattcatggtactcagtaaataatggaaatgatttcgatatcaccatatagcgtgaatagcaatcctttctaatagttgccactagttttaacattcagttttaaagtcatgttcagtagcataacattttgtagcagaattgaaattttatgagcataatttacaattcataattgcaatcctgttagccaatttgagtgacttaaaactcaatggctgtgtatgatcaatcttgtgtagcaaatttagagtcattagattacaaacaatattgatacaaacttatgatttttttcatcaatatttttatcagaattttatcagggccttgaggtcactcaccgcttcaaaattgaactactatccagagaagaaagttaagttttatattcaagtgacaaagtgacagaaaactaagtgtattcaatagttgttttaaataagtgtgttaataagtgtccaaaatccaaatgcctgccatcacgaaccagatgactccaattcgtcacgttctggatttgtccaaggaggagaaacgacagtttttagattcgttcgacaccatcatgtcggactgtgatggtgttgtgtgggactttatcggccccattcccggcgttgacaaagccctaccgctgcttaagaagaagggcaagaagctcgccttcatctccaacaatggaatgcgcaccatggaggagtacaagcagaaattcctcaagttggggattccatcacatgagctggacattgtccatccggctctgaccacagtacgttatctgaaagcgatcaacatgacggatgcggtctattgcgttgctaccgaggtgttcaaagactatctccgaaacgagcagtacacggtcctagatgggcctgacgatcgtttcgctgacgaaagagcggccgattcggttcgcgtgttcacggatttcttcacggaatcggacagcccccgggttggtgcggtcgttttggatattgacgtgaacatctcgctggcgcatttgatgaaagtcaagtgctatctggaacggaatccggactgcatcctgattgcgggtgccaccgactatatcgttcccctgggcgatcgaatggacgtgatcggaccgggctacttcatcgacatcctggaacgggccactggccgtgaagcgttgattctcggcaaaccgggtcaagctttggccgactttgttctggaacagttcaacgtaaagcgacccaagcgagtgctgttcatcggtgacatgctgccgcaggacatgggcttcgcatcgttatgcgggttccagaagctcctgatgctcagcggaggcaccaccctggacatggtccgggcgcaaaaggtgcctgcacagctgcccgacttttacatgaacagcttcgccgattttatccagctgtacaaggatgtacaataatggttaaacgatttctattagttttgaatgaatctattccacgttgcagctggattgcaacttcacttcttcgggagtgttagtgcgcaccgcctagtaagtgttactgtgtaaccactggcctatgactttgcatattttgtaagggtgtacacatcgatgtgatatttttacaataaaatgtgatatgattgtaagtgtaa

SEQ ID NO: 390 - DNA, 474 bp, Aedes aegypti
attccgagcccagtattttcatcaaaaaccatgaagccagaccaaaaatgcatcctacggttcgccaagctcacggatcaagccttcccaccgtccaaaggatccgtcaaggccgccggatttgatctcaaaagtgcgtacgagtacacggttcctgcccggggcaagcagttggtgatgaccgacatccaggtgcaacttccggaagggtgctacggccgagttgctccccgatccggactggccgtcaaaaacttcatcgatgtgggcgccggagttgtggacgaggactaccggggcaacctgggtgtggtcctattcaaccactcggacaacgagttcaaggtggcccggggggatcgcattgcgcagttcatctgcgagcgaatcttctatccggaactggaggaggtcagcagcctgacggaaacggaacggggcagcggcgggttcggatccaccggaacgcaatga

SEQ ID NO: 391 - DNA, 3113 bp, Aedes aegypti
atataggatacctcgcagcttctgttcagtgcgacattatgcaacctgcgcgactcgaatgaaggacgactgagactgactgactggttgcgggtgaagaacgtggcggcgcttgaggcaataaaaatagcacgctttcttcgtcatcgtttgtttgtctgtcgacgacgactccgaaaacgtcaccggtgactggttcactgatctcctcgccgtcggctcaaaaagcgtttatcagggtggaattccagcaactgaagtggtatcacgcatcgcgagatatcatcatcttggcgcgcattttgtgagcaaacaagagaaggaagcgcccgcagtctttgatccagtttgctgcggaaagctgtgatattgctgtgtgctttatgtcaaaagaaaaatattacaaaatgggttcgacgcaacgaagcaagctgattgcagtcatcgatgaaggaacgaacagcgcgcgctttgcgatcttcaagctgccccagttcgaggagctatgctcgcaccaggtcagcatcacccagatcatcccgcacgagggctggtccgagcagaaccccgtcgaactgctggaagccgtgcggttgtgtgccgtcgaagcatgccacaaactggaaaccctcggttatctggtgagcgatatcgcctccatcggtatcactaatcagcgcgagacgaccgttgcgtgggacaaatatactggcgatccgctctacaatgcaatcgtttggaacgacatccgcacaaactccacggtggacaaagtgttggcccgaatcccggaccagaatcacaaccacttccggcagatttccggtctgcccatctcgccatacttctccgccctgaagctctgttggttgaaggagaatgtcccggccgtgcggagggcctgtcgggagaagcgttgctacgccggaaccatcgacacctggttgatttggaacctaaccggcgccgccaacgggggtgtattcgtaacggatgtcaccaacgcctcgcgaacgctcctcatgaacatcgagacgctcttctgggatccgatactgatcaagacgttcaacctgcacgtggacatgctgccggaaattcgcagctcgtcggagatctacggccacatcaagtatgggagcatcctggacgggatcccggtgagtgccatcctcggcaaccagcaggccagtttgatagggcagcggtgcattcgggagggtcaggcgaagaacacctaccggaaggggtgcttcctgctgtataacaccggaaccaggtgcgtacattccacacacggactggtgacgacgctagcgtacaagatgggacaggacaagccggcggtttacgcgctggaagggtcgattgctgtcgccggcgtggccatgaagtggcttcgtgataacctcgggctgctgaaggacattccagtcgattcggagcagattgccggcagcgtgttctcaaccggcgatgtctactttgtacctgccttcacgggcctgttcgcgccctactggaggaaagatgctcgaggaataatttgcggtctgaccagtttcaccaccaagcatcacatcattcgggccgcgctggaagccgtctgcttccagacacgtgatattatcgaagcaatgaagaaagactgcgggatcaacctgaccaaactgcacgcggacggtgtcatgaccaacaacacactactgatgcaacttcaggccgatctcgttgggataccagtcttgaaaacggaagtgagcgatcctgcgacactcggaacggcgatggcggcagcgcaggccaagggaatcgaactctacaacatggataacgataatcgtgactacactctccacatcacccacgaaacattcctgcccacaacgacggaggaggaacgcaacgcccggtacaccaagtggaaaatggccgtccagcgcagcttgggctgggccgtcaccaagaagagtgatgccatgacagacgaacgctactccatgctggcgtcgattccggccggactgttcctgttgagttcgttcgtgatgctggtggtctcgcaagccaaacgaagctgagctacctaacctaaaaaaccgaacgcttctggggccgtctgttcagttgcaagtcttattctaaaattgcatatacttacaacttattattagctagattagacggttgtagtcggaacccaagcttacaactaaaaagacaactcaaactctggggggtgctcaagtatccaataaggtagatagttagcgccggaaaggcgctataatgcaactttaaggttaggagacccagattaggacaaacgaatagcaaaccaaaaaaaacaaatcagtgatgcttccatgcagcaaacagtatagatagttaggcaaactaatccgagtgcactacgcaattgggcctcagtcgattgcaacccaagtgtcaaagagtacctttcaatagttaacggaactaggaaaaaaaaagtaagcactccattcctcgtagtacacgaaagcttagaaaacaaattgaaaataggtctgtagtagaagaacaaaggggaagattgtaacaatctaaaaattatataataatcaattagacatatgtgaggaacaaaagtaaagcaaaagatgtaagttattttacacgaattgttaggatccctccgttacaaagagacacatttgatttagtcgtttgaatgatgatattttaacgtgtttaggcataacttttagcgatcgatttattgatttgtcagactattattaaaaagattctatcctctagatgttaagcatattgagggcttgattttactgttgtcaaccgcaggtagtttatttatagcgcctaatttgattgtattgtgaacacagagtagctttacttttactaagtagccatctaacgaggaaacgacgattgtaagacttttttatatacagtacttaatgctacagaacgaaagattttattatacacacattattttgccgatggatcaaaacgtagtagatatttatccgaaaacaagtccctgatagtataggtaataaaatatgtatttcaattgcacttaataaaaattactagatagg

SEQ ID NO: 392 - DNA, 1179 bp, Aedes aegypti
gccctctcactgaccactaaacgacgtgcgttatatcctcggggcatatacgtgcaagagaggaaccgtgttttgcactaaggtcatctggaggttgttgaagttctccacaaaagtgcaaaccgtcgcaccggtaggaagcaaatcctcgttcatcttttcgccgtctagtcaatccaatcttcaaacaaaatgggccgcaaattctgcgtcggaggaaactggaagatgaatggtgataaggccagcatcaccgatctgtgcaagaccttgaccactggaccgctgagtgccgacaccgaggtcatcgtcggatgcccagccccctatctgaccttggctcgctcccagctgccggacagcgttggagtcgccgcccagaactgctacaaggtggccaagggtgccttcaccggtgaaatttcgccggccatgctgaaggacttgaacattggctgggtcatcctgggacattcggagcgtcgtgccattttcggtgaatcggacgaactggtggccgataaggtcgcgcacgctttggccgaaggtctgaaggtcatcgcttgtatcggcgaaacgctgcaggaacgtgaagccggtcaaaccgaggccgtgtgcttccgccagaccaaggccatcgccgataaggtcaaggactggagcaacgttgtgattgcttacgaaccggtctgggctattggtaccggtaagactgccaccccggaacaggcccaggaagtgcacgctgccctgaggaagtggttcaccgagaatgtgtccgccgatgtttctggagcaatccgaatccagtacggaggatcggtcactgctgccaactgtcgtgaattggccgccaagcccgacatcgatggtttcctggttggtggtgcttcgttgaagccggagttcattcagatcgttaatgctaggcagtaagtggaggcggtaatccaaacgatttgaactctgcaaaaggtgaatcttattactcaccgccatttctcactctctcgaggcatttcgaaagttcggtgcgttcgagcctcaaacaggaatgaataatttaaaagtataggcgaattattatgtaagttcataaactgcaacgagtgttatcactgattactagaacataaaaaaaaacaaacaaatacaaaaaatatggttcagcaaatagtg

SEQ ID NO: 393 - DNA, 732 bp, Aedes aegypti
atggtcaagaatcttctcaattccggccactcggtcgtggtttggaaccggacggccaccaagtgtcggaagttccaggaagcgggcgccgaagtcgccgacaccccgtcggacgtgatcgaaatgaccgatgtgacgctctcgtgcgtttccgatccccaggttgccaaagagttggtattcggaaattgtggcgtcatgtcggccaatctggttggcaaaggctacgttgagatgaccggcaaccaagcggaggaaggaacgttaataattctggccgccggcgaacggttgctgtccgaggaatgccagacctgcttcgaggccatctcgcgcaactcgttctacatgggcgacgtgggcaatgccaccaagatgaatctggtcctgcagatgatctccggcgtgatgctggtcggtattgccgaggggctggcgctggccgatcgagcgggtcttcaacagaaggatgtcctggaagtgctggaactgacaagcatgtcgtcagagctggtcatgcagaagggaaatgcaatcatcaagggcgaattcccgccccagcaggaactgaagcacatgcagaaggacctcaagctggcgctgaatatggccgaaggtctggagcaccccctgcccatcacggccgcctccaacgaggtgtacaagcacgcgaaacgcctcggctacggttcccacgattccagcgcagtttacgtacgggcaaggttttaa

SEQ ID NO: 394 - DNA, 2109 bp, Aedes aegypti
tgaaaatcaaaagtgataattactataaacgtgaaattagttagttccgattcgtgctgaatacaaaaccaatattgtagcataagcaaaaaaatcaaaataaccaaaaaaaatattaaaaaagttataaaacaaattaaaaatattacaaaataactggtaaaaatgcctcaagtcattgaacaattcaccaagctgccaaccgcttttggctgctctcccaaacttcgttccgtagcggacaaccaaatccgtggcatcaccatcgtcaacggacatgtggcccagctctcatccaaaatccgtacctacgttgaggagtctgttgccatgtgccaaccggatcgcatccatatcgtcgacggaagcgagcaggaaagtgctaccctgattaatactcttcacgctctcggaacggtacagccgctgcccaagtatgagaactgctggctggcccgcaccaacccagccgatgttgcccgtgtcgaatccaagaccttcatatgtactcagcgacgtgagcaagccatcccaactccgaaggatggcgtccaggggagcctcggtaactggatctcgcccgaagactacgagaaggcaatccgttctcgtttccccggttgcatgaagggacgtaccatgtacgtggttccattctccatgggaccgatagcttcgccgttgtccaagttcggcattgaactcaccgattcagcttacgtggtctgctcgatgcgtatcatgactcgcatgggtgttgaaatcctcgagaagctctcagataactccgactttatcaagtgtttgcactcggtgggcactccagccagcggaaagatcaccatgccatcatggccctgtgatccggaaagaaccatcattctacacaaaccagccaacaacgaaatcgtctcctacggatcgggctacggcggcaactcccttctcggtaagaaatgcttcgccctgcgtatcggaagcacgatcgctcaacgtgaaggatggctcgccgaacacatgttgatcctcggcatcaccgacccgaacggtgtcaaaaagtacattgccgctgctttcccgtctgcatgtggcaaaactaacctggccatgatgacgccaactcttcccgggtataccatggaatgcgtcggtgatgacattgcctggatgaagtttgactccaagggacaactacgtgccatcaacccggaaaatggtttcttcggagtcgctccgggaacctcctcggaaaccaacccgaacgctatggaaaccgtttacaagaacacgatcttcaccaacgtcgccgccacatccgacggcggagtgttctgggaaggaatggaaaaggaaatcgatcctgaagtcgagatcaccgactggctgtgccagccgtggaagatgggtgtatcaaagacaccagctgcccacccgaactctcgcttctgcgccccggcaagtcagtgcccaatcattgaccccgcctgggaagacaacgagggagttcctatttcggccattcttttcggaggacgtcgtcccgaaggtgttccactagtgtacgaagcgaactcatggtcccacggagtattcattggatctgccatgcgcagtgaaaccacagccgccgccgaacacaaaggaaaaatgatcatgaatgacccattcgcgatgcgtccattcttcggttacaacttcggcgactatctgaaacactggctcagcatggaaaaccgttgtgctgaagccggtggacacatgcccaagatcttccacgttaactggttccgcaaggatgccaatggcaaattcctgtggccaggatttggcgagaacagccgagtgctggattgggtcctgcgacgaatcgacggcgaagaatgctaccaacagacccccatcggacgcatcccaacgcccggtgccataaacatggaaggcctcggccaacgggtcgacgagaagcagctcttttcgataccgaagaaattctggcaaaatgaggtagaagaaatcaaacagtactacgataaccaactgcctcacgatctgccggaggagattggaaaacagtggcaggaactgaagagccgcgtggaagacatgtaa

SEQ ID NO: 395 - DNA, 651 bp, Aedes aegypti
caggttgctaaggagttggtattcggaaattgtggcgtcatgtcggccaatctggtcggcaaaggctacgttgagatgaccggcgtcgatcccgaaacgtcacatgacattgcagagcaaattatcgccaaaggaggacattctgaagcacaaattcagagatccaagaaccaagcggaggaaggaattcttctggccgccggcgaacggttgctgttcgaggaatgccagacctgcttcgaggccatctcgcgcaactcgttctacatgggcgacgtgggcaatgccaccaagatgaatctggtcctgcagatgatctccggcgtgatgctggccggtattgccgagaggctggcgctggccgatcgagagggtcttcaacagaaagatgtcctagaagtgctggaactgacaagcatgtcgtcagagctggtcatgcagaagggaaatgcaatcatcaagggcgaattcccgccccagcaggaactgaagcacatgcagaaggacctcaagctggaactgaacatgaccgaaggtctggagcatcccctgcccatcacggccgcctccaacgaggtgtacaagcacgcgaaacgcctcagctacggttcccacgattccagcgcagttaacgtgcgggcaaggttttaa

SEQ ID NO: 396 - DNA, 1228 bp, Aedes aegypti
agcttgataaaaattctacggcaagaagttgcgttcgtggtcggtgtgaattttaaattcgaatatttccctgtcaaacattgccggtccggttgcaatttggtgtaaaacaactgttcgacgctccggttttcgtaattagtcaaaagaaaataggaaacaatggccgatgaaagtcttctgaacgactccaacttgggagctctgggatccaacgatgatgattcggagttgattttggaggaggactatttgaaaggcgctgatatgcaaatcgatccggaactggaagcgatcaaggctcgtgtcaaagagatggaggaagaggccgagaagttgaaacaacttcaaaccgaagttaccaaacagatgacgcttgggtcccccaccggagtcactccgattctgacggcagaagaaaaagccgaaattgataaccgttccatctacgtgggtaatgtcgattacggagcaacggccgaagaactagaagcccacttccatggctgtggcaccatcaatagggtaaccattctgtgcaataaggccgacgggcatccgaagggtttcgcctacatagaattcggttcgaaggagttcgtcgaaacggcactggccatgaatgagaccctgttccgtgggcggcaaatcaaggtcaatccgaaacgtaccaaccgaccgggaatgtgcaccaccaatcggttcccccgcggctccgttcgcggccggggagcacgtatttcgagggcatgctgctacggaggacaccgaggatcacgaagacctgctcgtggatatcgaggaagggccacctattacgcaccgtattagggaacgcaagtcgacaagacacacgacccccgatattcgctgcagcacgcaaacaaactcacgtttagtttttagggcatccccatctagaggatgagaggacactgggaagcaccagtggcaactagggtaagtaaacagtattccctcctggcatttttcgaaatcggctatcccaaacgaagcgcactagttgttcatcgttctcctataaatactgatgggcccctcagagcttcagggagaacggagtgcatcccttctcaagtctatcatctttttattcacgatctcattgtttgtcacattttaccaaaaaaaaagactgactttatcaagtatttctgttgaaaatctggattttatattttacaatatatcgtcttcacagtatttc

SEQ ID NO: 397 - DNA, 3183 bp, Aedes aegypti
ctgctccccaccgcgcgcgacgacacatcgaaaatcataacaaccgaagtccgccattttttattatccctctgttcggtcgtttagcttttcattccgtaagcgcgtcgttcactgtgtggcttcttttcccagtttatcgccagggaaaaaacgcaaatttcggcacaaaaacgtagcggttccccgtgggaaccagccagaagtgaagattatccgatcgagcggagaaaggaagtgaaaattccgtgaagtggaaccgattgacagtgattggaagcaaaaaccggacacggcgaattttagcgcggctggatctcccggacggtgttttcttatcgaaagttttattttcgtagcggtcacttgagggcgtaggaattgccaacggcagcaaattgccaccactgggaagtgtttcgtcgtgttatcaaatcaggagaagcatcagctattttcatcaataacttttgggcggaaaatcaaggaagcgtcacccgggaaggaaaatgaccgatagcaaaggttatgctgttaacgatctggtctgggccaagatgaaaggcttctcgccctggccaggtcgtatctcggagcccccggcagagcttcgccgtattaccgtcaagaaaaacattcccgttcgatgcattttcttctttggttccaacaactatgcatggatcgaggaaacacaaatcaagccataccaggagttcaaagagaagctgctctcgtcgtgcaagtcggccggcttcaaggaggccgtccagcagatcgaagagttcatcgcctcgccggaaaacttccagcatctgttcgcctcggagcaggacaaccgccccgatccggacgtcgagttcaacaaactgcgcgaaggtggcaccgaaagcggcgaggaaacgaccgtcaacaacacgtccaccccggcagcgctggaatcggtcgaaacgacacccgtaacggccaagaaatccgccgccaaaaagaaagtacgtgcttcactgcccatcaagttgcatgtggataaggctgcttccacaaccaaagcccgcgcgataggcaacaaagcgaaagcggcagcggccctgaacgacacttcatcgcccaaacgcaaacggaaaatcctcaacgataccgccggcgatgtgtcctcacttgatctcgacactttctccccggtgcggcgcaatgtacctgtatcacatctgttgaaccgaccaacggttgcccgcccggcaacgccggaaatcgatatgaccagcgtgtcgaacgcgctccagtcgcgcaacattcaggcctcgaatctgaagttcggcttcctcggactcggcatcatgggctgcggcatggtcaagaatctactcaattccggccactcggtcgtggtttggaaccggacggccaccaagtgtcggaagttccaggaagcgggcgccgaagtcgccgacaccccgtcggacgtgatcgaaatgaccgatgtgacgttctcgtgcgttgccgatccccaggttgccaaagagttggtattcggaaattgtggcgtcatgtcggccaatctggtcggcaaaggctacgttgagatgaccggcgtcgatcccgaaacgtcacatgacattgcagagcaaattatcgccaagggaggacgatatctagaagcacaaattcagggatccaagaaccaagcggaagagggaacgttaataattctggccgccggcgaacggttgctgttcgaggaatgccagacctgcttcgaggccatctcgcgcaactcgttctacatgggcgacgtgggcaatgccaccaagatgaatctggtcctgcagatgatctccggcgtgatgctggccggtattgccgaagggctggcgctggccgatcgagcgggtcttcaacagaaggatgtcctggaagtgctggaactgacaagcatgtcgtcagagctggtcatgcagaagggaaatgcaatcatcaagggtgaattcccgccccagcaggcactgaagcacatgcagaaggacctcaagctggcgctgaacatggccgaaggtctggagcagcccctgcccatcacggccgcctccaacgaggtgtacaagcacgcgaaacgcctcggctacggttcccacgattccagcgcagtttacgtgcgggcaaggttttaacagcgactcggtctagcgctgaaaggaggagatgtgagcttgaagagttgaacggcgacgatgaagaaggaatgcatataacagcgtggggatggaccaagatggatggaataacgcatccctgttgggcacccccgaaatgttggggtgtgtagggacggcgtggacgtttgaaaaaaggttgaaggattatttttagtagctatttttttgttttcttttagtagcaaaaacgaatcccttttcaggaggtttaaacgtgactacgcaagtagatggtgaataagaagaaatctggtaatttatattttacctgtttaagcaataagactacaatttcggaaagtaaactgataaattctatggtaaaaaaacacatttcttttgatgtaaatgatttttgtgcacctcccatgcgaagaaaatagatcccgcactaaatagccagcagcagcacatttgactgtactatttccccaaaaaaaaagcaacacaaaaaccgtgggaattatgtgcaaacctcgatttccttgagtcaggaaggaaacaagtcgcctctattaaaaaaaactacttttgcctatattatagttttacattgtaagttttattaatgaaagaataagatgcacgaaaaaaaagaagagggtggattataattttctgtttcgtagttgatttattttataacgaaattaaagtggatcatttacaacagttcattaggggggataatccgaatcgaatccggttggggggttcgccattaagaggccggacgagaaaagtatctatagagaacgaacagaatatttgtcgtacgcccacttacgcactggaagaaaaaaaaaacgaacagatatattttatttttattgtttcctaagtttgactagcttttccaaatcatcaataccagacaagagcatagaaataaaaaacaaacaaatcataatggatttctattttcgtgaaacaagtggatcgtaaaataaatgaaaagtgtttaaaacaa

SEQ ID NO: 398 - DNA, 825 bp, Aedes aegypti
ctgaaattcgggttcctcggactcggcatggtcaagaatctactcaattccggccactcggtcgtggtttggaaccggacggccaccaagtgtcggaagttccaggaagtgggcgccgaagtcgccgacaccccgtcggacgtgatcgaaatggccgatgtgacgttctcgtgcgttgccgatccccaggttgccaaagagttggtattcggaaattgtggcgtcatgtcggccaatctggtcggcaaaggctacgttgagatgaccggcgtcgatcccgaaacgtcacatgacattgcagagcaaatcatctccaaaggaggacgatatctagaagcacaaattcagggatccaaaaaccaagcggaggaaggaacgttaataattctggccgccggcgaacgggtgctgttcgaggaatgccagatctgcttcgaggccatctcgcgcaactcgttctacatgggcgacgtgggcaatgccaccaagatgaatctggtcctgcagatgatctccggcgtgatgctggccggtattgccgaggggctggcgctggccaatcgagcgggtcttcaacagaaggatgtcctggaagtgctggaactgacaagcatgtcgtcagagctggttatgcagaagggaaatgcaatcatcaagggcgaattcccgtcccagcaggaactgaagcacatgcagaaggacctcctggcgctgaacctggccgaaggtctggagcaccccctgcccatcacgaccgcctccaacgaggtgtacaagcacgcgaaatgcctcggctacggttcccacgattccagcgcagtttag

SEQ ID NO: 399 - DNA, 1669 bp, Aedes aegypti
atgccaccgaagcgtaaaacagtgccgaaggaaaacatccctccaaagcgtgagaagctgcaagaggagatcccatctaaaaaacccgatgataagcccaaggctgaggaacttccgaaggttgcaaaagaggacaaggttccaggtgaagaatccacagtcgacgatgacgctggtgccgaactatcggataaattgatgaaacgcttcgatgagcaacctccgggcaaactgctgatcgctggcctggtcacatgggaactgacgggcggtcccaaggcaaaaccggtctccaacgtgcggcccaatctctacagcttccatcgattcacgtcggaaatgtatcggtcagctgtaaccggatgttgttcggcacattcggtgctgataactatggacaggaaagcgcttgcgttcggacgcaatcagcacggtcagctgggtcaatccgatttgcggacattcgagaagccaactccggtgaacggattgaaagacgtgaaagtggtccaggccgcttgcggaaggaatcacactttgttcctcaccgataacggggtcgtttacgcctgcggggacaaccgacacggtcagtgcggcgttggccacacgaatccaacagtattgaaagcgactcgtttgaagtacacgggtccacccatcgtgaaggtcgcttgtggggccgaattctccatgatactggacatcaacggaaggttgtactcgtttgggctacctgaacacggtcagctgggtcacaacacagatggcaagtatttcatcacagccaatcgattggcgtaccactacgaaacggttccgaggcagattgtgacgtacgtggagaagaccaatgaaggccgcaccataccgatcgaggacgttcagattttggactttgcctgcggaaataaccacacggttgccattgactcgaaaaatcgagccttttcctggggattcggaggatatggccgtctcggacatgcttcgccacaagatgaatgggttcccagactcaacaaatatttcgacatccagaagcgaaaagttttgcgtgtgttctgcggaacggccttcagcgtggccatcacggacgtcggatgtgtgcacctgttcggacggaacagggtcaacgccgacgccaacatgtaccccaaaccggtgcaggatttgaccgggtggaaggtaacgagcatcggagcgggatactcgtcgattctgatttccgccgacgattcgttgatcgcctggggagcctctccgacgtacggtgaactgggcctaggtgatgtggtgaagtccacttcgaagccgaaactggtgccaggtatggaaggtgtgaaaatatctcacgcagcagtgggtcaatcgcactctttgctgctcgtgaacgtggagcacgaattttccaggcaaaggtacgacgaattgcctgaatttatcgttgattgacttttcctaccacaatatcggctcgccgagcgttttcagtcgtttgagttccattcgattgtatccgttaggttttgaatcgcatttcgttacgatttgattacttgaagtgtgcccaaccactgttggccaatgatattcctattttctatatgtaaggtttccatgttacataactgttactgcttaaattttgcaaatccaataaaattgc

SEQ ID NO: 400 - DNA, 2007 bp, Aedes aegypti
gcttggacataacagacgctacgccaaaaacgctgctcttcgcctacttgggttggctcgctccattcaaacgcaggcataaaggaaaaaaattaactttcttgttcgggctcggcggccatcttggtggtggaagaaaattttgtgtgtgaagtcagtgcgcccaaagtgggaaaaagtctccggaaagtgaagccgattttgcggtgcggtgtgcttgattagagtgattcggtgaaattataactgatttattgaaaaatgggcgattatcatcacgattcgcttggaaccacccagctggacatgggcggcaatccgggaatggttctgcggcgtgccttcgatccgaccgctcacgatttggaagcttcgttccgattgacgcgttttgccgatctgaaaggccgcggctgcaaagtcccgaaggatgtgctggaaaagttggtctcctcactgcagcaggattacactcaggatccggatgccgcctacctgtccatgtcctccccgcggatcggaatcggtctggattgttccgtgattccgctgcggcacggtggcctctgtatggtccagacgacggacttcttctatccgattgtggacgatccgtacatgatgggaaagattgcctgcgccaacgttttgagtgacctttacgccatgggagtgaccgagtgcgacaacatgctgatgctgctggccgtcagcaccaagatgaccgaaaaggaacgggacgttgtcattccactcattatgcgaggattcaaggattctgctctagaggccggtacgtcggttaccggaggccagagtgtggtcaacccatgggcaacgattggtggagttgcgaccacaatttgccagcagaatgaattcatcgttccggataacgccgtcgtgggtgatgtgcttgtcctgaccaaggccctcggaactcaagtggccgtcaatgctcaccaatggctggatcaatcagaacgctggaatcgtatcaagctggtcgtatccgaggaggatgttcgcaaagcctaccatagagcaatggactccatgtccaggttgaaccgaattgccgctcgattgatgcacaaatacaacgctcacggcgccacggatatcaccggattcggtctgctgggtcacgcccaaaccctggcatcgcatcagaagaacgacgtttccttcgtcatccacaatctgccggtgatcgcaaaaatggctgctgtggccaaggcctgcggtaacatgttccagctgctacaaggccactcggcggaaacttccggaggattgctgatctgcttgccacgtgaacaggccgccgcctattgcaaggacatcgagaagcaggaagggtgccaagcatggatcattggcattgtcgagaagggcaatcgcaccgctcgtattatcgacaaaccacgagtgatcgaagtcccagctaaagagtaagatcccaacactttgtgaaaaccattctttccttctttcattatccagtttgacgaatccgaccgacaaggactatctgttaatgatattctgtaagtttcaaataattccacaatctgaagtaaagctaaacttatgatcacaatcacattacttgagctcttttatcaatagaaaataagaaacccagattctttatcaaacttaagtttctaattagtgttttaacagagtaaagagagaaatgtcagtcgagaaattgagagagacagacatggcaagggagtgtaacaaacaaacaaactagacgtaagctcatttaacatttaatttttctcaaaatccccaaactgtaaactgcattgataaaaaaaactaaaacttactgtggtgagcacgcaagctgattgcgagtatgataatataatttttcgttttatgaaaaacaaagctttcaaaaatattttcgagaaaccacgattacagaagataaaaaaaaacatttttgtagatgatagaatatggaaataataaaattattcaaatgaa

SEQ ID NO: 401 - DNA, 1399 bp, Aedes aegypti
acgttttcttgttttcatttactatcggtctgcagctccgcatcgcaacgcaagaatattcatcaaaaagtgaatacgtgttcttgttagcttagttaaacaatagttagaagaaaaaatagttccacatgtgcctgacagtgtaactgagctgtgcggaaaaagaaactcgatttttttgttggtcaagtgcggcttctgcaagccagcagacagaaaagcaccatgtcgattacggaatatgtccagctggcacttttattcggttctggctttatattcttcctgatgattgtggttggaatcatcctcaaagtcacaaccacacccttcccgcacattgtccgccataaggaggaggagagcttcgtagattcggtcacagatgaaagacagaggtttccatcgctggaagacccaccgactttggaactgagcgtaattgttcctgcctttgatgaggagaagcgactaccggttatgctggacgaatgccttgagtatcttgaatctcgaagaaaagcggagaaatccttctcctacgaagtgattgtcgttagcgatggtagccgtgacaaaaccgtagaagttgcccaaaagtacgccgtcaaatatggcaccgataaggttcgggtgttggccctggtagagaaccggggcaaaggtggtgccgttcgattgggaatgcttagcgcacggggtcgatttctgctgtttgccgatgctgacggggccaccaaattcccagactacgctaaactggagcaaagcatggcccaactctgcgggaatgatcataccaaagatgccatcgcaatcggttcccgtgcgcatcttgagcaggaagccaccgcccaacggaccttcttccggacgctactcatgcatggttttcactttctggtttggacatttgccgtgaagaagattcgcgatacccagtgcgggttcaagctgttgaccagatcttccgccaggaaggtgttcgccgtgatgcacgtggagcgttgggcattcgacgtggagctcctgttcattgcccaatcgtacaacatcccgatcgaggagattgccgtccgctggaccgaaatcgaaggctcaaagttgactccattctggtcatggctgcagatgggacgcgacttgatcttcatctggttccgctatgcaatcggagcgtggcagttgcggaaggaacacgtaaattaaaggcagtcgatctcatagcggcttggttggacgagtgctgtgcattttatagacttctaagagtggaacatagctgttccagaatttattcctaagatcatgtaatctacgtacattgctattgagtaacgcacctatagaataaatgtcaacgaatttgagttcaaaggacgatctttatcttcttaaa

SEQ ID NO: 402 - DNA, 903 bp, Aedes aegypti
atgctggacgaatgccttgagtatcttgaatctcgaagaaaagcggagaaatccttctcctacgaagtgattgtcgttagcgatggtagccgtgacaaaaccgtagaagttgcccaaaagtacgccgtcaaatatggcaccgataaggttcgggtgttggccctggtagagaaccggggcaaaggtggtgccgttcgattgggaatgcttagcgcacggggtcgatttctgctgtttgccgatgctgacggggccaccaaattcccagactacgctaaactggagcaaagcatggcccaactctgcgggaatgatcataccaaagatgccatcgcaatcggttcccgtgcgcatcttgagcaggaagccaccgcccaacggaccttcttccggacgctactcatgcatggttttcactttctggtttggacatttgccgtgaagaagattcgcgatacccagtgcgggttcaagctgttgaccagatcttccgccaggaaggtgttcgccgtgatgcacgtggagcgttgggcattcgacgtggagctcctgttcattgcccaatcgtacaacatcccgatcgaggagattgccgtccgctggaccgaaatcgaaggctcaaagttgactccattctggtcatggctgcagatgggacgcgacttgatcttcatctggttccgctatgcaatcggagcgtggcagttgcggaaggaacacgtaaattaaaggcagtcgatctcatagcggcttggttggacgagtgctgtgcattttatagacttctaagagtggaacatagctgttccagaatttattcctaagatcatgtaatctacgtacattgctattgagtaacgcacctatagaataaatgtctcaacgaatttgagttcaaaggac

SEQ ID NO: 403 - DNA, 924 bp, Aedes aegypti
aacgaaatggccaaactaatcgatgggaaacaaatcgctgccgacatccgcatggaactgcgcgaacagattgaggaatggatgaagcaaggtggtaatcgcgctccgcacttgactgccattcttatgagagatcccgctagtaacacttatgtttcaaacaaaatgaaggtttgtaccgatgtcggcatcactagcaaaaccgaacgctactcggcggacattaccgaagagcagctgttgaagcgtattgaagagctaaaccaggacgactccgtggacggaattctggtgcagcttcccgtgccaggtcacatcaacgagcgtaaagtgtgcaattcggtgtcctgcgacaaggatgtggacggtttcaatgaacggaacattggccggctgtgcctggacatgaacacactgattccgtgtactccgttgggcgttcaggaactgatcaagcgcaccgaaatcgagacttttggcaaaaacgctgtggtggtcggacgttccaagaacgtcggtatgccaatcgccatgctgttgcatgccgacggtcggaacgatacctgcgccatggatgccaccgttaccatgtgccacaggtttacgcccccggaggaactggcacggttctgccggacggcggacatcatcgtaacggcaacgggagtacctggcctcatcaaggccgatatggtcaaagaaggggcagcgataattgatgtgggaattacccgggtgaaggatcccgaaaccggcaaaaacaaattggtgggcgacgtggactttgacgaggttcgcaaagtggcaggccacattacgccagtgccgggaggtgtcgggccgatgacggttgccatgctgatgaagaacaccttcatcgcggcaaaaaatttggcacacaaaagggctgacaaggaaaagtga

SEQ ID NO: 404 - DNA, 1218 bp, Aedes aegypti
ctggagtcggtcagcttgaacgtgttgggttgtaaagtttgggtcggttattttgttgttttcaattattctatctacgctcgttgtgttttttttatagatcctttgagtgattcggaaaaaagataaaccatgcggctcatcatcttggacacgtccgactacgtcggtgaatggtcggctaagtacgttatgaagcgtatcaacgattttaaaccgggcccgagccggttcttcaccctgggcctcccaacggggtctacgccgctgggcctataccgcaatttgatcaaattccaccaggaaggcaagatttccttcaagtacgtgaaaaccttcaacatggacgagtacgtggacctgccgagggaccatcccgaaagctatcactacttcatgtggcacaacttctttaaacatatcgacatcgatccggtcaatgtgcacattctggatggaaacgccccggatctggtggccgagtgcaacgcgttcgaggataagatcaaggctgctggcgggatagagttgttcatcggtggcattggaccggacggccatattgcgttcaacgaaccgggatcgagtttggtgtcgagaacaagggtgaaaacgttggcacaggacacactggaagccaatgcacgatttttcggcaacgatatcagtaaggtgccaaagcaggcactaacggtcggagtgggcacggtaatggatgccagggaggtgatgattttgattattggcgcacataaggcctttgcgctgtacaaggcgatcgaagagggagtgaaccacatgtggacggtcagtgccttccagcagcatccgcatacgattatgatatgcgacgaggatgccacgctggaactgcgggtcaagactgtgaagtattttaagagcctgtacgacgtccactcgaagctgattgaaggcacgtagtagaagaaccatagaaatagaaccttccagctggagatggcctgacgacggttagcaggagttgtgctctgtccgggcgaatgaacatcacacattttagcactttttatagtcactcgaatccaaagggtagaattaacttttataatttgtgttacgatttaagtttagacggtccgttttcgtcccttactcttacttatgccagcagcaaacagcagctggtgtatgatttctttacagcgataataaagatggaagggcatggaattttaa

SEQ ID NO: 405 - DNA, 2005 bp, Aedes aegypti
tagcgattactcggatgcacaataggtggctatgatgcgctagtggctacgtaggccttacgtaatatttgaatcaccctaatcagcatgaacatcagcgttcgtcaaatgacagaacggtgctgttttactcctggttcacccgcgggtcaagcgggtcacggcgcacggaaacaaggcaaaaggaaaggcgggggcgcttcgattcattccgttttgccttgccactactgttctgttcatccgcttgcgtgtgctgtgtggtgtcgatttttctcaaagtgcgatcagcttttctgtgaaaaaggccatttcccccaggaaccgtgcaaaatgtttgcccgtacgttgaaaaccgttgctacccagggagttaagaacttctccacaacaagccagaacaatgtcaaggtggccgtttgcggtgcttccggtggcattggccagcctctgtccctcctgctgaagcagagccccctggtgacggaattgtccctgtacgatattgtccacacgcccggagtggccgccgatttgtctcacattgaaacccactcgaaggtcaccggctacaatggggcggaaaatctggagaaggctctggccaatgccgacatcgtcatcattccggccggagttccccgcaagccgggcatgacccgtgacgatctgttcaacaccaacgcgtcgattgtgcgcgatttggccgcaggatgtgccaaggcttgccccaaggccctgatcggaatcatctcgaacccggtcaactcgacggtgccgattgcctgcgaaaccctcgccaaggccggagtactggatgtgaagcgtgtgtttggcgtatccacgttggacatcgtccgtgccaacaccttcatcggtgaagccgctggcgtcgatccccagaaggtcaacgttccggtcatcggtggccactccggtgtgacaatcattcccgtcctgtcgcaggccaccccctcggtaaacttcccccaggacaagatcgctgccctgactgaacgtatccaggaagccggtaccgaagtcgtcaaggccaaggccggagctggttcagccactctgtcgatggcctacgctggagctcgtttcgctctggccctggcccgtgccatgaagggcgaacagaatgtcatcgagtgcgcatatgtccgctcggacgttaccgaagccaagtatttctccactccgctgttgctgggcaagaacggacttgagaagaacttgggactgccaaagctgaacgcctttgaacaggaactgctgaagaaggctctgccagagctgaagaagaacatccagaagggcgaagacttcgtcggcaagaagtaaagcgaatctatgtcaaattactgggtggcactataaattatcgaaaaaaaacatctgttaagtacaacaactacaacagcgcatttggcaggctaccttaaaatttaccatcatcttttgataagtcaactaccgatattaagtataattgctgccctaagagcagtcaaaccaatcatccgtagctacaaaaaatcgatattgttctctctggtagacaaaaaacaccttccaaagagtaagtcatagtgaaaaaaagaatggaaaccatctagaatgaaattcgtgaataaagttatgtgttaagctacttccatgatcacgatgtgatactaaactacagttttgaaagaattccataatgtcttcacacagacaaacagtcgacgcagtctaatcattgtccatcgactacctttttaatggttgattcgtatatattttttgaactcttacggtttttatgacattactagcatacatttttccttaataatatgcaaaattattttcatggagttgtcagatatcaaagacatgctttcaagtttttttttattcgcgtcataggttttactttttctactgattttttttttgaatataactttcgataacaatttcgggacttaagtataattggtcggtgttcagacag

SEQ ID NO: 406 - DNA, 2058 bp, Aedes aegypti
atgttgagattagcgttgttcaaaccgtccctcaccggacgactactgtccggtcctctacgaactctgtcctcaaatggaagcaacctttccaatcatccagctgccttcaaaaacgacaactctcgttttcagcagcagctgaacagcaatcaactccgccagctaaacgacgaataccgtgcggtcctccggttgctgtcccgctcctccggagtgccccagcatatcctgagtcgcagtttgcacagttccgtgcgacgattccagcagaatcgtgacgaaggaagttcctccggttccggaccagatggaaagaagcccaaaaatgacgatgacaaggagaagatgatgtcgctggtgacgaagaccctgttctggatgaaaagtgtcgtctgctatcactgcggcaagccagggcaccggaagcgaaattgtaaggcgtatctggcagagtgtggcggcaatgcggatccgaagagaaaaaaggctaaggccaaaacagtgcgcgaaaacgacgcaaagtcgttcacgtttatggtgcggtccggtaagcatgatgcgagtgcgtggacacaaatgggccgcgccaagttcactctggtggaccccgtcgagggaggccgcggcgtgtacttcaaggatgtcgccggactgcaggaagccaagcaggaggtgatggaattcgtcgactacctgaaagccccggaacgctatcaacgtctgggggcaaaggttccgaagggggcgctcttgttgggaccgcccggatgtggcaagacactgttggccaaagcagtggccacggaagcggccgtgccgttcctcagcatgaacgggtcggaattcattgaaatgattggcgggctgggtgcagctcgagtgcgggatctgttcaaggaagcccgaaaacgatcgccttgtatcatctatattgacgagatcgacgccatcggaaggcaacgagatgggggcggtagcttcggtggggtcagttccggagaatcggaacaaacgttgaaccagttgctcgtggaaatggacggaatggcttccaaggaaggcgtcctaatgttggccagtacgaaccgggcggacattttggacaaggctctgcttcgtccgggacgcttcgatcggcacattctgatagatttgccgaatctgaccgagcgaaaggaaatcttcgagaagcacttatcgggaatagcgttggaggcctctccggataaatattccgctcgcttggccacactaacccctggcttctccggggcggacatagccaacgtgtgcaacgaagcggctctgcacgcggctcgttctagtcagaagacggtcatgaccaaaaatctggaatatgccgtcgaacgattggtgggcggaacggagaaacggtcccacgcactgtcgccagtcgaacggagggtgatagcgttccacgagtctggacatgcgttggttggctggttgctgcccaattcggacgtgctgctgaaggtgaccatcgtgccgaggacgagtttggctttgggtttcgcgcagtacaccccgaaggagcagaagctctacaccaaggagcaactgttcgacaagatgtgcatggcgctgggaggacgggcggcggagaacattacgttcaacaggataaccaccggggcgcagaacgatctggagaaggtcaccaagatggcgtatgcgcagatcaagtacttcggcatgagcagcaccatcggtccgatttccttctccgaagagtcggaatccgacccgtacgccggcaagccgtactcgaagcagatggccaacctgttcgacgtggaagcccgccggatgatcaccgaggcgtacgaaaagaccgagcaaatcctgcgggacaacggcgataagctgcgcactctggccgaagccctgctggaaaaggaaaccctcaactacgaccaggtggtggagctgatcgggccaccgctgtacgacgacgccaagcgcaagatcgaaccggtcgagttcgaggacagcctgaagaagctggccaacggcggagaggaacccaagtga

SEQ ID NO: 407 - DNA, 3466 bp, Aedes aegypti
gcgcgggtctagcgaaaggttcgcttatcaatcaatcccccccatacgtagtgcgagttcgcgcttatcaatcgcggagtgtgagggtagagaaagcgtgcggaaagttcggtttcggtgagtgccgcttatcaagaaccgctcaacctgacaccgcgacgcgacctgccgaggcatccaatttctgtcccatgattacaacaaaggtgccaatcgagtgtagtggtcgcattcttgttatttttccttttctgcgtaatatcatcgtgctgtgatagtacccaaaacatcagtctcagagattcaaggtcgacgacatgttctcgttcttgtgctgaagaagactacgttcggtgatcaagtgcgtggtgtggcgtagcaagaaggcaccgagctttcctatagttttccgaaatttgaaaaagaagatggtgaatagaaaaatgtctgcactagggcatcaggtgaacatgaacaacttcctgtcgctgctggtgggtgcttccctagtggcggccaactcgtccccgaaccatgaccttacctcattctcccaaccgaccgagttctccaacggagtttcgtcctttgccctgccagccgaggaccgtatggcgttcgatagctataccctagcctatctcaactactcgtacgtcgacggcaacgagatggaattccacgagggtgaactgattggaaagtttggagaaggccgggttctgaaccggaccggtctgttggtgcacgttaccaagtcggacgatccgaacgaacaccggggctgctccaaggattggaacgggaccaagggccaaccgctgcccgccaacggcattaagtggatagctctgatcctgcggggaaactgcaactttgaggagaaagtcaaacatgcatacatgcacggagccgccggggttatcatctacaacgataaggacgatccgcgtttggataaaatgaagattaacgacaaagaacgaaacatcaccgccgtcttcacgaccaaggccaagggtcacgaattgatcgacattctggagcgacagggctacgaagtgacgatcgaaatcatcgaaggaagtcgccacatccgctcactggccaacatcaaccgaacatcggtgctgtttgtatcggtttcgtttatcgtgctgatgatcatctcgctggtgtggctggtgttctactacgtacaacggttccggtatttgcaaaccaaagacaaacaatcgagacgactgtgcaacgtagcgaaacgaatcattgccaaaattcctaccaagagtattaaatcagatgacaaggaaatcgacaacgattgttgtgccatttgcatcgagccatacaaagtgacggatgtgatacgcgttcttccctgcaagcatgaattccacaagacctgcatcgatccgtggctgctcgagcaccgcacctgcccgatgtgcaagatggacatcctcaagcattacggcttcgtgttcaccggtagtcaggagagcatccttcagctagatttggacatggaagaaggagacttgattgacgatcacagcagtaccgacggtggatatcaaagacgacacagcgtaagcccattgccgcaaatcagagcctccaatgagaatcgactctcacgaacctcctcggagtcggactcggacaacgagcatcaaccgtcctccagccggcatcactccaccagacaatcgatgacgcgtcgcgatagcacctcatccggagcggtcatcactaccgggtgcaccgattccgatcgacatccggacgataacaacatttgcgtcggctgtttggctgcggcgttgaacaagaagaagcataacatggagagcaccttcccgcaggacgatgccgatagtgataccttctccaccggaccgcatggttcctcgagtcttccggccactctcaagaaatacaaaggcaaccactcgaccggttcgtgccgtggcatgaatcccccagatcactaccaccagcacattccacagcagtcacaatcgaagcttccgttcaagttctataaaaccgatcacagccaggcacgcaaggtgcgaacacccctgaagaaccttatctcccaatcggtatcggcaccatgtgacgacggttccctaaccaacatcgacctcggttcggaagtgcacgatgactgtacggatgctccagcagttcccaaacagccaccacgtcgctgttccctgtcccgaacatcttccagtggttcggagtcgcgaaattttgcccatctccatcaccatcatcgtctcccccgtgaagaaccaccttcgcatgacgacgatccggaacacgacgacgaaggttcggacgaaaccgaaccgaacagtgacaacgatctgattgccaacaagagcagggatggcctcgaaaccgagtgcaagaagaagtgataaaagtgatattaggataaatcaaattttgaactgtaacaagtgaaacgcgaggattcgcgttttattttcagtgtatctcatactatagttgctcctgagtttaagattttttttctatagaaatcgatccgatttggacctagaaaaaagttccgaaacattttagagatagattgtaggtaaaattttgctaacagaaagatgaaaaaagcatcatgtgcgtgatataaatgttcttattttctctctatcctccgaaaccagcgaacgaatttttccagtgtagtgtgttgttcaattctgatgatttcgtgtattttgttgtatgatccttccacgtttttttccgctcaagaagttgaggcaatactactactatctagatgaaaactacaaaatcagaacagaaaaatgtttctatatagaaaacgctaggaaaattgtcaacgcgaacactaataatagtagaacaataggctatacattctaaccccgttaaataggacgaatgaagcataagagatattcaagacgaaggcgctataagtaacgtaggctccaatcagaacgtagaatatgacgtttgttcatttacggaaaccgtcacttacaagaagatcggttttgattttgaacgttttttttttctaacgtaagttaagcggactcttcattggagtcgattacaggactcgtgctcaacggacccatttcatttctttgggaaacatttaataacacgttttctcgtttcaagtcgttacccagcaaaatcaataaagtcctaaagccctgtccaaattttagttttaaacgcttaagtttaggtcagatacacatgtttattcaatttttaatatttttcgttggtttgagtccataaaaacaattatttacggtttttgagattttgtcctacgccttggtttaaactcatgatttgcgtatattttgatttccgtgtcgcttccgaaatgtcagataaaaacaaccccagtgccgtttttgtcgattaagtgaacgtcaaa

SEQ ID NO: 408 - DNA, 1086 bp, Aedes aegypti
atgatgttgggattgctgacggtactgagctgcctggcggtggtaacacgtgctctggaaggtgatgagtgccgctttggttccggtgttggggtatgcgtcggctttaccacgtgcggtccggtactaaaacacatccaagcccgaatcagtatttgcaattacaccccacgtgaggccgtcgtatgttgtccagtcgactatcgttcgcgactgcagaagatccggcagcaggccgatgccctgagcgttagcatgagaaaatgcaaagagtaccaacgccctgccaccgtgtacctcagctcgctgaaaccgaacgccgaggtggtccagaagcaagccaagcagtgctccaacgacaacaagctgatcatcggcggagaggctgccaagtgggccgagttcccgcacatggctgccctcggatatcgggacgacccgaacgaacccatccagtacaaatgcggcggttcgttgattagcgatcacttcgtcctgacggcagctcactgtataggccaaagcttgacgacggttcggttggggagtttgaatttgctgtcctcggctgcccacgagtacgaggtggaggacactttcagccatccgcagtattcggccaaatcgaagcacaacgatatcgcgctggtgaaaacgttcgagaaggtgccgttcagcgcggaagtcaggccggcttgtttgtaccaaacggcgaatgtggcggagcagaagctgacggcgtccggatacggagcgagggagaattacggcgccagcgcgaacgtcctcatgaaggtggtcctggaccagtacgatcggtccacgtgcctcaactactactcgcaggccggagcgcgtcgcctcatcgacaaccagatgtgcgttggattccaggccggagggcgggacacgtgccagggagattccggaggtcccctgcagatccgcgacgcggagaacgattgcgtctacctcatcgtgggcattacgtcgtacggttcgtattgcggcggggaagttccggccatctacacccgggtcggagcgtacttgccgtggatcgagtcggtcgtttggggcgcttga

SEQ ID NO: 409 - DNA, 1245 bp, Aedes aegypti
atccgcaaaagtttgcctcgcgtgttgggtttaccgctttgctgctcccacttcccgattccgcgcggacacttcctttcgcaccggtgtcatcgaattggtactgaaataagtgcaatcgcggcttgtctataaaaagaatctacatagtgtgtgaagtagtgtcgacattttgtacaaagtatccgatccggaattctgtgcgttgaccggtgaccaaagagaaagacgacaacgacctccaaatccaaaatgcagcaccagtgcgagacggaaaactgcaagaacacggccaccctccagtgtccggtgtgcctcaagatgggcatccagggatcgtacttttgcggtcaggattgcttcaagagctcctggaaggggcacaaggtgattcatctgctggcaaagggcaaggaggacaagaatgtgtacaatccgtggccttactatacattcaccggaaagttgcgtcccttcccgcagtcggagaagagaccggtcccggagaggattccccgtccggattatgccgaccacaaggagggccgttccaagtcggaagaatcgctgcgcggaaacaccacgatcaaaatcttggacgacgaggagaaggaaggaatgcgtgttgcgtgccgtctggggcgggaagtgctggacgaggctgcgcgcgtctgcgatgtcggagtgaccaccgacgaaatcgatcggatcgttcacgaagcctgtatcgagcgagaatgctatcccagtccgctgaactactacaacttcccgaagtcgtgctgcacgtcggtaaacgaggtgatttgccacggcattccggatatgcgtccgctcgaggacggggacctctgcaacgtcgatgtgaccgtttatcaccgaggcttccacggggatttgaatgaaacgttcttcgtcggaaacgtcaaggagcagcacaagaagctggtgcaggtcacccatgaggcgctgatgaaggcgattgccattgtgaagcctggcgagcggtatcgcgaaattggaaacgttattcagaagcatgtgcatgctcatggattcagcgtggtgaagagctactgcggacacggcatccatagactgttccacactgcccccaatgtgccacattatgctagtgagtatgggggatgggacgagaatgggtaacacttgttaaataaaacttcagaacattctgttcttctggacttgtggttcaggtatggagctacatgctctcatctc

SEQ ID NO: 410 - DNA, 1151 bp, Aedes aegypti
aattgatcagcaatttcaaaaatatcacaatggatgtattgaaggcagagatagctcgcaagcgtaaacttttggaagagaaaaaacttgtggatgaaaagaaaaagtactttaaacgaggtgaattgttggctcaggagcaagaggagtataaggcaaagtacggacagcaagccagcggtagcggagaaactcaggcaaatcacggcgacggcgacaaatcaccgacaaaagattctaagtttgattttcgcaatcttccccgatcggaagtcatccggaagttgcgagaacggggggaaccaattttactattcggagagtccgaagcggattcctgttcgcggttgcatcacttggaaatttcggctccggagattaaccgtggatttagaaatgatttccaggaagctatggaacaagttgacgaagaatatttgaacgaaattctgacctccaatggaaccggcttgagtaaagggaagtcctcgaatgaagactatgcgattgacgattctgtgacatacgaatcaatacaggaaatggctgtacgcctcgggagaagcggcaaagaacatgatatgcatgttataaccactttgatacagtttatgctgaaaatgtggaacgatcagttgaactcgggaacgaccgcgcaacgcacagcgaccaaatggaaaatcgccagggccacattcgagcagactcggttgtacttgaaacccttactccggaaattgcgaaacaagagtatacccgaagacattctggacagtttgacggacataactaaaagtctcctcaaaagggattacatccatgccagcgatgcttacctcacgatggcaattgggaatgctccgtggccaattggtgttactatggtcggtatccatgctcgtactggtcgggagaaaattttctccaaaaacgtagcgcatgtcatgaacgatgaaacccaacggaagtacattcaagggctgaaacgattgatgaccaaaatgcaggaatatttccctaccgatccatcccgatgtgtagaatacgtaagcaagaaagatagagttgattaacaaaaactagctataaggcttgtagtttataaattatttgatgtatgaataaaactggcctaaggttaatataatttc

SEQ ID NO: 411 - DNA, 1990 bp, Aedes aegypti
gcagtcatcgttcggagtttcgttcagtcggacgtgtttcggtttcggttcccagacaagcagctttagatttggttcacccaaaagggccattcctagacagttcctccccccagaaaagctctctctgttcgtgtgacataactggttaccctcggaagtactggttcaacgtgtccggaattatataatatagaagcacaaggagcggtcagttaacgagttcacaaaatctgaccaattggcccactgaaggaataacggtgctcttgagagaaagtgtcttgaatggaagacgtggaagagtgaagcagacgagaaaaaaagaaagttacacttttggctgcccgtttcatcttctgtcgtgtggcttttgaagaagaaagtttcgcttgttgtaagtttacgcttcgaagttgattgtgaattaacacacgttacgatgagcagttggccggagaatgttggaattttggcgctggaggtgatctttccctcgcagtatgtggaccagacggaactggaggtttacgacggagtgtccgcgggaaaatacacgatcggactgggtcaaagccgaatgggcttctgttcggatcgggaagatgttaactctttgtgtttgaccgtcgtgaacaatttgttggagcgtcacaatatcccacactcgaaaatcggataccttgaagtgggcactgaaaccatcgtcgataagtccaagagtgttaaaacagtgttaatgcagttgttcaaaccagcaggtgttaccaatctagaaggtatcgatactactaatgcttgctacggtggaactgctgctttgttccatgcttggaattgggttgagtcttccagttgggatggtcgtttggctctggtagtctgtgcagacattgctgtttatgctcaaggatcagcaagacctaccggaggagctggagccatcgctatgctggttggccctaatgcacctcttgttctggatcgtggtcttcggtctacttttatggatcacgcctacgatttctataagccagacctcagttccgaatatccagtggtggatggcaaattgtctatccaatgctatctgggtgctctggataactgttaccaattgtacaggaaaaagtacacccaacaaaaccccgatgcgaatgtgaatctggatgtgtttgatgccgttattttccactccccttactgcaaattggtgcagaaatcgctcgctcgtttgggcctgaacgactttgtacttacgccagaaaacgaacgcgcagccgcttatcctgggtttgagcagttccaaaacgtgaaattagaggaaacatacttcgaccgagatgtggagaaagccttcatgactcattacgcgccagtattcaatgccaagacgaagaaatctctccacttagccaatcaagtcggtaacatgtacactccttctgtgtatagcggattggtgtccctgctcgtcaacagcgatctatccgagctggcaggcaaaagagtcggtgtcttctcgtacggatccggccttgcctcatcgatgtactccatttccatcactagcgatacccaagccttgggtgccttcaaaacccatctgaattatgtcctgccactgttggagtcccgacaaaaagttgcccccgaagacttcaccaaactgatggaagttcgcgaaaagaacaatcacgctgctccctacgaaccgtccggaagcgtggacgttctcttcccaggaactttctaccttcaatccgtcgacaaaatgcatagacgtgtgtacgaaaaggttcccccgaaatctacgcaaacaaattgtacttcctagtgcccttggttaagcttttctagacgaagcgtagagaacggaaggctgggttttcctctcgttttgggcttatgatgtatgaaagaaactgttatttattctttgtgaaggtctaatcttacgccgtggcttcatgtacaataatagatatga

SEQ ID NO: 412 - DNA, 8208 bp, Aedes aegypti
ttcgctttaggcttttttcaaatgttgaacccgtaaatcccatgcagcacacaggatgacgttgacgttaaaccactcgcacggcaccactttttcgcccgcatcgctcatcgggtacccctttcaacaaaagcgtcgaaaatttgttcgcatcgaccgccgccattatcatccttcagcatcatcagcagcagctagagtgtgaagcttcttctcggtttatacgcggacgccattgtttattttctgcccgctaagcagcgacaaatccgccgttccggtttacgtttcgacgcgtaaatagtgcgtaaccggtgcatatcggagtgctgggtgccgtggtgataaagtgcttaaccaaagtagccaaactccggtagtgtgaaaaaacgcaaagtttggctcgaacattctgcatcgaaacccgaaaggaatagccaactaaacgcgaaatagaaagaagaaaaactgatcagtgtaggaaaaaaagtgtagaacgatttttttcaatgaaaaatcaagtgaacgatatttgcaaagtgcaaagtttattaatcggtgacgcgtagtggcattatttgatcaagaactccaccgacagtgaagtaatagttcagagtgaaaattttcgcatcttctgtgtggcatgacagccatatcggaagcggctgctggcaccgaactggtcccagcatccgcgaagaataatgccatcctccgatggaagcgcgtaacaaatcccagtgggccgcagccacggcctcgtcatggccatcgggccgttaacatcaaggagctaatggtggtctttggcggtggaaacgaaggaatcgtcgatgagttacatgtctacaatacagctaccaaccagtggtacgtgccagccaccaagggagatgttccgccgggatgtgccgcgtacggattcgtcgtcgacggaacccgcatcttggttttcggcggtatggtcgagtacggcaagtactccaacgaactgtatgaactccaggctaccaaatgggagtggaagaaattgaagcccaaaccgccagagtccggactgccaccgtgccgacggttgggtcacagctttacgctggtcggcgacaagatctatctgtttggcggccttgccaacgaaagtgacgacccgaagaataatattcccaagtatctcaatgatttgtacattttggagatcaagaacaatcaactgcagtgggagataccgacgaccttcggcgagagtccaccaccgcgagagtcacacactgcagtatcttggtacgataagaagcaaaagaaatactggctggtcatctacgggggtatgtccggatgtcgactgggtgacctttggctgctcgatacggacactatgtcctggactagacctcgaaccagtggccctcttccacttccacggtcgctgcacagctcgaccctcatcggcaaccggatgtacgtcttcggtggatgggtcccactggtcatggaagacgtcaaagccgagaaacacgaaaaggaatggaagtgtacaaatacgctcgcttgtttgaatctcgaaacaatgacctgggaggagctggacctagacacggaagaggacaacatgcctcgggcccgagccggacactgcgccgtcggaattcacacccggctgtacatctggtccggacgcgatggctacaggaaggcctggaacaaccaggtttgctgcaaagatctgtggtacttggaagtggaacggccaacagccgcatcccgcgtccagttggttcgagcttcaacgcactcgctcgagctctgctggccatcggtgccctcggcggcctactacattctggaagtgcagaagataccgcaacctcccccaacaccaccggcagcgccagcaccggctccggttccgagcattactccaacgccggcagctgccgccgcagcatccccggcccatactccagcggccatcgcttccccaatcgctgccattccgcaacctgtaccagtggctgcagcagccaccggatcgatgtctccagcagcggcacagcttccggcagggcttaccagcggggaacctcatctgccgcaaccaattatcaaaacccttccgggtcgtgccgtggcatcgccaatcgccgtgtccccatcaccagtggccgttcatccgtcagcatccccgctggctggcagtgccagtccgaacattttgcaaaccgccgcccaagccatcagcagtccggtgcacaatccacccggaatgcaatcgccaacgccgattgccatggccgccgtaccatcctccccggtgcacagtgtcacttcgcctccggtacagcgcatcgtcaccaaggttcaagcggccaaaccgcttcaacaacagcaaccacaacaaccgaaacaggtgctcactccaagctctccgattctccagcagcaacccacgcagatcatccaaacgcaggttcaagctcaaccgattgtgcaacagcagcaagttactcagatcacccaacagcagccgcaaacgatccgggtggtcagcggaacgggtgccatttcaaatgcccaacagatcacaaccggtgcaggaactccaatcagggtgctgtcttcgaccggacagcaagtgcggattgccactcagcaaccggtggttaatgttagcaccgccaccgttcagcaaatggccggtcaacaaactgctacggtactgcgcggtcagaacatcgtcaccgccggcggtcaactgcaacagcagcgtattgtcagtgctccggcaggatcgaccactactaccgctacgataggtggcaaacagattatattgcagaagccgttgactatcgtaggtggaaccgctgggggtactgctaccggtacgatcaataacgctgtcaatcagccacagatcgttaccctggtcaagaccagtcagggaatgaccgttcaaaccctgccgaaaatgaacgtactacaaaagggaacggtagcgggaaccatccaacaaccgcagcagattgtcacgtcgaacattatcggaggcggtggtaccattcagcaggcgactgttggtggccagaagacggctgttatcggaggcaacgtggtcaagttgatgtcgtccaccggaacgataggtggcaaacagatcctgatgaagaatccgaacattgttcaggttggcaaggtggcaacgaatgttgccggcaaacccacgctggtcatcaccaataaggccggtcagcaaattcgaaccggcaatcaacaagtcatcgtggtgacgactccacagggtatccgtaccgtcagtggaaccgtcacgtcgtcagcgaataatttcgtctcactgtcaacttcacagatgatcaatacaatatccacgtcccgtgccacaaacatcggtggagcaaccgttttgcaagcgggcacggctggaaccgccggtactgccaatatcggtggacaagccatcaagctgcgagctgttcaaggaggaaagcccattaccttcaccgttcccgttggaggactgcaagcagcgggtcagaagatcagtggcacgcagataatcaacatgcagcagaagtccctcacgattggtggcaaggccgtcactgttcagctagctccctcggctggcggacagaaaacggttaccattgttccatcgtcgaccggagcaggcactgctggaggaattggaaccaccatgacaggcgttcatggtcagcaaaagattgtcatgttgccatcgaagacgactacgcggatagtgactcaacagcaatatcagcagattcaacttcagcaacagcaagcgcaactccaacagcaacaacaacagcagcagcaggaacaggtttcgacggatgccgcgttcgccgccctggctgctgaagccggtctgattgagaatgacggcgatcaaattgagcaaatggatggatgcttcgatatgttcggttcagacgacgactcagacgaggaaggacagctaggtgctcaaatcatagaagttgaatcgatggaaggtgcttctaaatgtaaaaagatgaagctatggcctggagtcatagaacagctggacggatgcaacgatttcctttcttccgatgacgacgaagacgttgctatggaggaaactgtgtcgaggcggacacctcggtacgtacgattaggactgtttggaggtgctgcagcaattgggaccccggaaggagaatcgaccgaagagcaagatccgcttgctcaaggtgaaccaccggcggaaggtacagcggctgcagcggaaggtgccgaaggccacgcagaagccaatgctgccgaatcgatggatcaggatgaaccgatggaggcagatgctgctgctacagcatcagagtcgcaacagcaagcaggtgatgagggtgtttcttcggccagtggcttagacgatcagcagcaacttctgtccggagaggaagccggggaagtcgattccagtcaaactgcaaatggtgatttacctccactgcagccgtcggaagcagcatcaccttcggtagctccggatgccagtgaggctacagcggctaccgcagagccggctgatgtttcgatggaggacgtagccctcctggcgggcagtggtgtcaccgaagcggagcaaagtgggcttgcggaaacgacaaacaatatgtccttcggcgatcaaccggatagcagtgcaacgtccacgcaagacgcggtgaaggatgccctcagtgcaactaccgctgtgatgactggcagtcccgatgacacgagctcaaagatggccgattcagcctcggcaccactcatgaccacatccggcactcccggaacggttcaactgttgaacgctgacggcacttcgacaaccgccaccacaatggtcgtcagtgtgaacagcgctcccactgcatcggaaaccgaagcggccaacattctcactaccatcaaaagcggagagctgctttctctgcaaaatgccgatctgctcgccgctgctggttccggtagcgacaatattatacaactcaactctggtctgctgcagtcaagtagtacaatggaaggcttcacgagatctttatccggcgaaacgcaaaccatcacgttcaaaacgaccggaaacggtagcgaactaacccaggttgctaccttggccgatggaactcaactggtagcacagcttcccagcagttccatggtcaaatcggaagaccctacaaacaccattaacactagcaccggaggacatctggatgctctggcagaggccgctgcctcggcaacttccgtactttcagatctgatgagcacgacgtcgtcatcgacggtttcatcatccccctcgggagtgctcaccatcgctgcaagtccacagacccagcagccaacggccaccaccatcaagtacttcgatgccaactccaccaactccaagcagtttatgttgacttcgcctttgttacaatcaccggtaaatcccccggccaatattttgagcaatagcaacaacggaacgatgaattcatctgtcccgacggtcgtcacaacgattcctggaactactgctaattcagcaagtaataagataatcaccactacgaaaaccatacggggaacgaacgccaaggcgaaagacgaaaaggaagacgccaaacccaaaattaaggacgaatcggaaaagtggtacaccgtgggcatcttcaagaccctatcgcacactgtgtccaactttgtcgacttcgacgagtggaactgtctgtacgacggcgatacgctcaccgcggacaaccttccggatttggttaagtataagaggataaatctggaaccgggttgtgcctatcgattccgcgtggcggccatcaacagttgcggccggggcgaatggagcgacgtggcacccttcaagacctgtctgccaggcttccccggtgcaccctcggctatcaagatttcgaaatcgaccgacggagctcacctatcgtgggaaccgccaccatcgaccaccggcgacattttggagtactccgtttacctggcggtcaagtcgcaaaatgccaaggataaggccaaccaatcggcgcagcttgcattcgtgcgggtctactgcggaccgaacaatcagtgtacggtgccgaatcaatcgctgctgacggcgcacgttgaccagacatccaaaccggcgatcattttccgcattgcggcacgcaacgacaagggctacggaccggccacgcaagtcaggtggctgcaagatccccaatcggccaaaggaacgcctgcccccggcgccgcaggtcaagccactggatcgtcttcggcggcggtgaaacgacttagcgacaaatctccctcgacgaacacgaaacgggcaaaaacgggcgtcaactcgtcgatgattacatcgcccaactaggcgggttccgttgcgattcggttcatacgtcgatggttgtaaaatgtacaggactataagaaacaggatcggtgtgcgatcggaagcaaatcgtgtaaaaagtagcgtcgcaaatgtagttttaataatcggataaagtgttagggcaaaccatattattacaacatatttagaagaagttcagacattcattttcggttgaacggaaacagaatcgattggagagaacgcaattgcatgagtgtgatgtgttatatatttttttcctggtcggaaaagcttattttatggattgagatatgctactcccagctctttatacatagaaattaaagttgaaggtaagcgcaactgaagtttggctttttgtctcgttagtgcttagggaaatgaagaaatttgcggatttttctattaaccagttttaagaatgtcacttattaatttacatagctaattttgaagaatgcgacacatccagcagaattagcagaagggagagatttagcgcaaataacagttgtgtgtgtgctgatacagaaagacgaagcggataataattaaatgaacatattagctttaggaacacaaaatatagtagtgtacacaaacaagatcgaaatgaacccctataaacagacaaaatggttgttttctcggtttcaatttcgttataatttatgtgaatcgcagagataaaggaacaactctaaactttactaaactttaaaatatgtattcattttttcacttgagaatgattatttaagaaacgacatttcaatccgtgacatattcaagggacgatacacattgcaaactgatttctgtattgagttgttgaaaggtaagctcataatgaaaactggaaatatgattttgtttgtaacaactctctcaacatacatcccttacgcaaccatattacatagggaaatattgttctggtggggtgagatgatgtggctcgataataggaagcaccttcaagctgcctcgtctcacctcatccgttgaatagccccagttattagatctaacattctcctaatgaaaacgaaatgaaagcaggatctcttcatcctacagacattatgcacatattaacaaatcgatgctattcctaattgatagttgttgtgatttcctaagcaaatataagaaaaccctattgatgaatgtgtttcctttgatttttagttggttttgtgcgtgaatctactaaggcggttaaactactttcattcgacgattatgagtgtgtcaatgcaacaagctgtagaatgaatggacgtggaaaaaatatatgcgcgatagatcccttttctgttttgaaagcttattctactcacacatgatgcatgatttatacagaaaacccattataatagatcgcagaaggatagaactagaaaccctcaatacatatagaaatcaacaagcagaaaaatggaatggaatccgattcctcgattttttcttatttctcgggaagcagaaaaaagtaataaagctgtaaggtatttgttaaaacattcaattggcatgtgttcaaatttggcatttataagatccgaacaacctcttactctcctctgagtggcaaaactgctgtcacagccgtcagtctgtactgtcaagaattttacgaacaacctcaaagtgatttgcacgagtggcgcaattttgggcttattctacgagtggattgaggtgaggaatttcggacgaatctgttctacggtcggtaaaggatgtacggaatcaaa

SEQ ID NO: 413 - DNA, 2670 bp, Aedes aegypti
atggaagccctccagaagcatctcggccagatcaaggtcccgtgcggcagcgacaacgtctacaaggaggagtgcgtctacagtttcgacaatccggaatctccgaccgggctttacgtcagtttgagtagctttttggggttcggagaggaatacgcgcgtctttatgcggagaaaagtggcaatcgggtgtttttgcatttgaagcgggaaaagattgaagtggcggaaccggcgcaggaaggaccggagaagaagattacgaggcttgcgattggagtggagggaggattcccatcggaacagaaaaagtacgagttccgggagcattataaggtggtggtgcttccggaaggggtgagttttgcgtacccggatcaggatttgcctttgctggtgacgaattcggtggagggggtgttgaatgcggaagcggcctctgtgaagcgggagcgggaacagttgaccggaacatgggacggagaagtccgacaggtttcccagcatgctgagaatctgttgcagttggacaatggaaggaagattccgccgaccggatggaaatgcgaacgctgtgatctgaccagtaatctgtggttgaatttgacggatggggcgattctttgcggccggaagttctacgatggaaccggagggaatgaccatgcgttgaatcactaccgggaaacgaactatccgttggctgtgaagctgggaacgatcaccggtgagggcaagggagatgtctacagctatcaggaagacgacatggtggtagacccctacctggtcaaacacttggcccattggggaatcaatgtgggtcagctggagaagacggagaagtccatggtcgagttggagctggacctgaaccagaagattggagaatggggcattctctgcgaaagtgccagcaatctgaagccaattgccggcccaggactgaccggaatgcgaaatcttggaaactcctgctatctgaacagcgtgatgcaagtggtcttcaccattccggatttcgttcgtcgattcgttgacgggtcgaaggacattttcgaaagcttcccagctgatccggccaacgacttcaacgtccaaatggcgaagctcggagtcggcttgtgcagtggcaaatacagtgtcctcaccgagaacagcatggacacggtggacagtccttccggaattgccccgacgatgttcaaatccttgattggcaaagggcatccggatttctcaaccaaacaccagcaagacgctcaggagttcttcctgcacctggtcaacactctccagaaacattctcgaaaccaagcggatccggcggacgccctcaagttcagcatcgaagaccgcgtcgaatgttgctccagcggaaaggtcatgtataatcgccgcgacgagtggtgtcttccccttcagatccccctcaatctggccaccaacatcgccgaggtcaagaagtacgaagaagacttggccctcgcagagaaggaaggtcgtcgcctagacccagaagctcttgtccgtccaaagatccccttgagcgcctgtctggacactttcgcccagccggaaaccgtggagcaattctacagcacggccatcaacgcgaaaaccactgccaagaagaccaccaagttggccacaatgcccgatttcctcatgctgcacttgaagaaattcaccctccgagacgactggacctccgtcaagctggatgtcgcaatcgacatcccggaaatcctcgatctggaaaccctccgcggaactggcaagcaaccccacgaggaagagctccccgaactggttggccaagccccctcgcctcctcccatggaccccgccgttttggaacagctcatggtgatgggattccctccggaggcatgcaagcgagccatcttcttcaccaagaactccggcgccgaagcggccacgcagtggatcatggaacatattgccgatgcagactttgcggcgccgttcgttcccccaggaaccgacaccggaaaatccacctccgccgccgctttcgtggcggatccgatgggactggaaatgctcatgggaatgggttttaccacccagcaggccaccaaggccctgaaggaaacgcagaacaacaccgaacgggccgtcgattggatcttttcccacacggatgaactgaacagcatggccatggggggagacggccaagagactgaagcagcagcggaaccgagcacctcgagcgcagcgcagtaccgcgatggaacgggaaaatacaaactggtggcatttatctcccacatgggcagttcgtcccaggtcggtcactacgtgtgccacatcttgaaggacggccagtgggtgatcttcaacgacaacaaggtggccatatcgcagaaccctccgaaggagctgggctatctctacctctaccagcgagtctaggagtccctggagtgatcggtaaggtattaagcctctcttgtttttcctcattgattacttccctcccgtaccgatataaaggagtagtttcgaaacaattacattacaatagctgcattattgatcgatttacattgcccgttgtggggattcttgtgctaacttatatactgttctctagaagcacggcaagcagataataaaatgaatcgtacttttgtcaaattg

SEQ ID NO: 414 - DNA, 2249 bp, Aedes aegypti
atttgtctaaagcattgaactgattggtcttctcgatgcaattatcaacattacccatttcacccttaaaagaaagcgcgcattctgaagaaacgtattttcttcttacagtttttagcacagttttattgcttcaggtagctttaaaaacttccgagaacaggaagaattggtaaacgcacagcacgaaggtacgatcttagttagaatgtaacgcagaaagaaaaagaagaaggtatacgatttgaatgaatgaatacttagtaatgaataaaatcagttgaaacactaactcagattcacaacaatcgcacagattaactattaaacaggtttaaccacaaatgaataccggtgcaataaatttgcaatttgtttgcggttaatctgtctcgtcagccaaaataaactgagctacttatcccaagccgaagttaacttcgtacagaatgtttacagggagcagaattttcgcatcttccttagtttaggtataaacatgatcatattcactcaccagtaaaactatgttgttgttagttaaaaactcttataacattgcgaatgggagaaaaacgtctctcactgcaacaattagctaaccagagcgtacgaatacagtctctttaggtgaggaaatctcaccacaaatgggatttccaacttcgatgataatactcgattgcgggattcgcattctcgcagacagatactcacgtgccggtggtgaatatttaaaaaggtagaaaccacccgaacaattattcagttacaattcaagtctcgatcagtgcagtaatgtttgcgtcgaaagtggttttactcttggttttggccattattgatggtgaaatacgcggtgcaccagtggagcacagattggaggatatactgatattcgatagtgatcctgatcaaccacccggtacggaggcggcgccagatcctaccaaacgagtgaaagttccttcaatctctcaagatgaagctgagacactgctgaaaggactcggttacaacgaaaccacaaccgatgagtttggagtatcgacaaggttctcgttcggcagagatgtctcattcgaagatatggtacggaactttcagcgatctgctggattggatgagaccggaaagctggacgatgacaccaaactaactatggcagctccgcactgtggtacacgaagcctggacaaacggggagatgatgccaaatgggacaaacggttgataagctacagaatcagggactacccatccggtgcatcgtcttcattcgttcggactatgatgaagcgagcattcgacgagtggagtaaagtgacgaatttggactttttcgaaaccagcgatcgcggagcggacatcgaagttaattttggaggaacctcccacagcagacgaaacagacgttgttcgtttgacagtcccactattatggcccatgcttactttccggaagatggggatcttcacttcaactcccgttacttcttcgataatccagaacatcgggaggacttcctagataccgcaatgcacgaaatcggacattctctcggcttggagcattcgaataccaaaggggctctgatgcaccccaccgacaacaatcgctacacggaaccgcagccggaagatgtgaggcggatacagaaactgtacgggaaaagacgaggtggccgagcgatcgaaagtggatcagcaccacgactctgcactgttaccaaatacgatgcagtggtcgccgattccaccggaagatggtccattttggctggtaaatactactacgatccggaagccagcaatcccaccgggaaactgatctccagcaaatggcccggtttgaccggggacattgatgctgcgttccggtatccggacgggcggacgtacttcttcaagggagatcgattctggcggtatcgtgagaaccggctggacgctggctatccacggaagatttccgaaggattcccgggactgccgaacaacatcgatgctgcgttcatcgattcacggaaacgaatctttgcggtgaagggaaatagctattgggtgtacgactcagatgaggataccaccccgtcttataggttaagttctctgggtttaccgaataatatggatgcggcggtggggacgggtaaaacgtttgttgtgttcaaggggaaagctttttataggtttaaggatggtaaatttagcgagtatgtaaataaatggatgacttgttgataaga

SEQ ID NO: 415 - DNA, 2641 bp, Aedes aegypti
cgctgattcggccgctggatgcttcagttgagttcgagtgattacggcttgaagatgttattcccggtgcttggtgtgttcctgatcgttggaggtggcagtttggctagcagtgttataccaaataattacaatgttcaattcagcactgacatccatagcggtagcgaatcgtacgatggaaccgttgaaatatgtttcaacgtaacggaagaagttgatcagcttgaactccatgcaaggaatctaacgatcagggttgtcgctctgaacaataaggacgaagtttatgagacgcaaccaagtgaattgccaaacggaaatctactattgaaattagaaaattcgcttccatcggggaactaccatctgaaggtcacttttagtggtaccgcgtccgatagcgatgccatgttcaaaggatcgtaccagaaaggtgacgatgaatctgtcgggcactatttgatgagcaaaccgaagaagtgtggctttctcgagagcccaagtgcattccctcatttcggcgaggaacacaaagcaactttcaaattgtcggttgctcaccacgagagtttccgagcgtggtccaatatgcctttggaagatcctccctcgcgacacgatcgagaagaatatgttgtttccagttttggagaaactcccgagatgcatgttttcgatgtgggattttttgtggctgactttggttcaaagcatgtcggtaaggtgactgtagttgcccgtgaagacatactggaatccttggagtatgttacatccgtgtgtcgcgatctggtgaagatcatggataatcatactgctgttgattacaacgtgcctgattacgcattgatcgtcgttccacgcaagttctctcattccaatttgacggagtttgagaggaaatttgtaaatgaaaaattcatgatgtacaatccggaagaggacgacttcaacaaattatctgcatttttgagatcagccggtaacaatctgatgcttcagtggttcggtgacatgatcgcgccagaagaagaaagacttctccaggcgttcgcgaacgtttacacttactacaatgcggagaagatttatcctcacgagttcatgatgatgcactaccaagttgatgtcgtacaaagatctctgttacgagactacgagagacccagcagtgtgctgaacatgttttggctgatggtgttggacagcaagtgggcgacggtgatggagaatttgtcgaagaacaggcaaccacggacattgacaactgcacaattatgttccgaggcccaaactttgtggaaagatgactacaatcttccggaaggtacaacactcgaatcgatcttcaaccaatggatgtatagcgacgaggagccacctgttctgaatgtgcaacgcgtttactcggaaggtaaagtgatcctttcgcaaaacggatcagagaaggttcttccgtacaatttcgcgacaaaatcatcgcactttgatcagctgggaccattccagtggctcactaccagcaatgaaactttgaagtttgacgttcctgaagatcattggattttgttcaacaaggaacaatttggattctatcgcgttaattacgatcaacgaaactgggaactgatcattcaagctcttcagacgaacgcttccagtattcatcgagtgagtcggatgcaattgttggatgatgctttgcattttgtgaagaatgatcagcttgatgtttcaatactgttgaacctactgacgtatttaaggaacgaaacgtgctatgatgtgtggtatgatgcgtatattgtgttgaaaacgtggtattatcgtgaaatggatccgccgcaggttgttaaggattttttcgtacacatcattgagccatattatcagagttttgcgtcgcaggatattaaccaatcgaatccgcaaatggaacttcacattcaatctaaaatagctgatcttgcctgttggtttggtaagaaggattgcttacagcaagctcgatctcgtttccaacaagccgtttcgaagaacatacctgttgagcctaactgggctcggatgacttactgttacggtcttcacaatgctagtgatgatgagttagaatggctattaaccaagaataagaagcaacattcttgtcctattgcttacttgaggtgcgttgataacgagaagcatctacgacgagcactgactgagttgaagaaaatgtcgaaccccgaaaaaatagccgctttcgtatcggcactagacgagaatggatttaaactgtttcactccctactgaaaaatgaaccggatctggtgcaagttttgggatcttcaacgatcgagcttgctctggagcgcgtctcaaagagcacaaagagttcaaaaacattgaagttgatcgaggatttggaggactctttggatctcccagtcactggtaaaggttccggatcacccgaaacaaatatctgggccaagccggaagctgtcgagtttattgaacgttatatggcacagcaggaaagtcgctaggtttaggtgtggaagcatttgacatactttgtggagaaaataaattatattctttattatcacataactgtcgtattctttcaaaataaaaactattttctct

SEQ ID NO: 416 - DNA, 3243 bp, Aedes aegypti
atgtctggcaataaatccaaaggctggttcaaatcggcgttcgatttcgaggcgccctcgtcgaaaacgccaacggtaaagcgaagcgcctctgtcatcaataaccaacggccatccccaaaaatttcccctacggaaccatccatcaagaagaccaaattggacaggagcaccagtttgggtcagaatgccacatctacggtgccgacggtgacggatcctggtcagattgattggtccattgatttggcgccaaaatcggtggccgatttggcggtccatttcaagaagatcgaggaagtccagcagtggttccggacgtacgaccgggtgaagggaaccgatcccgcagccatcctgttggtttcgggtccggcaggttgcggcaagagttccacgatcaaaacagtcgccggagaactgggatatgaggtttccgagtggacaactccggtcgatgtggacctgttctatcacaattacgacttcgaaggtgggacacgggaggacgttacctttagggaaagtcagagggaacagtttgattcgttcctttacaagacatctcggtattgttcgattttcgaaggcgcttcggatcagaaactgttactggtgaaggacattcccaatgtgtttctgcgagaaccggaagtgctgaaagcttctctagaagcgtaccaggaaacaggagcgtccccgttggtcttcattgcaacggacacatcaagcaagaagctagacatcgtttacaatctgtttcccccaggagttctacaggacttccgcattcatcacatcgcgttcaacagcgtttcgacgaccctcatgaagaaggccctgaagcggatcacttcgctgatggtcggaccggaaatgacccggcactatcgggtgccttcacaagacttaatcgacagcataattctgtcctcgcagggcgatttgcgcagtgccaccctgaatgtgcactttgcttctcttaagaatgcacctcggctggaaacggaagcggtttccggtggcagtgggacggtgctgaatacctccgggatgcgaagtacgaaggggagaaagaaggaaaccaaactcaagtcggtcggaggcgatgggagcattacgctgatgcacgccctggggcgggtgttcaatccgaaattcgaggactcaaacaagttccaccactcgccggaggacctatccgacgctttcgtgtcgcaaccgggagcgatgatatcgctaatccactcgaactacgtcacgaggttcaccgacatcgaggacatcgtcggggctgcggatgtgctgagtttggccgatgtgatcatgagcgacggcttccgggaagaccagctgaccgggcatggactgaatttgatcgtcagggggatgatggtgcacaataggaaaacggccagcgggtggcagcagatccggaagaagaagacgttcgataaaccgagagaattcggagtagaattccccaccaccaggatggagcaagttcccattgcggtacggatagagaaggaaggtaaacaggtgttgcaagccatagtctctgttccgacgacatcaagcttccagtcgattatcgctcgagtgcttggaaggatagaaaacgggcatgaaaagattgataaaatctacaccgggagtctatcaatggagcagaaggatctgtttgaagtcgatcaaacttctgttcttcaggacgcttcaagagtgattggaacgtgcactaaagttttgtgtagactgaaatcaactctcgagccttcgaaacaaccaaaaaatgcatttcatcaaatgatgcaaagtgcttcggctgctgtatatcctgagaagaaggtggaaaaggacggtcgagatcaactctacaactgcgttgtgcaatatttaaagacgatgaatgcaggattcggacgatttcagaaagatgacatgcaggctttcatgagtgtgattgtttcggctctatggtatctggatggccaatcagaaaaaatagcttcagcgccaggagttcgttcagtaccaaaacggttctgtttcacacctgaaaatggcgaaacattccgtgtgcttacacatggcaacatgagaaagaaacctctcccacgaatgacaagagatgaaatgattgttgtatttgaccgcttagacgctctatgcgctacaggtattacaaaatcaaaatcgtggtcagaagttcgatcggatgtggaaggattacgtgaaaccttcgcaggttatatcaattacctgaatcaagtggagaatcgagcagaaaatgaaaccattgatgattctaaactgcatgacaacagatctctgaaaactgtacctggtagcagttcccagtctgcattagcaaaacttatgtataaaccgcttcatcagtttctgatccaagaagaaccgtgcactcccgtgaatttgatcctgtatgctccggttgaaagaaaagcgagatacaaatatattcaaggactatgttttgaattcgatgtaaacgtctatcgttcattcaaaccgaatgccacttttgtgtggaggctgccccaagagcgatcagaatctcagatagcaaacacaatccatcgtttagaatcaggtttggctgaccgtatcagagttgacaaagcaaaacgggcggaagaagcttttggaggcctagcttcgtggaccgacaaagatttaaatgattttttgactatttgtaaagatgataaagacaccgatgatgctaattctgaagacctttcggacaccgtaaaaggagttcagctgcttttgaatgacggccacgaagttgaagacgttatccttcttcgagatcaagaacaagaagctcgtgatggtaaattcaacaacttttggaaagctgttgaagctgtgatatccgagaacgatttagctgttgctcaggaaaggcgacatgggaccactagttggatatctcctctttgtgtctccctacgcgatctgatggaaaaaagtgaagagaaaatgaatcaactttttccagaatcgttgatgaacaatgtcccctcaatggaattcttccgtcttcaattctctcccagaaactcacgtactaactcggccaaacgatactacagcagatttgacataaaatatggactacaaatacgtactttgcgaaaatcacatccggatcagcactatggagcaaagcagttccaatacatgaaaattatggcaggtacgttttggtaa

SEQ ID NO: 417 - DNA, 2040 bp, Aedes aegypti
atggtcaatctgaacctgggagggaacggcggaagtggaaacggcaactcggacaacggccaggcatatccgccggtgcactatctgcacgagttgccccaggccgacgaggagcggctggagaggatcttcaagaagctcgaccgggacggcaatggccggatcgatatccacgacctgtcggcggccctgaaagagtttggcctgtcccaccagtatgcggagcgatttcttaagcaatcggatcaaacggaaagcggggatgtcggcctggccgagtttattcattatgtgcgggagcacgaaaaaaatctgcggctacagtttacgcacctggacaagaacaaggacggcaaggtggatctggacgagctgatattggctttcaaggagctgggtgtcgaaatcgataaccaggaagcagcgaagttacttaaaaggatggataaagatggaagtttaaacattgattatgacgagtggcgagattttctgctgttagcgccgtcttcggatcttcatgaactcgtcaagtactggaggcattcaacctatttggacattggcgaagatctgaacgtacctgatgacttcacgcagagcgagatgcagagtggcatgtggtggcgccatctggctgccggcggtttcgctggagccgtgtcccggacctgtacggcgcccctcgatcggctcaaggtgttcctgcaggtgcaatcaaccaaacagcgaatctcagactgtctgcagtacatgctgaaggagggcggcgtgcagagcctctggcggggtaacttcatcaacgtgctcaagatcgcgcccgaatcggcgatcaagtttgccgcctacgaacaggtcaagcggctcatccgaggcaacgacaagcggcagctctcgatctacgaacggttcgtggcgggagcgtgcgccggcggagtgtcccagaccgccatctacccactagaagtattaaaaacccgactagcgttaaggaaaaccggacaatacagcagtatactggacgcagcgaccaagatctaccgccgcgagggtcttcgctcgttctaccgcggctacattccaaacatgctcggcatcataccgtacgccggtatcgacctggcggtgtacgaaacgctgaagaagaagtacctcagccaccacgagacggaacagccgagtttctggctgctgctggcgtgcggtagcgcctccagcacgctcgggcaggtgtgctcgtacccgttggccctggtgcggacccggttacaggctcaagccgtgacgatcggttcgcagaacccagccgacgggatcgccgccgtcgagccgaacatgacgaacgtattcaagcggatactgcaaacggagggtcccctggggctgtaccggggcatcacgcccaacttcatcaaggtgctgccggccgtgtcgatcagctacgtggtgtacgagtactcgagccgcgccctcggcgtgaacatgacgtgatttggtgcgcccgaagcaacccaaaccaacgcgatcagcatcagcgtcccgaatgctatcgttgagcagctgtcgctaacgctgcttccgccgacgccgcctctgtcggcatcagtggtggcagcacttctaaaactgctactttcactacaacagccattgttgctaatgttactagccgctgtcgtcgccgccgtctcgctgcatcatcaccatctcgtcaatcgtcatcccggacatcgatcaaaccgtggtctcgacgaggcccagttcgattccttcagctatttattaaccgaatcaaagttttccgaacatttgcgctttcgaacagaaaacggaacaatgagcagaggacacagctttattcaatttcctactcccccgatcattttgatttattaacccctttttactcttaggtgtacataatgcaatttaacttatttcaacgctgattcaattctttcgtttattcataagtagtagcaacaaattgaaagccaagttctccaaaatgtaatacttttagtaaaagcaatctataat

SEQ ID NO: 418 - DNA, 2605 bp, Aedes aegypti
gtaacagttaaccaaaaaccagcaagcgagttagatcgaggcaagcaacgtgaaatattctgcaagtgcaagtgcatcctcagtgcaaaagtgtgatagttttacaagtgaaaagttgaaagttttacaactttgctattgaattttgtttttggagaaaaagcagttaaaaacaagcaagatgccggaagccgccgccgatgtggaaacctttgcgttccaggctgagatcgctcagctgatgtcgctgatcatcaacaccttctactcgaacaaggaaatcttcctgcgtgagttgatctccaactcttccgatgccctggacaagatccgctacgagtcgctgaccgatccctcaaaattggacagcggcaaggagctgtacatcaagctgatcccgaacaaggaagccggcaccctgaccatcatcgacaccggtatcggaatgaccaaggccgatctggtcaacaacctgggaacgatcgccaagtccggtaccaaagcgttcatggaagccctgcaggccggagccgacatcagcatgattggtcagttcggtgtgggtttctactcgtcctatctggtggccgataaggtcgtcgtcacgtccaagagcaacgatgatgaacagtacgtgtgggaatcgtccgctggaggttctttcaccgttcgccaggacaccggtgaaccccttggccgtggaaccaagatcgtcctccacatcaaggaagatcagctggaatacctggaagagagcaagatcaaggccatcgtgaacaagcactcgcagttcatcggatacccaatcaagctcctcgttgaaaaggaacgcgagaaggaagtcagcgatgatgaagccgaagagaaggacgaggaaaagaaggaagaagacaagaaggacgaacccaagatcgaagacgtcgaggatgacgaagaaaagaaggacaagaagaagaagaccgtcaaggtcaagtacaccgaagacgaagagctcaacaagaccaagcccatctggactcgtaatgccgacgatatctcccaggaagaatacggcgagttctacaaatcgctcaccaacgactgggaagaccatcttgccgtcaagcacttctccgtcgaaggccagctggacttccgtgcactgctcttcgtgccccgtcgtatgcccttcgacctcttcgagaacaagaagaagaagaacaacatcaagttgtacgtccgtcgtgtcttcatcatggacaactgcgaggaactgatccccgactacctgaacttcatcaagggtgtcgtcgattcggaagatttgcctttgaacatctctcgtgaaatgttgcagcagaacaagatcctcaaggtcatccgcaagaatctggtcaagaaatgcctggaactgttcgaggaactcgctgaagacaaggaaacctacaagaagttctacgaccagttcagcaagaacctgaagctcggcatccacgaagacacctccaaccgtcagaagttggccgacctcctgcgcttcaacacgtccgcctctggagacgagtactgctccctgggcgattacgttggccgcatgaaggagaaccagaagcacatctacttcatcactggcgaaagcgtcgagcaggtcaagaactcggccttcgtcgagcgcgtcaagaagcgtggattcgaggtcatctacatgactgaggccatcgacgagtacgtcatccagcagctgaaggaataccagggcaagcagctggtctccgtcaccaaggaaggcttggaattgccagaagacgaggaagagaagaagaagcgcgaggaggacaaggccaagttcgagaacctgtgcaaggtcatgaagtccgtgctggacaacaaggtcgagaaggtcgtcgtttcgaaccgtctggtcgattccccatgctgtatcgtcacctctcagtacggatggtccgccaacatggaacgtatcatgaaggctcaggccctccgcgactcctctgccatgggctacatggccggcaagaagcacatggaaatcaaccctgaccactcgatcatcgaaaccctccgccagcgtgccgaagccgacaagaacgacaaggccgttaaggatctggtcatcctgctgttcgagactgctctgctctcgtctggtttctccctggatgaacctggagtgcatgcctcccgcatttaccgtatggtcaagctgggtcttggaatcgacgaggatgaggccatgagcaccgaagaatccgctccggctgccggtggtgatgccccaccactagtggatgacgccgaggacgcttcgcacatggaggaagtcgattaagcgtcgatctctcttccccacactagcgctagattaatttattcaaattgacgcccccggttttaactaatttcaaacaggatttttagtaagcgtgggtataacttttacgttactttccaatttttgttccgcgttctagcggctgcaaagaacaacaaagatgtacattcttgtcatttattagcagttaacagacgaatacgcattcgaactgattatctttaacaaaaaagtgaattttcaaataaatcgtttgtaaaatgtaaaacttaa

SEQ ID NO: 419 - DNA, 1259 bp, Aedes aegypti
ttaagagcactgccgatctttcacttttttcgtctctgaaatttctagaaacgtcagcgcaagctgccaccagctctcggttgtttgcctgtttctctcttcgctgatcgtccgtcgctcttctctctccacagaaatttgttccgcacattcgctgtcaagttgtctttccagaaagtcgcgtggtggaagtcaagttcccgttcctcataatcggacagagattttccggttcagtgaaaagttataagaaaccgtttcccccttgcggatcatcaatttcatttgctgaaaagcttgtgttcatagaatatcttcaatcttcctcaaaaaatggcctccaagcgtttgattcctctgttggaccgtgtgctggttcagcgagcggaagccctcacgaagaccaagggcggaattgtgttgccggagaaggcccaatccaaggtgctggaaggtacgatcgtggcggtcggacccggtgcccgcaacagccaaactggccagcacgttccattggccgtgacggtcggcgaaaaagtcctgctgcccgaatacggcggcaccaaggtcgatctgggagacaccaaggagtaccatttgttccgcgaggcggacattcttgccaaaatcgaatagaaccgggagtgcggtgatgaccgtggtcgtccaaggaagaaggcgaatttcatccgagtacgacatccgacgaggaagggagaactggtcgaggtacgactttgaagctttttaattgtgtaactctagaacttaagggcgagggagggcgtctttttgttttcaaaaggactcttagaatgggattgttcggtaatcgttccgtgtgtgattgagatttaggttgaatgagtagagtctcctcggtaacacgatcacataaagcatttgcatttaaatcgattgagctgctgtgacgtgttgctccctatctccgataagttttccaatcgtgtggaccaccaaagattggcaggccaaactttgctgctcctttcatgattgaacttttcctctgtaaatcttatggaggagacttctggagatccagaatttcttctgtataggtgtcgattacttgctaggttaccgatacacacttgaacggatggatttcccgtctcgaagataggtttccgaggaaagattgtgcgaaagagaggagattgaacatcgactaaattagggctagaagtacgattctattagtttattttctgttaaataaaattaacaaaaaaagt

SEQ ID NO: 420 - DNA, 3185 bp, Aedes aegypti
ccgctcggttttgcatctgcgggcgctccagcgcatatcagagcgtaatgcaccttttgaatgtggtagtgaccgcctttacagttttgttcgtcccgcagaaagaatgaaggcactctatctccactagtttgacagaacaatcccagctttcgtacatcctacatgtatagtgcaagcaaccagcacgcgactttcgtcctataggccccataaatcagctcggcttcgagaaagcaagttcaagatacagcagaggtgaagttgaatatcgccaaaaacgcttgcttaaactccgcgacgatattattgactacagtgtgtcgtggtcgaaaatagcctctttagtttcagtcggtcgtccatcattctgcgtgagctgtaaaaggtgcggtgtgcatataggaagattacagtccccagaagagtgaaagattacgcaaagatccaaacaccagatctgtctgtctgttgggaggaagtgtacaccgaagtttccgaacgaaaaattgattgaattataatcgatccattgtgtcgggcggtggcacgcgagtgatttccgattggtgcgagaaaagaagaaagataagtcacgaaaaagtgccccaataaagagcagtgcattagaatccctgataagattgataaccggagaatcggtcgtgacaaaatgaaatcgttgaccttggaggaagtgttgaatctttgcggcatggtggcctactgccaggagggcccaatgcatttgaagcgttgctcgacggagaagcttcgtgaaatcttcaccaaatatgccacacaggaagtcaacggtgaactgtacatgaccagcgatgacttcgtgaggggtttcctcggacaatcatataatgaggaatcggtcacactgttggccggtatcgcagacaccagcaaggatgggctgatctcgtttgccgagttccaagcgttcgaaggtctgctctgcacaccggacgccctgtacaaaaccgccttccagctgttcgatcgcaatggtaacggttcggtgacgtacagtgagtttgtcgatgttttcaaaaagacagatctgcacgctaaaatcccgttcaaactggacggtccattcatacagctctacttcggcaaggaccggcagcgaacgatcaactatgcggagttttcacagtttttgcatgactttcacgaggaatgcgcgttggaagcgttccgaatgaaggacacctcagggtccgggttcatctcggcactcgattttcaggatattatggttaatgtgaagaaacacctgctgacggccgacgtcaaggataatctagtggcggtcacagaaggacacaaggtcagctttccctacttcatggcatttaactcgctgctaaacaatatggagctcatcaagcggatctatctgaacgcaacgggaggaaatcgaacggagcccattaccaaagacgaacttctccagtcggcacaaaccatgagccaaatcactccgctggaaatcgatattcttttccagctgacgggagcaatccatcaaacggggcgaatcgtgtacggcgatttgagcagtattgcaccggaacactataccaaacatatcacaactaggctaacggaaattaaagccgtggaatcacctgctgatcggtcgatattcatccagatgctggaaagcacctaccgcttcacgctgggctccgttgctggagccgttggtgctactgctgtctatccaatcgatttggtcaagacgcgaatgcagaaccagcgaactggatcgttcatcggtgaagtggcctatcggaactcgtgggattgttgtaagaaggtcatccgccatgaaggctttctcgggctttaccgaggtctggtgccgcagctgatgggtgtggcaccggagaaagccatcaagctgaccgtgaacgatttcgtgcgtgataagttaaccgacaagcagggtcaaattccacgttggggggaaatacttgctggtgcttgcgctggtgggtcccaggttattttcaccaatccgctggaaatagtcaagattcgcctgcaggtagcaggtgaaatcgccggcggagccaaggtgcgagcctggaatgtggttcgcgagttgggactctttggcctgtacaagggtgcccgtgcttgtttgcttcgtgatgtgccattttctgccatttatttcccaatgtacgctcacacaaaagctgcctttgccgatgaagagggctacaatcatccactaacactgctggcggccggtgctattgccggtattccagctgcttccctggttaccccggctgatgtgatcaagacgcgactccaggttgtggcccgtacgggacaaaccacctacagcggggtgatcgatgcagcccggaaaatcatggccgaagagggaccccgtgccttttggaagggaacagttgcccgagtcttccgctcatcacctcaattcggtgttacgctagttacttatgaactcctgcagcgaatgctgtacgtcgactttggcggttcgaggccggccggttcggatgtggcgcaggccaaacaggaactgtccaaggtgaacccggaccacatcggtggctaccaggcggccctaccgatgctgaatggaatcgagaccaagttcggcttgagcttaccgcggtttgcgtcgaccttgaaggtgccctcggccaaacaagcttcctgaaacctgcttggatggtttaggggaactgctagcgacggtggagaggatggccgccgcggaggaggtaacaaacgttggagtaacttcttctggtagcgacagaacttggaggtgtgactggactggacgaacgccaacagtgcgcgaagagtatttatcgagatggacgagtgcgtgtgtggaatgtgttgtgcgctgagagctacctggctcggtaggaattgaagttacaatatggaggaaagcgtgacgcacgccggatgctattagtctagaaatgttatagagcgtgatagttctattttaattcactagttcacaaaacgtccgaaatgatttagtgattttcgttatcaatcatttgagtgagattaatcgtttttaaagtttaaattttgtacaccggaaaattgacgaaaaagatataagagagaataaagtgcatttgttttatttttacaaagaa

SEQ ID NO: 421 - DNA, 1042 bp, Aedes aegypti
gaaaagaacagaaaacagttgatgtaacaaacgtgatcgtgaattgatttgtgaaattttcgaatttattgctctaaattacgaacaaacgaaataatcatcagccatggaggaatacgccagagaaccgtgcccgtaccggattgtggacgattgtggtggtgcgtttgcgatgggctgtataggcggtggcgtgttccaggcaatcaaaggcttccgtaatgctccttcaggtttcagcagacgactggtcggcagtttgaccgcaatcaagtcccgctctccggttatcgcaggaaatttcgctgtctggggcggtatgttcagcacaatcgactgcaccctggtccatttccggaagaaggaagatccgtggaactcgatcatcagcggggcagccaccggaggaatcctggcggcacgtaatggcgtcggcgccatggcaggcagcgccatcatcggtggcgttctgctcgcgttgatcgaaggtgtaggaatcctgtttacgagaatttccgccgaacagttccgttcgcagcctatcgtggaagacccctcggcactgggtgacccttcgcagaacgctggtgcggcggcaccgtcctcatcaatgccattcggtttcgggaaagataaaggattcaattagagtggaagcttgaccttttccatgtgagagtggtgaatatgccagatagaacgatgactgcgagcgcgtttatgtgattgtgtgatagattctagtgaaactgtataaggtaacattagtggggacaagaaaagtgttctgaaaacacaccgaacttcggtagaaccggatgccgataaaatgcaactacgaacgaaacgatcgggcggtgtcattggtggaagaaatccttctacaagtaatttcttctcataccaagtttctcgatataatggaatggtatcgtcaacttttttctgtttctttcagaaccggaagagcaaaattagacctagtttttctgtatataaaacctaagagcaaataaaaattcgattatttcaaacatgaaaa

SEQ ID NO: 422 - DNA, 942 bp, Aedes aegypti
atcatcagccatggaggaatacgccagagaaccgtgcccgtaccggattgtggacgattgtggtggtgcgtttgcgatgggctgtataggcggtggcgtgttccaggcaatcaaaggcttccgtaatgctccttcaggtttcagcagacgactggtcggcagtttgaccgcaatcaagtcccgttctccggttatcgcaggtaatttcgctgtctggggcggtatgttcagcacaatcgactgcaccctggtccacttccggaagaaggaagatccgtggaactcgatcatcagcggggcagccaccggaggaatcctggcggcacgtaatggcgtcggtgccatggcaggcagcgccatcatcggtggcgttctgctcgcgttgatcgaaggtgtaggaatcctgtttacgagaatttccgccgaacagttccgttcgcagcctatcgtggaagacccctcggcactgggtgacccttcgcagaacgctggtgcggcggcaccgtcctcatcaatgccattcggtttcgggaaagataaaggattcaattagagtggaagcttgaccttttccatgtgagagtggtgaatatgccagatagaacgatgactgcgagcgcgtttatgtgattgtgtgatagattctagtgaaactgtataaggtaacattagtggggacaagaaaagtgttctgaaaacacaccgaacttcggtagaaccggatgccgataaaatgcaactacgaacgaaacgatcgggcggtgtcattggtggaagaaatccttctacaagtaatttcttttcataccaagtttctcgatataatggaatggtatcgtcaacttttttctgtttctttcagaaccggaagagcaaaattagacctagtttttctgtatataaaacctaagagcaaataaaaattcgattatttcaaacatg

SEQ ID NO: 423 - DNA, 939 bp, Aedes aegypti
tgaacattgcgtaaacattttgcagatcttgcggaaaaatcaaagaattttagataaattagtaaaaaagattagtgtttatcaccattaaaaatgttcctgagacctctggagatgctgtccaacgtgctgcgggtggcttccaagcgaaccatccatcagagcgcggctttgctcaaggtggaagaccgcaaggccatgctcgcttcgcttcccggcaaggacgaaggaacgattggcgaacgcgctgtggacatcgattccctgattaccaaaaaagagcgtatctttcccgatgccaacacgccgaccaccctatttaacgggatacccttcaacgagattccgatctgtaacattagggtgtcgccaaataacaccatcatcacgatatgcgacgccaaggggacgccccagttcatccgctcttgcggcatcgaagggttcaagaatacccgcaaaggaacgaacattgccgctcaagccactgccatcagtatctgctcggtgggtggttcgaaaagatgagattgaccactccaagcaatgaactaattagaatgctctattttacagaaagcgatcgaacgtgggtacaagcaagtacgggttacggtacgggggttgggtccgggacgaatggtaatattataatatcgaaaattgtggaattaccctgaacccatctctttttttcagtctgctatcaaaggtttagaaatggccggtatgaatatcgtttcaattacagatacgactcctgtgtcgtggaacccaccgcggccccggaagcaacgcaagctgtagataaggtattgcgtagtttatttgttacctcgttgcagaatacgcattctattgtacagatgaaaaactagcagcttgcttgtgtgtgacttaaaacatatcgaaagccatggcaatgtcatctttcttatg

SEQ ID NO: 424 - DNA, 739 bp, Aedes aegypti
cgcctgtctgtcagattcgacacgacatttgccgtcttctcgcaaagtgtggaaattttaggaggaaaagtttctttcaattttccgtattcaaaaccttaaatttacccccaaaaaatggcagatctcggtgctccagttcgtgtttccccgctgatcaagttcggtcgttggtcgttcctggccatcggtgtggcgtacggagcctaccatcagcagcgtctggccaagcgtgaagtcggtattcgtgaggtcgaagcacagcagaaagtcatccgtgacgcgaagttggccgaggaaaagaaacgccagcaagcagaggaagccaaggccatcgcagagctgtccaacccggccaagaagtaggaatctgcgagaatttattgttagtcccttattttttaaaactcgtatcgaagaacgaattcaaacaaattgtaatctaattttcaagccttccaatggagggagaaaccaacaaacgaaactgtgaaaataaaggatactaataaattcctagcggaaagttgcacaagtttttattttctctttgacggtgtttcatggaaaatcaagcgagctatcgagatgttgttcctgaaccattcttcaaaagaaaccaatttgggttcctgagtcttaactgtcatttcaaccggccttaactacaaaacgagaccaactaaggggacaataagcttggtcgtgtggaaaaacaaaacgtcaaattgggataaaa

SEQ ID NO: 425 - DNA, 332 bp, Aedes aegypti
aaaaacttctacaacccacttctgttggccgtggattgaagtcctgtgagttttattgctcggaaatcaacgatgtggttcgaaattctgccctcctttggcatcattacggcgatcctgtccgttcctggattcgcaatgtatggattgcatctgttgacgttggacaatgcctaccggcgtaacaccgaccagagatgggagcgtatcatgtatgtccgggatatgagactcactggcaatccctacaattctaacggattggagtctattccagataagtaaaccaatattcagaaatgtagataaaacggaatcttctatgaacacaa

SEQ ID NO: 426 - DNA, 1356 bp, Aedes aegypti
gattcccgttttctttcgtccacatgcaacgaaattcctttaagagcttcacaaatttagtgcgctgtttcacgctgaatataaaagcttcgtgatttatgtaagaattagtagaaaattgcagaaaaatgttccggaaacttgttcaatcgtcagctcacatgctgccgagaggttacataaatcagtcggctagcggaatggttggtgctagccggtactcatcaactgcggcagatcctgatagtcccgtcgagttggaagagaatcccttcgctaaagatcgtgtccagtgcattctgtgcaggcacaacataacaccagactacaagaacgtacaactactgtcgcagtttcaaagtccctacacgggacgaatttatggcaagcacataaccggtctgtgccgaaggcgccaagaacaggtggagaacgaaatcatcaaagcgcagaatgccggatttatgccgacttaccataaggccgtcgagttcctagaagacccgaagctgttcgatccagagagacccgttcgaccgcataaatattaacctggttctaatggttttgagaaatagaggaaattataatacaagtaatggatcagttggatttttcgaaatattccaatgcagagctataaacctttgccttcgaacgatgagaaaatttgtaatttgaaaaaagtagctagaattacaaaaagtatcaacagaaagtttcacatatagaactgaatcaatctggatccagaaactcctgggtctcgctatcaaagtttaccaaatcaaaaggtatctggagcatgttcagcaacgattccatatcaccggtgccgcgtcgttcctgtagatcattcaaagctgcaatgcatccgttcctccatactgagatgctttccttaacttcctgaatttgtagctttatattcgagggtggttttgaatctggcttgtcttcagttggtttagtttcaacacgactatgacttggttcctgttccacacagctatcgatttcttccggttccgtacacatctccacctcgtccatcaactttcttcgtttgatgttttgcagttccttcttctgaactatttttttcctccagctttgactcaacgatagacgtgttttcttggagcttgacctgacggcgatgggtgttgtcaccggtgctggtgtttcaacgttgtcctcctggtcactagtgtcattcaagcaagtgcttttaataggccgcatttgattggcagtcgggttggggctgctactcgccaaaacgttctcgtcaacggcatggctgggaagcgctgatttgggtgtactcaatgcttcctgcaaatattcaaggaa

SEQ ID NO: 427 - DNA, 779 bp, Aedes aegypti
aaaaaagtacgatcgtcgtcctgaactggtcgtccctctgttctaaacgttgtttattcctgcattagcattccacgaaccaaggcaaaagtgtgtgccgagtgaaaactgggaggagttgcatcagaaaatcatagatcatcctttagtggctcgaaatccagtagtgctgtattgactcaactctaacagcattgtttacttccattccttgagtgagaagcgtttccattttccgaacaaagcaatggcagagataaagccggaactcggggaaatcgacagcgatgctgaacagaactattccctcggcagtaacgttgatccgaagaacatgcaagaattgaccatctacgttcagaatctcctccagaatgtgcaggacaagttccagaccatgtcggaccagattatctcccgcatcgacgacatgggcactaggatagacgacctcgagaagagcattgccgatctgatgcaacaagccggcgttgaaggtgccgagaagtgaggactgccaggattcggatgggaacaaaaggtatattgtactggaagtgatctgtaatcagctaacttataggtttatgattagatttatcgcaagcatgatttagtttcgggataagttttcctctcgtcccgtatcagaacgtgtgacagtgtcatatttgcgaaaaaaaaaaccaagttttcctgctggttagggtatcacggtgtgtcttgaaccgttgttaacgaataaaatggccatcaatcagtatcgaccattcgaaaga

SEQ ID NO: 428 - DNA, 1425 bp, Aedes aegypti
ctcagatttttacctcctaattttccatagtgatgccacccctgcgttggccgttacagcaaaactggccgctgaaacatttcgttttctatcgtttttcttcgattcggctttttgcgccacattcaagttgaagaaccgtcgggataaggaccagttttttttaatccgctgtttgaacacaattcttgtgcgattccaccgtaaatttcttgaaaagacaaaccagtttcataaagcatcaaaatgtcccaaaaaggatccgccaaagccaagacaacgaagcaaacaaaatcgtcccgcgctgggctgactttcccggtcggaaggatcacgactgccctgaagcgtggcaaatacgccgagcgcatcggaacaggtgccggaatctatatggcggccactctggaatacctgttggccgaagtactggaactgtccggaaatgcagcgaaggacaacaaaaagagccgcattgttccacgccacattcagctggccgttcgaaatgacgacgagttgagcaagctgctgagtcatgtgtccatctcccagggcggagtgctacccagtattcactcggcgttgctgccgaagagtaccttgatcaaaaaggcgtctgcagccgggggcgattccaaccctagccaggagtattgaggaggaggccatccccaccgccgcagagagacagagcagagcttgcgttacggcggaatcatcacagtaccttcctttaggaccatgacaagttacttattttaagattaggaacgcgtgccactggcactgttagtttgtaagacttttgattgaatttgccgctttcgagattaaatatgtattttaacgattaccaattttctgcgtacaattttttggctagctatattgggataagttcaatgtaaactcttttgggaacttcacagctggtctcgtcatagagacttggtttctattctaatgcaagcctctaaaaagttttttaaaggaaggtgtcttaagtcaaccaaaatggtttctaaagtcacttgctatgcttgcagtgaaccctgctgactaattctagaggttcataagaaaccttcagataccattacacgactattccacagattcttcaggaatttccttgagatctataaattctgttagcagtgattcatggggaattacttcagaatttgctccagggaatccttaagcactccaacgcttgtacctcctataatttccacaagaattactgtgaatatttttccatacttgttactataggagctcttccaagcaaatcgacaaagaatcattccagagatttcgaaaaattcgattaggaattttccaggaagatctacatgaattcctatgctaatttctctcgtttccctttcagtcccatacggattccttcaagaattc

SEQ ID NO: 429 - DNA, 1320 bp, Aedes aegypti
atgatgactgaaacgctgaattctaataatcatctcagccaaaagggcgagaacaaaatggatgacatgggatggaaagccaaactcaaattaccgcccaaagataatagaattaagacaagtgatgtaacggatactcgtggtaacgagtttgaagagttttgcctgaagcgagagctgctgatgggtatcttcgagaaaggttgggaaaaaccgtcgccaatccaggaagcagccatcccgatcgcactagtgggtaaggacatcttggcgagggctaaaaatggtaccggaaaaacgggcgcgtacagcattcctgtactagagcaaatcgatcccaccaaggattatatccaggcattgatcatcgtgcccactcgtgagctggcactgcaaacatcacagatttgcattgaactcgcgaagcacatgcatatccgggtaatggtgactactggtggaaccaatctcaaggatgatattatgagaatatatcagaaagttcaagtgattattgctacgcccggtcgtattctggatctaatggacaaggaggtggcaaatatggccaactgccgtatgttagtattagacgaagcggacaaactgctgtcgcaagacttcaagggcatgctggatcatgtcataatgaaattgccaaaagagcgccagattttgctgttctcggcgacattcccactgagcgtgaagaacttcatggaaaagcatctgcgcgagccatacgagatcaacctgatggaggagctcaccctgaagggtgtcacacagtactacgcgttcgtccaggagaggcagaaggtgcactgccttaacaccctgttttccaagctccaaatcaaccagtcgatcatcttctgcaattcgacacaacgtgtcgaactgctggcgaaaaagattaccgagcttggctactgctgttactacatccatgccaagatgcagcaggcacatagaaatcgcgttttccatgacttccgatccgggctgtgccggaacctggtctgctctgatctcttcacgcgaggtatcgatgtacaggctgtgaatgttgttattaatttcgatttcccgaaaatggcagagacctacctgcacagaattggccgatccggacgtttcggacatctcggtatcgccatcaatctgatcacctacgaagatcgatttgatcttcaccgtatcgaaaaagagttgggcaccgaaatcaagcccattccgaaggtgattgatcctgccctttatgtgcctcgaccagaggatcaaaatagcacacaggaagaacagaacattagcaaataa

SEQ ID NO: 430 - DNA, 1222 bp, Aedes aegypti
tgctcgttcagtgcagtcgtcgggtgtgtgattagaaaaagttctgtttgtgcgaggcaccagttccggacagattagcagcagccatttttccctcccaaagaagagaggtgtgcgtgtgtttaccagcagaaagaagcggatttctgcccccaaagcgataaacgattgtgaagtcgacttagccggaaagaggaatactatctagatagcgaaaaatggctggaggaaaagctggcaaggattccggaaaggcgaaagccaaagcagtttcccgctcggcgcgcgctggactacagttcccggtgggcagaattcaccgacacctgaagaaccgcacgaccagccatgggcgcgtcggtgccacagcggccgtatattccgctgccatcctagaatacctgacagctgagatgctcgagttggccggcaacgcctccaaggatctgaaggtgaagcgtatcacgccccgtcacttgcagcttgccatccgcggagacgaagagttggacagtctgatcaaggcaacgatcgccggcggtggtgtcattccgcacatccacaaatcgctgattggcaaaaagggcggccccgaataaccacctccccaccaccatcatcaagattactaaacactaaatatacacaaagcgaaaacgcgcgccccccctggaagccagacgtcttatatacaaacacaaacacacacattttctgtaacagtttttgcacaagtaagaaatcgcgtcgacacagcaacagagagaatctatatcatagtagaaataataacgtttaaatgatacacatttaacaattgaacaggacattctcgtttgttgtctaatgtttagtatcgttagtgcaaaccgcagttgtttcttcttaaattcaattctcgaacggcggtatcctacttccaaagggtagtatacgatctccttgcttcaccatccttgctattgtattttcctccttcgccttttttttctcttctgtgttgtgacacccggggacgcggatatgtgtgcgcgcgcggaacagcaagccgtttaagcaaaatatcgtcgtcgtgtttaactaatttttaacgcaaattgagagagaaaactaaaatgagagaaaaatctaaaagaaaccctagagagtacataagttaagtgcgtttttcttattatattttcgatgaaaaataataaaattttactattaagaaaagaaa

SEQ ID NO: 431 - DNA, 1835 bp, Aedes aegypti
aaaaaacttgacaaaattttaactttttgcagtggaattagtcactgattcatattttgttactcggaagtctgtttcggttaaagagtagttaaaagttgttcaatctcggctcggtaaaatatttcctagcaaggcggtgtagaaaaaaagcggcgcagccaaaatggtggacaaaatcgaaatgagcctggatgatatcatcaagtcgcaaaaatctcaacgcggcggaggtcgaggtggcctgaataaatccggtggacctccccgcggaaatgtaaaccgtagccgtaatggtggcggaggaggattccgacagaaccgcggtggcccaatgggaggtggcgttcttaaaggccggaaccggggcggaattcagcgaacgacgaaattctcacggggtgacgtaaacagcgcttggaagcatgacatgtacgagggagcccgtaaaaaccggctgctggccgctgcgggactcggcggcggtgttggcggtggacttggcagcagcaagctgatggtgtcgaacctggactttggcgtgtccgaatcggacatcaacgagcttttcgccgacttcggaccgctgaagagcgcctcggtacactatgaccgatcggggagatcactcggcacagcagatgttgtattcgaacgacgagcggacgccatcaaggctatgaaacagtacaacggcgttcctctggacgggcggcccatgagcatacagctggccacatcggaaattcctgccccacgagcgcctcgcgttctgccacggtctccccgacgacaaggcggcggtggtagcagtggtgcccccagaggtggaaaccaggcccgccgcggaggaggaggtggtggtggtggcccacgccgccagcaacgcgaaaccaaaacagcggaagagctggacgcggaactggacgcttacaccaaggacatgaagtaaaactagatgtcgctaatcagtcagtagtggcggatatcattaaagtatgataggacaggagattgcagtgtgacctcttaagaaaataaaacaaaaaatagtggttactcaattctactataaggacctcaaggtgcgtttcgccaagaaaaaaaaatgacggcaatgtccagctggtagctgcgtgaacggtcagtgtaaataaatcattaaaatgataacagaacgaggagaagtacattaaattaacaagataaattagtatgcagacacgatcatcgttgagcttgcagtcccaggaccggtagactcacgatgatctccatatgtaagcgatgcagttcattggttaatctattgaacgattgcttgatcttaaacaagtagaaaagttcattcttattacaacatactttgtaatttgaacaattagtaaagtgtgttctcaatgctgagaactaacggaaatgcaatgttccaaaaagtgagtaacggtgttacttgtcaaaacactattagtaatctaatttattattatttctcatgtaactctgtgacaaactcaactgattccaattacagacggaatcagtatcactaacagcaggtaatcaccgattgcaaaaaaaaaatcgaaaccgtaagatcacaccattagattcaggaaaattttactacatgaactatcatttcataacttttgtgcagatatagcagtacacattcgataaaatcactgaaaattttgaaacgtggaatacatattcaatctgtgaagctagcagaatgttttagtttgtagttgttaatttaaggaactcacaaagatggaaactcaacaaaaaaataaaaaataaaacaaatttcatcttatatgctgggc

SEQ ID NO: 432 - DNA, 1841 bp, Aedes aegypti
atggtggacaaaatcgaaatgagcctggatgatatcatcaagtcgcaaaaatctcaacgcggcggaggtcgaggtggcctgaataaatccggtggacctccccgcggaaatgtaaaccgtagccgaaatggtggcggaggaggattccgacagaaccgcggtggcccaatgggaggtggcgttcttaaaggccggaaccggggcggaattcagcgaacgacgaaattctcacggggtgacgtaaacagcgcttggaagcatgacatgtacgagggagcccgtaaaaaccggctgctggccgctgcgggactcggcggcggtgttggcggtggacttggcagcagcaagctgatggtgtcgaacctggactttggcgtgtccgaatcggacatcaacgagcttttcgccgacttcggaccgctgaagagcgcctcggtacactatgaccgatcggggagatcactcggcacagcagatgttgtattcgaacgacgagcggacgccatcaaggctatgaaacagtacaacggcgttcctctggacgggcggcccatgagcatacagctggccacatcggaaattcctgccccacgagcgcctcgcgttctgccacggtctcccagacgacaaggcggcggtggtagcagtggagcccccagaggtggaaaccaggcccgccgcggaggaggaggtggtggtggtggcccacgccgccagcaacgcgaaaccaaaacagcggaagagctggacgcagaattggacgcttacactaaggacatgaagtaaaactagatgtcgctaatcagtcagtagtggcggatatcattaaagtatgataggacaggagattgcagtgtgacctcttaagaaaataaaacaaaaaaatagtggttactcaattctactataaggacctcaaggtgcgtttcgccaagtaaaaaaatgacggcattgtccagctggcagctgcgtgaacggtcagtgtaaataaatcattaaaatgataacagaacgagaagaagtacattaaattaacaagataaattagtatgcagacacgatcatcgttgagcttgcagtcccaggaccggtggtagactcacgatgatctccatatgtaagcgatgcagttcattggttaatctattgaacgattgtttgatcttaaacaagtagaaaagttcattcttattacaacatactttgtaatttgaacaattagtaaagtgtgttctcaatgctgagaactaacggaaatgcaatgttccaaaaagtgagtaacggtggtacttgtcaaaacactattagtaatctaatttattattatttctcatgtaactctgtgacaaactcaactgattccaattacagacggaatcagtatcactaacagcaggtactcaccgattgcataaaaatcgaaatcgtaagatcacaccattagattcaggaaaattttactacatgaactatcatttcataacttttgtgcagatatagcagtacacattcgataaaatcactgaaaattttgaaacgatgaaacgtggaatacatattcaatctgtgaagctagcagaatgttttagtttgtagttgttaatttaaggaactcacaaagatggaaactcaacaaaaaactaaaacaaatttcatctcatatgctgggcagttgccgtgtattttcatattgagaaagatcacccatgtttacccctgtcccctgtctacaatattgtatgtggttccttgtgtgcaatagtttggtcaaattttctattgagaagatgaagttgtattgctcgtcttcgcttcagattcgaaagtaccttttgtatgaa

SEQ ID NO: 433 - DNA, 1357 bp, Aedes aegypti
cgtctcgcttgctaaacgagcaagttcgcatcacttttttcgcgtctctcgccatcttggtcgcgtagcgtagtacttttccttttggaaaccgctctgttaaaatcatgtctcacggtcgcaacgagtgccgaatctacgtcggaaatctccccccggatatacgcaccaaggacatccaggatctgttccacaaattcggcaaagtaacgtttgttgacttgaaaaaccgccgcgggccgccatttgcttttgtggaatttgaggatgctcgtgatgctgacgatgccgtaaaggctcgcgatggctacgattacgacggataccggctgcgagtggaattcccccgcggaggaggtcccggaagatacagcagcagcagtagaggcggcaatagtgaccgtgggggtggcgctcgggatcgaggaaatcgcggtcctcccgcccggcgctcccagtttcgggtcatggttaccgggttgcctgcttccggttcgtggcaggacttgaaggatcacatgcgagaggcaggtgatgtctgttttgccgatgtatacaaagatggaaccggtgtcgtggagttcctgcgccatgaagatatgaaatatgccatcaaaaagctggacgattcgcggttccggtcacatgagggagaggtggcctacatcagagtgcgcgaagattctaccaataatgacgatagaaggggaggagaatatcgcgaccgatcgtattcaccgcgcagacgtcgtggaacacccacctactcaccggtacagcgcagcttttcgcgatcgcgttcccgctctttcaactactaggaatctgttatgccgaaacagaacctggacggatccttacctgtggattccaagtaatttcattgacctttaccttttgttttcaaaactcttgcgcatcattgcgctttctttcaaacttttttccgcaagatcctacagacgtaatctaccagagctgttgtgtttgcacaaatgcaaacgcagtaatcatattgtaaatgtaggagtattttaatcattttaagtacattccttgagaaggtaaaccttttcgtgacagggaaaataattgacaaaagatcaatcattttagtcgtaaaatttacaaaaatactgtatgaaaaccagcatatgtaaatgaaaaacaagtgcttgaacaatctttaacggaatgttaattgaaccatataagctttattttcatcaatcagacaaagagtatatttcaacaaatcaagaaaatgtcaaatgaatattagtttgaaaggtataaataatttctaagttctcgtctcttcttctagcctgtgaaatgcgacatgaagatctctatc

SEQ ID NO: 434 - DNA, 3070 bp, Aedes aegypti
atgtacgcacagctgtgcaaacgcatcgagaaagaactagagatcgacattgacaacaccaaatcgaacaccttcctgcaaattctgctgaacgtttgccgcgacaagtttgagaaccgggtgcagtatagtgagaagatcatcaattcggaactcgccctcacagatgatctggaggaaaagaaaaatgtggccaaacagaagatattgggcaatgttaagttcatcggcgagctgtataagctcgacatgctcggcgagccacatctgcacaagatgttgcgctcgctcattaccagcaagtccagcgcgtcgacggagaaaaactgcgaggacatggaatgcttggcacaactcatcaagacctgcggaaagaatctggatacagagctgggaaaacagctgatggatcagtactttgaccggatggaacagtactccctgtcgagcaaatatccgcctcgtatccggtttctgttgcgcgatctgatcgaactgcgcaataacaactggacaccacggaaggtggcccgcgttgaaggaccggctccaatccaggagctcaccaacgaggacgacctggtgctgcggccgtcgtttggcatgcggggccgcgactatcgcaaccagggcgaccggggcaacgaacgggactggatcaccaagctgacgctgaacccgttgaacttcaacgacagcttcaacctgctgagcgtgtcgagcccgacgcccctgataccaccaacgtattcaccgtcgtcgaatggctacggcaaccgtgaccaccgcgataatggtggcagtggaggtagcggcggcggtggtggcaactatcgcatgcacaacaaccgcaacggtggtggaccgaaccaccatcagcataacaactatcacagcaatggcaacggcggaggtggcaacatgcgctacaacaagcacaacaaccaccacggcggcggcggtggcggaggcggtggccgagatggtcagaaccatcaccaccagaaccgggatggaccgaatgctcacaattcgtcctactcgaaccgaggcgacggtatgatgaatagcaaggacctggcgccccgcttcaagcgcaatctgatgacaccgcagaacccggttgaggatctgcagatgcgcccgacgccgaacagtctgctgttcaagacccagaacatgaacatgaagacgcaactgccaatttcccaggcaccgtcgtcgcaatccggcaagggaagtggctacagtgcaccacttggcgatttcccatcgcctctgaccactcgcacgctgctcagtgaacaacgagcagctgccaccgctggcaatagtgcctttggggcaaacgccaccggtaacggctccggtcttggctcaacgggaccagctggtcagcagaacgcttccaacaactccagtcccagccaacagaatcccttggctcggaacaaccaacagaacctgttgaatggaaaatctcaatcgaatcaacctgctgcttcggctcccatcacgcccatcaacaacatcctgcagaaggatcagaacaagaaggacaaaggccccaacaaggaggaattcatgaagaaggtctccgcattcgcttccgacgttttggtggacaacctccagaaacaaatcgacgaggacaaacagaagaagtcccaggacaaggcagtcgtagagaacggtgccgtcaaggaagtagtcgtcgaagttgtcgatcagaccaccccagtcaacccggacaccgtcaacgaagcggatctcagcgaagaaaagtccgaagacagtgacaaatcgtcctcggagaaggcggatgtcggatcggaaaccgaaaagcccgaagaaccagaacaacccaaacaggacgaacgctcgccgatggacgaactggtgcacgagttcgccgagcttaagatcccggaaaagttcatgcgcgactcgatcggtaagatcgtcagcgaaatcctggacaagtcggatgcattccacgagaagatgattgcgttcctgcagcgattgcgcaaggagaacaagctgtcgaacggagcgatgctggaatccttcaaggcgctggtcaactcgatgaacgaaaaggagaagaccatccccaagatcaccaccatcgtggcgtcgctgctatcgcgggcagtgtccgtgcggctctgcaaactgtccgacatttccaactacaccgacaacggccagcactatccgctgttcctgctggtgctgcagcagctgcacaaacagctcggcaagcagcccctgcaggaaatgttccaacagagcaaggtgaacctgatgaccagcctgcccgaaagcgaccgcaccaaggaccgcatggcggagatcctggaggatcgcaacctgagcttcctgtatccgctgctgcgagtgcaggccgaactgtggaagcagatccaggccgacgccaacccgcagcagttctacaagtggatcaaggagaacgtggaagccagctgctatacggatccgggattcatcaccgcggtcatgaccgtgctgctgaagtacatcatgcaggaatcgtccaagtgcgcggatgagaagcagtcggtggagaaggagaaggaaatcctgcggaagtactgcccggtgctgaacgcgttcctgaatggcaacaacgatctgcagctggttgcgatctacgccatgcaggtctactggtacagcatcgattttcccaaaggagtcctgttgcgttggttctgcgacttctacgagctgagcgtcatcgaggaggatgccttcctgcgctacaaggaggacgtcaccgacatgtacccgggcaagggtaaggccctgttccaggtcaaccagtggctcacctggctggccgaggccgaggacgaagacgaagaggacgaagagtaagcggggagcgcgagttgttggatgaagcgatatatttttttattgactgtatgtgtagaaaccccttctcagatgttttaacagctaatttttgcgaactgcaacaagatttatttttatacacatataaacaccaaaacgatgtgatcggtaaatcgattggatt

SEQ ID NO: 435 - DNA, 1838 bp, Aedes aegypti
ccgacagacagaccggttcgatgaaaggtcggccattttcaaagtgtgaaaaaactggactggcccagtcaggagaagatcgacacgcacgccgaaagtgttagctgctgcgtttcgtctggcttcagctcggaaaagttactagttattttttttccctgaaatccatcagcggacccaatttgagaagtgaacggtgcgaaacggatctaaaacggcgccaataacagattccagcatgagtagctacgggaggccaccgccacgaatcgacggaatgatttccctcaaggtcgataaccttacttaccgcacgaccccggacgatttgcgacgcgtcttcgaacgctgcggtgaggtgggagacatttacattcctcgtgatcgtcatacgcgcgaaagccgtggctttgcgtttgtcagattctacgacaagcgcgacgctcaggatgctctcgatgccatggacggacgcatgttggacggcagggagttgcgcgttcagatggcccgctatggacggcccacttctcctcagcgcggtggaggtggaggcggtggcagacgatatggcggaggtcgcgaacgtggccgttcccgtgatcgccatcgtcgccgttcccgctcgctagatcgtccccgtggcggagttcgtcgatcctactctcggtcgcgatcccgctcccgggaccgttcccgttcgggaagcaaatcgtcccgcggtaaggagtccagatcccgcagcccactggatcggggaacgcactattagattgtagaatctatcgcacaggccaatccagatgttgtggccggtgtttcccctcatttcaaacataatggaccagaaaatgatccagccaaaaaaacgcagcgaaaacaacattagatgatgaccccatttagagtgaccgtgtgcgtttgtttaacgtaaaataactactctcagcaactacaaaacaagcatataaatttatttaaaacaaaataataaatggaagacggacaaacagtaaacaaatggtgtgtggaataacttgtaagcaaaagcggatggagaaggaatgagcggggcatccccggagtatgcagcgatgatttgcgtggcgaaaggaaaccgcaaacttttgcagataagccccaatctcccaactattcgttacttcgcactactctgacggaatcacacaatcatcgatggcaaatccaaggaagcccctccctctccaaatgcatcataccgactaacatcaacaacagacggtaagtccgattagattagaactttggagaatgatattttttctcacataatttaatgaacacaaatttaattttacttcaatgaagaacataaattttaagctacaattcatgcgtaatcccaagaaatattctactgtatgaatagatacaaaaaaaacctgcgaaataaattgatgatacaatcctccttacatcgttgtcgcaacgaaaatttgcagaagaattactaggtccgaaatccttgcgcagaacaagttcctaatagttgaagaagtttccgtctccagtttggcgcgagtagcccggattggtcaacggggtgtgcggtccggtgttcatcagcttgaccgtgttgggcgaagctttctcctgtagtcctccgatttgcagcgggtgtttgagggggatgatcttctccggactcagatcccgggtattgcggagccgccgaaaggtagcctgcccgatggtttcctcctgtatgacgacgtcgttcttgcctttgaacagctcatccgagtggttgtactgcgacgctaggttgatgtccaaagagtcgtgcggtatggggc

SEQ ID NO: 436 - DNA, 2666 bp, Aedes aegypti
atggacgaatgttgggacgacgacaattacaatagcgtttgtggtaatggcggtggaggaggaggaggtggtggaattactgctgcacggcacacgagcgtcaaacgcggtggatccggctacgattccggaatgtcgtccggtgcgcgatccgttggcacccgggagcggacttcgtttgaggtatttaccacaaaagttccgatcatcatcgggaagggtggcgtgaccatcaagcggatccgaaccgaatcccgggcgcaggttgagatagatgacaacacacccggtaatggccgctcgacgattcacatcgagggcttcacgcaggacgtgtcccgtgcccgggacgctattttcggtgtaatcaacgataacgcacgtggcggcggcggcggtggaggcagagggggttccggcagatccagcaactccggctggggtggagatggttcgcgtggtggctttggccgggatcgtgatcgagatcatgacagtcgcagtttctacaactccggatccggcggcggtggcggtgggggtcgggatcgcggaagtaacgatttctacaactccgggtccagttacggtggaggaggtggcggtcgggatcaaaaccgcggcggtaacgacttttacaactccggctcaggttttggtggaggtagagggggacggagtgctgccccggtgtccaataacttcggccagcaggaaaatggtcgccccaagagtcctgaactaatcgattgggatgcacttaacaaacagtgcgacgaggccacggctcggcaatgggccaagtgtccaaagctgatcaagaatttctacaacgagctgcccgaagtggccaacatgacgccggaggaagtgagtgagtttagatgcgcaaataacaacatcgtcgtagatcgaaccttcaaagacgcggacaaaccctcagcaccgatcccgaatccagtacaaacgttcgagcaggccttccacgagtacccggagctgctggaggaaatcaaaaagcaaggctttgccaaaccatcgccgattcaggcgcaggcttggccagtgctactcaaaggtgaagatctgatcggaattgcccaaaccggaacgggaaagacccttgccttcctgctgccggcgttcatccacatcgaaggacaaccggtgccccgaggggaagcccgtggggggccaaacgttctggtgatggcgcccacccgagaactggcgttacaaatcgagaaggaggtgttcaagtatcaattccgtgacatcaaagcaatttgcttgtacggaggaggtgatcgacgaacgcagatcaataaggtaaaaggcggtgtggaaatcatcatcgccacgcccggtcggttgaatgatctggtggccgccaacgtcattgatattaccagtattacctatctggtattggacgaggcggaccgtatgctggacatgggtttcgaaccgcaaattcgaaaacttctactggacattcgtcccgaccggcagaccatcatgacgagcgcgacatggccaccgggcgtacgccgtttggcgcagagctacatgagcaatccggtccaggtgtacgtcggaacgctggatctggccgccacgcacaccgtcacccaacagatcgaggtgatcgacgaagaggacaaatacatgcgggtgatgaacttcgtgaccaacatgggacccagcgacaaagtgatcatcttctgcggcaggaaaacgcgagctgacgatctatccagtgagtttgttctgtccggcatcaattgcaccagccttcacggcgatcgagaacaggccgatcgtgagcaggctctggaggacatcaaatcgggcgacgtgcgggtgctcatcgctaccgatgtggcctcccgagggctggacatcgaggacatatcgcacgtcgtgaactacgacttcccccggaacattgaagagtacgtgcatcgagtgggccgtactggtcgtgccggtcgaagtggagtttcgctgagtttcttcacgcgtggcgactgggcggtggcttccgatctgatcaaaattctggaagaggccgatcaggaagtgccggaggagattcgccagatggccgaacgatttacggcgaaaaaagagcgagagggccgggaaaaaagtgcctttggtcggcgtgatggcggaggacgtggaggcggtggaggcggccgtagaggtggtggccgatggtaattgtttctaatccagaaaccagctagattgtcgcgatctgtgacaatatccttgtatatttttcgacgtttgagccgaattatggttagtagctaaagattatttctatcgatcaggatcttgacttaactttaggcgcgcttcttccgttactttaaaatgatcgatcgatcgatcgattgattggactcttctcggaatatttaacgatcataatttcgaatatacataaatacctacgtgtccaattgatatttggagtgcgcgagtcgccacaagactgggacccttgaactgggaaatcatttggttgagccaaacttcgaaatttgtaaacccataaaccgtgaattaactttccgttcaaatattctcgctctgaacttttcataccattaactattgttttataatattacaaatacagatttatataacgt

SEQ ID NO: 437 - DNA, 1528 bp, Aedes aegypti
tccgatctttatcttagagttgtttcgcctctccgtgaataaatattttaagcgtgtagctacccaaaaacagaaccgctaaacgcaccgccgaaccgaaaaaaatgcttccgatctgtcaaattcggaaaacaaacgccgacagtcgaggtggccgccagaagaaaaaaagcgattttcgcacgaaaacttagagtttattttcaacattttcatacaaattctgcccaaacattcagaagaaagatgttttaccacatatctctcgagcacgagattctcctgcacccgcgctattttggcccgcagctgatcgaaacggtgaagcaaaagctgtacaccgaagtggagggaacctgcaccggtaagtacgggttcgtgatagccgtcaccaccattgacgacatcggttccgggttgattctgccaggccagggcttcgtggtctatccggtcaagtacaaagccatcgtgttccggccgttcaagggcgaagtgctggacgcggtggtcacacaggtcaacaaggtgggcatgtttgcccagattgggccactgtcgtgcttcatctcgcaccactcgatcccggccgatatgcagttctgtccgaatgggaatccgccgtgctataaatcgcaggacgaggacgtggtcattgccttggaagacaagatccggctgaagatcgtcggtaccagagtggatgccaccggaatttttgcaatcggaactttgatggacgatttcctgggtctggctggaagctaaaaaaaaatgttctcagatatttataccaagctaagtatatttttattttatcaattatatctaattaagaattaacaaaaagaggatagttctagaaatgatcaataataactctttatgataaacgacactagatttatttggaaagaaaactttgggcaaaatggcaatttacttatttattttatttattttgaatctatcttctgacttattgtaaaagtgtaatgtacagaaaaatcatttttaattaaaggtaagtatcctttaaagcaaaatgttctctaaaaagccattatttccttccttgaccttgtaaaaagtttaaaactaataggttatcgtcacaaataaataaacatacatacattatttccttcttctccttgtagtcctccgggtgtaaattcctgaggctttcgcgattaatccgcaggctttcttaaaagattcgttcagagatcctaaaactcctctcaagaaataaaacttcctccagtcctctcaagaaaggtctgaaagaacccatggtgtaatttcctaaggaatcattctgaaaattttcccggaatttctttcagaggttcttccagtaattcttttaccattttctcttgcttcgtatcctaacgtttcaaagattcctaccggagttcttccaggcaaatccagaaaattaaattataggtttgacagggctgttagtctctttttaaatactttttctctatgcaagtctctaaaaagtgtctatttttaa

SEQ ID NO: 438 - DNA, 1027 bp, Aedes aegypti
caaaaaagtcattcaccgaaagcgtacgacgaagatataaacaaaattctgtccgtaaaataattagattttttcattgaaaaacggacatttttctagagaaattagttgcaaaggttgaccaacgatgacctccgttcatacaccatcagttgcccttagcaaatatcgagaccagcattttaagggatctcgccacgaacaggaacggctgctacggctcacatctaccttatacattggcaatctaagtttctacaccacggaggaacagatacacgagctgttttcgcgatgtggcgacatccggcgcatagtgatgggattggacaagttcaagaagacgccgtgcggtttctgcttcgtggagtattacgcccgggacgatgcggaaagcgctatgcggtacatcaacggaacgcgactagatgaccggattgtgcgtgtggattgggatgccggtttcgtcgagggacgacaatacggtcgcggaaagagcggcggacaggtgcgagacgagtaccgacaggatcacgatctcggccgcggcggatatggcaaaatggtccagatgggacagctgggggcgaacatgagagacagctaggcgtgagaccccgaaggagtttcggatcgtgggcgaagttattttaagattatgattatacataggacgcgtaaattaaacattgaaagaatgaatttcgtcacttacttgacatcatagttcagtctttggtccgccggagagttggggccctttcttcagattgggcttctttttcttagtgggtttggtttgagaactgctggatctttctgctttctcccgatatgggttgacgtaggtgtcggaccgtttgctttcgtcaatttcctgctcgagcagtcccagaagctcgagtgatttctgatccagaatgctgacaaagcttcgagtgtagattagggattcgatgacgagcttcttccagtcgtcgagggttttcagaatgcggtacgatatgtccgggaggtggagaatgag

SEQ ID NO: 439 - DNA, 2454 bp, Aedes aegypti
agtaacagcaatatcatcagtgttgtcgtttcgtaaaatgggctaaatcaatgacgctttgtcaagaaaaaaattgttgtgcaaattttgatcgatcaaactcattgggacctgttgaaagtgtactcgagcctctgaccgtttttggcagacgacacgacaaaactgcacgacagcgcagtgaaagacaaaaagcgttcgccaaggctgccgttccggattaagtaccgcgttgagtataccataataaaaagtaggatctttttcggaaagaaaagatttgcagtgacccgcttttttttaccggaaacgtcactaggttttgctcccggattgttcctaaaggatggcggacacaactgcgtcgagtacgacgggggctgctgctctcggatcggactggatcaaaaaagctgaggatcaggaaatttccaccctggtgaacgaactgagcattgacaaagaaaagaaggaagcggaaagtccgactaagaaggaggaatcgcccgaagagggaaaggtatcgaattctagtacggctgaaccagccacggcagcaccttcggaaccggcagctaaagaggaaggagctaacagcgaaaacggagagaccgttagttccgcagaagacgcggaagcgttcaaccctgcagatgccagtttactgatgaaaatcatccgcaaggggttggtggagtccaaactcgatctggaagtgcagcggaaggatccttcgtctcctttatattcggttaaaacattcgaagctctgcacctgaagccggaattgttacagggagtgtacgccatgggtttcaatgcaccgtcaaagatccaggaaacggcgttgccaacgttgttggccgatcccccccaaaacatgatagctcagagtcaatcgggaacgggtaaaacggctgccttcgtcttggccatgctgagtcgcgtcgatcctaggaaaaactatccacaggtaatatgtctgtcaccaacctacgaattagctatccagaccggtgaagtagccgccaaaatggccaagttctgtccggagattaagctgcggtacgccgttcggggagaagaaatagccaagggtgccaagctgaccgatcacatcataatcggcacgcccggcaaactgatggactggggcatcaagtttcgggcgttcgatttgaaaaagattaccgtgtttgtgctggacgaggcggacgtgatgattgccacccaaggccaccaggaccagtgcatccggatacacaagcagctgtcgtcgcggtgtcagatgatgttcttctcggccacgtacgagcgggaggttatggaatttgccgaatatatcgttccgaatccgatcgtgatccggttagcccgagagcaggaatccctggacaacattaagcaatactatgtcaagtgccggaaccaggacgataagtatcaggccatttcgaacatctacggcgttatcacagttgggcaggcgatcattttctgtcatactcgaaaaacagccagttggctgtccggtaaaatgtcccaggatggccattcggtggcagtcttgtccggtgagctgaccgtcgagcagcggttagcagtgctggatcgtttccgtgccggactggaaaaggtcctcatcacaacgaatgtgctctcgagaggtatcgacgtcgagcaggtcaccatcgtggtcaatttcgatctgccgatggatcaacacggtcgtgccgattgtgaaacgtatctgcatcggatcgggcgcaccggtcgcttcggtaagaacggaatcgccatcaacctggtggatagcgaccgaagcatggcgatctgccgatctattgaggcacactttcagaaaaagattcatctgctggacgctgagaattcggacgaaatcgaaaaaattggctcctagtcgttttaactgttcattctcacatagctggacccgatattgcttcgatgcgcctacgaatttgattcaacaccttttttgattacacgacgaaagagagcgagcgaagcttattaagtttattatttctacgttaaattgctgactatcaggccagaacgattggagttgtagttgcatttagtttctctctgaattcaagtgcacaaaccttccaatcgatgatacccagtggaacacttgcgatgaaggaatggtttaaaactatttcttacgttagattacaaatatttgtgctgattgaaagagaggatgagtttcgcgaaacggctgcaaacacacactggaggaaaagagcggaacaagagaatgtaaagtttaaaagcaaaaatattataatataaaagtataatacaaacggcttgtgaaagcaaaacatgacgcgtcaaatgtatttgtatgtattcatccgaacgacgaagcaacacaatgtcttttttaacgtattcaaaccttctgagcagaacagaaac

SEQ ID NO: 440 - DNA, 3953 bp, Aedes aegypti
atgtcccggtatatgcaacgtccggaaaatgccctaaaacgggccaatgaattcatcgaagtgggaaagccggcccgtgccctggacaccctccaggaggtgttccgcatcaagaaatggacctacacctggtcggaatcggtgattgagccgattatgttcaagtatctggacctctgcgtggagctgaagaagtcccacattgccaaggagggtctgttccagtatcggaacatgttccagctggtgaatgtgggttcgctggagaacgtcatccgaggctatctgaagatggccgaggaacgcacggaagccgcccagcagcaatcgtcccaggccatacttgacattgacgatctggataatttggccacgccggaatcgattctgatgagcgcggtttgcggcgaggatgcccaggaccggtcggatcgaacgattctgctgccgtgggtcaagttcctgtgggaaagctactgtcagtgtttggaactgctgaaggtgaactcccattgcgagaatctgtaccacgacattgccaagatggctttcggattctgtttgaagtacaaccggaagatggagttccggaagctatgcgagaagttaaggaagcatctggaagacattagcaaggtgagctcgcagacggccaatgtgagcatctcgaagccggagacccagcagctgaacttggacacccgtctaaaccagctggactgcgccatccagatggaattgtggctagaagcgtataaggccatcgaggacatccacgggctgatgacactgtctaagaagactcccatgccgaagacaatggccctttactatcaaaaattggccatggtgttctggaaggccggcaatcaactgttccacgctgctgctctattgaagttgttccagctgtcccgtgacatgaagaagaatgtcactcaagaggagatccagcgaatgacttcccacgttctgattgccaccttggccattccacttccgtcggctcatccggagtttgatcggttcatcgaaaccgacaagagccccctggagaaggcccagaagcttgcggttctgcttggactgcaacagccaccaacccgtgcttcgttgctgaaggatgtgctccgcttgaatgtcctccaactggccgctccccagttccagaacttgtacaagtggctcgaggtggaattcgatccgttgaatctctgcgaacgtgtccaaaacatcatccaggaaatcaccgtcgatgagaataatccctacgctcagtacactcaggccctgcaggatgtcaccctggtgcgtttggtccgtcaggtttcccaagtctaccagtcgatcgaattctctcgtttcttggcactggccaagttctccaccagcttctacctggagcgtattctggtggactgtgtgcgtcacaacgacatgcaaatcacgatcgatcaccgcaaccattgcgtccatttcggaacggatctgagcgagagccaacgggaggatcatcccgatggtcccacgcttcaatcgatgccctcggaacaggtccgctcccaactggtcaacatgtccgttgtccttcatcgtgccattgccacgatcaaccccaaccggaacaaggccgaacgcgatcgtctccgggctcagatggtcaaaagctacgaagaaaacatggtcaaggaacatcagcgcattctccaacgtcagaagaagatcgaagatcgcaaggaatacatcgagcgggtgaatctcgagcgtgaagagaaggaactccgcgaactagaggaagtcgctcgccagcataaactcgccgaacagcgtcgtctggagcaggaaaatgaggaacgcgaacgcaaacgttacgagaacgaagtccagatgatcaaggagcgcaacatgaaggaaaagatcgatcaaatcaagcagacggccgccggtcaaaagatcctcaagaagttcgacgaggaagacatcaagaagatgaacgccgaagagatcgccgccaaggaggcggaagaacgccaaaaggaacgcaaggcccacgacaacaatctcaaatcgcaggagaagaagatcgattacttcgagcgggccaaacgcctggaggaaatccccctcatcgagaagtacctcgaggacaaactggtccaggataagcagttctgggagaaacaggaagcctctcgcatcgaagcggccatcgccgaacgcaagaacgccgaagctgtccaggagcgcttgaagcgcatgcaaccggaccgggaaatcttctggcagaagctgaagggcgagcgcagcaaccagtttgccgagaaacttaaggccttcaatgtcgccctggaggaagagcgcaaacggcgtctgaccgaacgggtttatgagcgacgcgaggaacgccgccagaaatggctccgcgaaaaggaggaagaacgtcgccgggccgaggaggaaatccgcaagcaaaggcaggaagaggaacgcatcgagcgtgaaagacgtgccgaggaacggcgcatcgaggacgagaaggctcggttgctcgaagagaagagacgcgcccgcgaggaagaggctacgaagaaggcggaggaaaatcgccaaatgcaggctaaagctcgcgaacgtgaacgtgagcgtgaggcagattcctggagagatcgtcgtggaggtgacgctccagctgcggcagctcaaccaaatccggcagcgcaagaagccaccaagccagaatccggatggagaacagccggagcacgggaaccgaggggagaggatgcacccaagaaggacggcgtctaccaaccgcgcttccgtgatgtacgtggcggtggtgctggcggagccggaggtgttgaacgacgtgctgatgatcaggagtcgaacaagtggcgtcacggaggagacgacggaggcaaggatgatcgcgatggacctcgccggatgggtggtgataggccgccaatgcgccgcggaggagacgaccgcgatgaccgtggaccgattcgtcgtggcggagacgatcgtgatgatcgtggcccaatccgccgtggagatcggcctccgatgcgcgatggtgaacgaggtgtcggcatgcgtcgagagggaggcgatcgcgaacgtcgtgacggcggagatcgtcgggactttggcggcaaccgtgaccgtcgtgacgaccgcggaggaccacgtcgtgacgatcggggagaccgcggtggcgatcgtgacagcgcatggcgccggccagcaccccgcggaggcgacgacggtggcaattggagaacccgacaggatcaggccaaaccgaaggacgatcgtcgcgaggagcgaccgaaggaggcccgcaacaccggcccggatgaggacggctggactgatgtgaagcatcaccgttaagcacacaactctttcggcgttggaaacatttatccagaatatatgcaacttttttcaaaaatctttagctgtaccttatatttgttttagacagttcattttaagacatttttgctattattataggctgcattaaaataaggcgaaatggttcccagttccccaacgattaacaaacaacctggttttgatctactttttttcgatccattgatccataccaaaaaagggtggacagtataacaactaacggaaccatttccggcaaaaactgcaaacgctaaactggagggtctgagatgggggcaaatttataaatattactcatattacacacaactattacacagacatacgttaacaaatgaaactaggatcctagaaacattcggtagtttgattgattgataaactttatggggcatgaatggtaaaacttgggacgagatggagttgccttgcgagagaagtgtaccccaatgtattgagagctctgaattctgtctgaaccagttctattaaatcgtatattatattcctatgtaaccatg

SEQ ID NO: 441 - DNA, 3142 bp, Aedes aegypti
atgagacactacggacagatacattcgtattcaccgtcgtcgaatggctacggcaaccgtgaccaccgcgataatggtggcagtggaggtagcggcggcggtggtggcaactatcgcatgcacagcaaccgcaacggtggtggaccgaaccaccatcagcataacaactatcacagcaatggcaacggcggaggtggcaacatgcgctacaacaagcacaacaaccaccacggcggcggcggtggcggaggcggtggccgagatggtcagaaccatcaccaccagaaccgggatggaccgaatgctcacaattcgtcctactcgaaccgaggcgacggtatgatgaacagcaaggacctggcgccccgcttcaagcgcaatctgatgacaccgcagaacccggttgaggatctgcagatgcgcccgacgccgaacagtctgctgttcaagacccagaacatgaacatgaagacgcaactgccaatttcccaggcaccgtcgtcgcaatccggcaagggaagtggctacagtgcaccacttggcgatttcccatcgcctctgaccactcgcacgctgctcagtgaacaacgagcagctgccaccgctggcaatagtgcctttggggcaaacgccaccggtaacggctcgttcgcgacatctgccagctttggacctggactaggaagcagctcatctgcaggaggacccaacggaagcggtcttggctcaacgggaccagctggtcagcagaacgcttccaacaactccagtcccagccaacagaatcccttggctcggaacaaccaacagaacctgttgaatggaaaatctcaatcgaatcaacctgctgcttcggctcccatcacgcccatcaacaacatcctgcagaaggatcaggtgatcatcaagcaggctgccgtcgagaaggccgaaaagaagaacaagaaggacaaaggccccaacaaggaggaattcatgaagaaggtctccgcattcgcttccgacgtgttggtagacaacctccaaaaacaaatcgacgaggacaagcagaagaagtcccaggacaaggcaatcgtagagaacggtgccgtcaaggaagtagtcgtcgaagttgtcgatcagaccaccccagtcaacccggacaccgtcaacgaagcggatctcagcgaagaaaagtccgaagacagtgacaaatcgtcctcggaaaaggcggatgtcggatcggaaaccgaaaagcccgaagaaccagaacaacccaaacaggacgaacgctcgctgatggatgaactggtgcacgagttcgccgagcttaagatcccggaaaagttcatgcgcgactcgatcggtaagatcgtcagcgaaatcctggacaagtcggatgcattccacgagaagatgattgcgttcctgcaacgattgcgcaaggagaacaagctgtcgaacggagcgatgctggaatcgttcaaggcgctggtcaactcgatgaacgaaaaggagaagaccatccccaagatcaccaccatcgtggcgtcgctgctatcgcgggcagtgtccgtgcgtctctgcaagctgtccgacatttccaactacaccgacaacggccagcactatccgctgttcctgctggtgctgcagcagctgcacaaacagctcggcaagcagcccctgcaggaaatgttccaacagagcaaggtgaacctgatgaccagcctgcccgaaagcgaccgcaccaaggaccgcatggcggagatcctggaggatcgcaacctgagcttcctgtatccgctgctgcgagtgcaggccgaactgtggaagcagatccaggccgatgccaacccgcagcagttctacaagtggatcaaggagaacgtggaagccagctgctatacggatccgggattcatcaccgcggtcatgaccgtgctgctgaagtacatcatgcaggaatcgtccaagtgcgcggatgagaagcagtcggtggagaaggagaaggaaatcctgcggaagtactgcccggtgctgaacgcgttcctgaatggcaacaacgatctgcagctggttgcgatctacgccatgcaggtctactggtacagcatcgattttcccaaaggagtcctgctgcgttggttctgcgacttctacgagctgagcgtcatcgaggaggatgccttcctgcgctacaaggaggacgtcaccgacatgtacccgggcaagggtaaggccctgttccaggtcaaccagtggctcacctggctggccgaggccgaggacgaagacgaagaggacgaagagtaagcgtgatggagcgcgagttgttggatgaagcgatatatttttttattgactgtatgtgtaaaaaccccttctcagatgttttaacagctaatttttgcgaactgcaacaagatttatttttatacacatataaacaccaaaacgatgtgatcggtaaatcgattggattcgtggtagacattttgtttcgtttctgttcttccgatgatcaaactattattgtgaaaatttaattgtgatccttagttagagcttggttcgtgttcgagagagattgtgttgatttgttcggtgtgtggatgggttcaaaatgtgggatatcttaaatcagtaatcacagatggtgttcttgtccgaaaaggacggacttttaattgatagttcaatttatgcagcagcagtaactcagtaaaaggataatagcggaatcactataatttccactctgagcattagaaggagagattctgcaaactatgtagtcttgcgatgatatcaaccttattcctagaatgaaagtgcaattggtgacgatatgtgtccgaaatagattattcaccccctaactccccagaaagtacgagtgtttgtgactgttacagtagcgtttagtttctttccgtaggcattaaccacgcgtattacaataaattatattgtgacagtagtacagtgtaattagtcatttgatttttgtctgcaccattgaagattaaccgttcgctctagagaagcattcactctttcaccgcataatgtatcataaatagaaaaaaggacaatttacaatcgccccttcccactaaaatatacggccgcctaatttttccaaaagggctttaggcct

SEQ ID NO: 442 - DNA, 2096 bp, Aedes aegypti
aacaaagcgatagccatggacgtcgcaaggcaactgctggacgagctgatgggccggaatcggaatttggatccttccgtcaaaaccaaagaactcaactgggaagatgaagagttctgcacatacttcatggtcaaattttgtccgcacgatttattcgtcaatacgcgagcagatctgggacagtgcggcaagctgcacgacgaagaggcgaagaagttgttcgacgcggccaaaccgtgccgcaagaagatccagtacgaggaggatttcctgcgcttctgcaccaacatgatcaacgaggtcgaccggaagattgtgaaaggtaagcaaagactacttttgatgaacagcaaactggagggccgtccggtttccaagcagcaggagcagatcaacaccatgaacgagaaaattgagaagctgctgcgggaggccgaggaagcggggatccgaggtgatgtggatcaggcacagagcttgatgcaaatgagcgaccagctcaaggaggaaaaggatgaactgatcaaacagcatgagtctaacggatggtcggtcactgcggaatacgcagcggcacaggagaagcaaatggaagtgtgtcaggtttgcggtgcttttctcatagtgggcgatgcccagcagcgtatcgacgatcatcttacgggaaagcaacatttaggttattcaaaattgaggacagctgttgaggagatgatggaagctagaaagaagccggctccacgagttgaagagcgtcgacgagacggcgatgatcgcagacgcgatcgccgtcgggatgatcgtagatcgagagatcgcgacgatcgcttcaagcgggacgacaggcgccgagatcgacgggattatagagaacgagactacgagcgtcacgagagacgtgatcgtgatcgcgactatgaacgacagtataagagaactgatcgtcaccgcagccggagtcgcagccactaaatcagctgaccgcataacaatccttgtgtcgtaacgatggtgtttatgtttactagaagtacttttaacagttctgcgttcaacccgacatacaatcggattaagaggtatcccaagctacagaaataaaattataggcaattaataatctatcagctttccaccaggaacgtcccagtttcatccattgtggtcccaacaaaaccgtttacttaatcacgtagagttgagcaatatcattagtttagttgtattcaaaaaaacattataatcaacagtaactacgtatcgtatgcttacgtagtcaatttgaatgaaaaaatatatcataattgtgacaatagtgcaaactcagacgacacgccatcaagtatcaacgaatttcaacgccgcagctgctgcaacctgttcccaaggacatagctctgacatcaactatgaacagaaccgcaggtatcgtgcgtttttatcatcctccttattttaatttaagattatcgcaaaaaaaaaagtaaaccagaagagaataacattttaagatcgtgtatggaaatgtgaggctctattggtatccaataagcacaatactgctgtctgtaaaaaaaaaatgcaatcgtagtttttaatgttaagatcactcctaatctctatcgcaactaagctgaaacagcccaacttttctttccggtgttcttttaaacgattttctcactcataagtgtatgtgtaaatttccctaattcagtcgacgcgcccttttcaattgttgtctgtttcaatcttaaactcccctacgatatgcttaactttgcagcagtgtgtagcacgtttagttttaggtttcaccatgttggatttgataggaatcaattataaaatcacaaatataaaatggttaactgcagctacgaaacatacgaaacgagtgcaaaccttcttgagagatcagaattctacaaaatacatgcctatatagacacaatctcactaacaatttatcaaacaccacagcacgtgaactgcaatacttcttgggctgctactcgaatatgttgcgcagtgcatatggacataagttcttctgtttcaataaagtacaatttgcgattggaattaaaagt

SEQ ID NO: 443 - DNA, 2504 bp, Aedes aegypti
gtcttcacgagtctcgtttcaggttccgcccatttgaaaaaagtactcagaaatatctactgtggtattgaaatttgccagtctttccagcacaatcgtctctacaatccgcaaatgacagttctgaaaacgaaaaaaaagcaagaaaaattttcatcgcgttgttgcacgggggtttcgtgccattgtaaatttcaatttttcgtaagaaatcctgcctaatcttgctttaatatactgttagtttgtgctttgtgcggccaatcgcattttgtgcatattttcgttcggaaattggctaaaaacagtgcataaagttcgatttcatttggtactatcgggggcggagaaagaagaagaaaaattagataaatctataaacaaagcgatcgccatggacgtcgcaaggcaactgctggacgagctgatgggccggaatcggaatttggatccttccgtcaaaaccaaagaactcaactgggaagatgaagagttctgcacatacttcatggtcaaattttgtccgcacgatttattcgtcaatacgcgagcagatctgggacagtgcggcaagctgcacgacgaagaggccaagaagttgttcgacgcggccaaaccgtgccgcaagaagatccagtacgaggaggatttcctgcgcttctgcaccaacatgatcaacgaggtcgaccggaagattgtgaaaggtaagcaaagactacttttgatgaacagcaaactggagggccgtccggtttccaagcagcaggagcagatcaacaccatgaacgagaagattgagaagctgctgcgggaggccgaggaagcggggatccgaggtgatgtggatcaggcacagagcttgatgcaaatgagcgaccagctcaaggaggaaaaagatgagctgatcaaacagcatgagtcgaacggatgggcggtcactgcggaatacgcagcggcacaggagaagcaaatggaagtttgtcaggtttgcggtgcttttctcatagtgggcgatgcccagcagcgtatcgacgatcatcttacgggaaagcaacatttaggttattcaaaattgaggacagctgttgaggagatgatggaagctagaaagaagccggctccgcgagttgaagagcgtcgacgagacggcgatgatcgcagacgcgatcgccgtcgggatgatcgccgatcaagagatcgcgatgatcgcttcaagcgggacgacaggcgccgagatcgacgggattatagagaacgggactacgagcgtcacgagagacgtgatcgtgatcgcgattacgaacgacagtataagagaactgatcgtcaccgcagccggagtcgcagccactaaatcagctgaccgcataacaatccttgtgtcgtaacgatggtgtttatgtttactagaagtacttttaacagttctgcgttcaacccgacatacaatcggattaagaggtatcccaagctacagaaataaaattataggcaattaataatctatcagctttccaccaggtaagtcggtttgtacaatatcaaaactctaatcgatcttttttgcgtttctttcatcgtcgattgtgtactttctatgtcatatttttcctaaagagtaagatatcagacgaagcaaaaagaaaatgttataacagttacactcggttcgacggcatgtttaacgtgctaaggtgtgtcttgttgagggtcgttacatttctctgaacaggttagtgttgtcagatagagaaaaaaaaaatgaaaatcccttgcaggtgaatcgtgttggcgaacttgtggaaattttaatcgcgaaacaggtatacaatcacgatcagcaaaacaccctatcttcgattccattatccttccagttatgtttccttcggggttacagtcctccgtaaagagcgaagaagtcgcgaaaaggtatcttcctaattcacagcatgtttcacagtaaacattttccactgaacttatagcttttacctagaacgttcgggtccgcttaaaattttctcttggttccggatgatcagggatcccgtgcacgcgaataacgaggattgagaggtacattaagttaaaacaaaatgatttttctctaaaataatgcccaggatggcctgtggagaattttttcggtaccgtaggcgtgaagcagaaccgtttcctactgtcgtcatcgaatgtatcaatcatttgatggtaatagcagcaccaatccatgatatcaggtatttgctattatttttgtgatatgtctaaatcttgctggtgttttagatgctaccaatagaatggtttcaggtcaaatggatatgcgttcacactatatgttgctgtgtacttcatagttttatttgttcaacgaagagttattattagccgtcagcaagggtccaaactataactataacaaacacgtattcccgttcatcgtaacattgcttcctagcatgtaccaactttgcctttgacgcattcaccaccagttc

SEQ ID NO: 444 - DNA, 3732 bp, Aedes aegypti
atgaatcgtgcccggcgcagcacagccgtttacaacaaaaagtccaccaaaaagcagcaggttagtgacgatgatttcgagagtgaggggttttcggaccaaccgacggaagatgatggtgacttctcggccagcgaggaagagtggctcccgggaggggataaagatgccaagagcgacgacgccgaagcccagggaacagtgtcagacgaagatgagtatgacgaaggatcagaggacggttccgaggatgcggatgaccttgaaggagattccggaagcgaagggagtgttgtggccgcagggaagagtggaactaagaaaaggacatcgaaatcgtcgaacaatccttggccaaagaagaaacggctttctccaacgacacgagacgaattatacaagcgtaccaagaagaacctgctcaaggaagtggcgacagagttaccgtccctgaactccagtttgtccgacattctgaagcaatgtcagtttcagaagaagagggatctatcccacagttcgaaacaagcaccagaaagagtgaaacaaagcacggtcaagaaagtgaagggcggtgacgagtctgatagcagcggagacgatcacttgatgaaaccggaggagttggatttacgttccaattttttcgataagattgaatcgacgaagcggcaatcaggagaacctgctcctcaattcgattgcaatgcgggtatgcgtttgtcggacagctcggacgatgatgaccaagcagaggaaccaataccgtcttccattcagaaagtagccgcacagaagctgatcaataagatcaatgaatcttccagcgaatttctgaactttaacaacctgggagagtttaacaaaaagatcgaggaagcgaagagaatgctgaaggactatcaggcgaaggagagtcaggaaagcactcagaagacgaacggagaagatgtttcaaatttattggctctgggtgagatggaggctggcacctcacctgggaaacaaaacgatgctggccaacacaacgaggaagaagaagcgagtgaagaatcggactgggaagaagtggaagatgccgcccgaagtcaaagtcaaacgaccggaaaacttccagacgactatcagataacggtacaagtggagacggcaaagaccaagaagaagcgatgggaggagattgaaatggaactgtacatcaagcggcaaatcaataaggtgaagcgagcgaatcaacttgcttttcacaagagcagtgttctctgtgcgatagcgggtgggaagaagctgaacgaaattgtcaattctcatgagatgcgagctaaagcgttgtcattgatgcagtccgatcagtgtgtgttgaaagggaagctggatggcaaatttgtcgatcagttgatgaagtggttcaagaacaaattcgagctcgcagacgagcaggttatgggcccaaaaacggcgaaattcagctttactctagcattagaactgttcacacggaaagtggtctgtaagagagattatgttctgctattcttggtttgcatgcgtgcggctggggtcgattgtcgactggtgatttccgccaacgttccaccgaagcgtcctgcaatgaaggatctgtgtcccatctcggaacgacagcttatcgaacagtttgagaaacagtttaaacataaatccacagcaaacgcagctgaacaaattgaggttaaggttgaagaacagaatgtcgaggataaagaatcaattgaaaagattccattgaaagaggaacctgaaaaggctcaatcgccagtgaaagaagctttgaaaaagtcttcgcgaaatgctactaaaccttcagtcaaacatgaaaaattggaaaaagatgaagaacttgaaaaatcttcaaaacccgccgctcattctcattctgaaattaaagtcgaagaaccagctgtgaaatctcgccgtactagagcaaccgcacaaaaatcgactctccagccttctccggaacattcaaaaaagatacgattctctcccgagcccgaaatcctctctggaaagccaggaagtcctgtgaaggagtatactcgacccaaaagagcaattctgaaacgtcaatctccgaggacaggcgaatctcccaatcatgtacccctaaacaccctggtcattccccaagtggacggaatccacgacttgaaagccactcctaagaatgctccgatttctcgccgacttcgaagccgccccaaagaaacgcctgattctaaggccagctctccatttgccaaacgtaaaaccaacaccccgcaagccaaagagaagaacaataaccaaccgggtcggatatccaagaggaaactcttcgatgcccctgtcgaggtccaccccgttccagtaaagcagaaatcctctaaaaataagattctttcgtcggattcgtccgatgaggatcctcctcagaaaccggaagtaccctcgccagcttcaaacaagaaacgtaaaccacgtaacaccaaggcaaagccaccaccatcaacgcattcttcggaggacagcgacttcgaaacgcccggcaaaagaaaagccaagcgtaccaagaaggtcaagagagaatcaccgaaagctgagtcgaagaaagcagcgtcaagcagtaaaacgactaaaacgaagcaaaagaaagcggcggacgaagatgagtcgaatgggggcgtgtctaacaagatgaactattggatcgagttctactcggacaaggacaagcagtggatcacggtggatttgttcacgggaaagatcaactgcgtggattatttggcgcgtcacgccaccagtcccatcagctacgtgttcggcttcgataacgagggtcacatcaaggatgttacgccgcggtacgtccaacactggaacaacgtgagccgaatgttgcgcgtggagcccaagtggctggagaaagccctgaagccattccaggcgaagaaaacggcgcgggagaaacgggaggacgaagagctgaacaaaatccacatcgacaagccgctgccgaccactattgccgaatgcaagaatcacccgctgtacgtgctgaagcgccatctgctcaagttcgaagccctctacccgccggacgtgcccagtctgggcttcgtccggggtgaggccatctatgcgcgggagtgtctcttcgtgttgcaaacccgcgaaaaatggtataaacagggccgggtggtcaaaccgttcgagacggcctacaaggtggtcaaatgttggaggtacgacaaggcgaagaacgagtggcaggggaatcaaccgtgcgatatcttcggcgtgtggcaaaccgacgagtatgatccaccgacggcggaaaatgggctggtcccgcggaacgagtacggcaacgtggaactgttcacgccgaagatgttgcccaagaagacggttcatttgcagcttccaggtctgaatcgggtctgcaaacgtctcgggatcgactgcgccccggccctaaccggattcgagaaggcacgcatgcgcatgattccggtttacgatggcttcgtggtgtgcgatgagttcgctaacaaagtcgtcgaagaatggtacaaagagatggaggaggaggaccgccgggagcaggaaaagttcgaaaagcgagtatacggcaactggaagcgcctcatcaagggcctgttggtgcgccgcaggttgcagaacaagtacaactttgataatctttaa

SEQ ID NO: 445 - DNA, 1196 bp, Aedes aegypti
cgttttacaactgaccagttcgcgtcgctcacaagtagaaaaaaaaagttcgctcaccaagtttcgcgctcagctttaagtcgagtcgaaaccaaacaaacaaaccaaccttggattacgcaatatctcgcggatttctatcatcgcctagtgacaacaataaaaacaacagcagcagcactatggttattgcggcagttagagaaacggtgagcctgtgcttacaaatgccaccgtttgagtacaagaagagcagttctgaagcaagtggtagtgaaagcctaagtgaagtggagataggactggcagcgaagcatgcgttgctacttgccaaaattgaaaaccggttgataatgggcctatctgatgcgattagcaatctcgccaaaacgcccgaagagtttctgttttgcttcatggcaccacccaaacccggagacagtgccacccacatgcacgaggtgcttctgcaagcgttttgcttcgagaacgatatttacataattaaggttgacagtgcagaaaaactaagtcgactgctcggctccagcacggttcaatcgtgtgccctgatccagaaaaattggtcttcggaccatcaaaccgaggtgctctccaaggtcgaagacaaactcgtagactactgcgaagaacactgggaagcgcctgttaagccaattatcaaactaccggagaagtaggccgcgccaaggccaaccgaagtcagtgccaacctgatggaacaaacctaaaaatgcgctaaatatctgcgaaatgaagacggaagatttccccaatctggtggaactcgttcgttcggtgatacgaaatgcaaattagcacagcccatgtgctaaaacacaatcagcagcccaggtcgtgtgcaaagctttaatctttgggattttccccctgaagccgcgcggatgattgccgtcggataatgaaacgatagctgcagtgcagcttctgagcggtgctcaacgtatcatcgacaaagtttgtgattttggctgtagtgtagtcgcgttgtgtagaagaaacattagtagcaattcaagatggttgccaaaaaagtgctggtgaaacagtttccttggcaagaccagtgattggaaaaattgtaaatatgctttacattaaagtgagtttttgtgagatttacaatatagaatcaacaaattgaaacatgaaaa

SEQ ID NO: 446 - DNA, 957 bp, Aedes aegypti
tttttctctgcgaaatagtggtgaattgtgtcggaaaattgtgataaaccggtgttttcgcttgctttttagatgccagctgcggctaagactgccccggccacgaaggccgccccggccgacaagaaagttcaggagaagaaactgccagcggtgccggaatcgaaactgaaggcaaccaaagtgaagacgattgcccgtcccggcagcctccacaggcgtcgtcatctgttggctgtcaagctggtccgccaaaagcagaacctgctccgtgcggccaagtatgccaagaagtacatccggatggaccgcgatgtggtcgagaaggcccgcgctgccaagaaggccggaaacatctacatcccggccgagccgaaggttgccttcgtgatgcgtattcgaggtatcaacaaggtcgcccccaaggtccgcaaggtgttgcagttgttccgtctgcgccagatcaacaacgccacgttcatcaagctgaacaaggccaccaagaacatgctgcgcattgccgagccgtacatcacctacggatacccgacgctgaaatcggtccgccatctgatctacaagcgtggattcgtgaagcaccgacacagccgcattccgatcaccgataacttcgtgattgagcgcaagctgcgcgccggatacaagatgcagtgcgtcgaggatctggtgtaccagatctacaccgccggacccctgttccgtaaggccaacaacttcctgtggccgttcaagctcaacaccccaaccggtggatggcgcaagaagaacaaccattacgtcgagggcggtgacttcggtaaccgtgaggataagatcaatgagcttatccagcgtatgatctaagttgagaccggttaggtggataaggttgcgagagagcgagttaaataaaacaacaaaatacctttaaaaattgaatttatacgtgtaagcata

SEQ ID NO: 447 - DNA, 1083 bp, Aedes aegypti
tcttccaggcgtatgttccccaccgtccgggtgtcgttctccggtccgctccggcaggtgacccccgccgaccgctacgtggtcctcctagacgtggttcccgtcgacaaccggcgctaccgttacgcgtaccaccgttcggcttggctagtggccggtaaggccgatcctccgccaccgccccgactctacgcccacccggatactcccatcggcgcggatgccctccgcaaacaggttatctccttcgagaaagtcaaactcaccaacaacgagatggacaagaacggccagatcgttctgaactcgatgcaccgctaccagccgcgcatccatctggtgcggctcgggccgggccaaaacattcccaccacgccaaaggagctgcaggaggtcgaccacaagacatacgtctttccggagacgatcttcaccgccgtgacggcgtaccagaaccagctcatcaccaagctcaagatcgactcgaacccgttcgccaaaggcttccgagactcgtcccggctgaccgatttcgatagggatcccatggatgcacttctgcttgagcaacatctccgctctccgctgcgcctcttcccggacccgctgatggctcagttcggcgccggccaagaccctgacggcgctcaagctgcccttctggaaaaagcccgtcagcacctgcagatgtggggacgggccgctccctacggtgatctcctaataccgcaaatgtaccaacggccgaatcttggagcgctcaaccttggacatctctggcaaagtcaatggcctcaacagttcccaccgggcttcctaccaaatgctgccgccgcagctgctgcagcagccgcagccgctccccctcctccaccaccaagaaccacaccacctcctccggcccagaccatgaccagtccggccagttccgccggatctccctcaccggatctacgagccaaacacttcacccgcttcagcccctaccaaatcccacaagctcatcaccaccaaccccaaggcctcccaccctccacatccctaccccatcaatccccctctccaagaagtccatcgaactaa

SEQ ID NO: 448 - DNA, 1367 bp, Aedes aegypti
atacgataagcagtagtgcgcgggcgataaaaaccgagaaaagctttattaacagcgtaggtgcgggcgaaagttgtttccttgcgagcttttataccaacaaaaaagttttatagtaacagtgaagaccaacaaaaacgaaacgcatgtaagcctatatcatgatccctccgactacgtccttctaccaacagcagcctcactcggctcagcagtatgcagcttatgtgaacgatccggacaaccaggtgcagacctactcacacggcgaatccggacaacacagcccgcaacccgtcactagtagtcctccggcgccgacaccagctccacttcaaaaagcccctggagttatttacgcttcaccatcgtcaactccggccccccatcgacatcaatcaccatcgtctgaattctccatcgtgaagagcgttgaaacgccagtctactattctccggacaatcacctgaactcccctcccaccattcacttcacacactcacccgctaaacaagccatccaaatccaccatgaaacgcaaacccactatccatccctgacgcatcccaacaacggaatcctgaattacttcggacttcaacacaaacaaccaaccagcctcctggactcttacgtcccaagttctctacaactttcgcccgtcaaacagttcccatatccatccaaacccgccccaatttatcgtccttcgctacaacacttccaccatcatcacgctcccacccaccaacagctgttctaccaaccaacttacccagtctcccattctgcctaccccctctatccatctcacactccttccctccaacctcaacagattccctccgcctcagctccagcctacaacaccattgcctactcggttcctctgtcgcaaaccaaaaccgtcacccagtacaagcggtccccagccctagaaaccgtggccggagttcgatattcccatccacgggcagtttctgctgccgcttcgtcgaagtcaggtgccatcacgaccaaactgcaaccggcagccaagttttaattaagatcttacctgattagtagtgatttgcgaaacgacgaagaaacctcggaatgtgaaaccgtgcagttactcataatttatatgatggaattagatttactcttaccaaatagtgcttaagacacaccgacgacgacgacgatgacggatggcttcctttcgccagatacgatgggatcttgagatttaggtgcagcgcagcagcgttatagaatttagggaatgtatcctatgcaaagtgtttgcaattgtgattcatcaatgtactcaattttgtacagttgtttatttaattgaataaaaagctaattgttaccg

SEQ ID NO: 449 - DNA, 1218 bp, Aedes aegypti
gtaatcatgacagagctaatggatttaagaatgcatcaccacttagcactccagacggagatctatcggcagcggatgctacaaggattaccagatccctatccgacgatgttaccggtgccagcaccaagacccctgatgttgcctccaaggttcccgttgccttcggaggttgacattaagctccagaacaaagaactctggagtcaattccatcgtatcggaaccgagatgatcatcaccaaaagcggaagacggatgtttccctcgatgcgcctgtcgattaacggccttgaagcggacgaaaactactgcgtgctgattgagatgatccccatcagcgattgccgcttcaagttcagtggctcccagtgggtcccggccggtggcgccgaaccgcagagtccccaacggatgtacctgcatccggacagtccggcccttggatcgcactggacgtcccaacccgtggtcttcaacaaggtcaagctcaccaacaacacgctggacagcaacggacatattgtcctcaccagtatgcacaagtaccagccccgaatccacatcatcaaaacgtcggatccttcgcaaatcccgtggtcaccacagtcggcatttaccttcccggagaccgaattcgtcgccgttactgcttatcagaatgatcgtatcaccaagttgaagatcgaccacaaccccttcgcgaagggattccgagaaaccggtcagtcacgctgcaagcggaaagccggcctcatgagcagctcccgctcgatcgaagactccgaagaatccggcggcgaatgcggacccgaacccaagcgccaacgaacggacagtgcttcgctggatgacagtgacatctccgtgagtgacagttccagcagtggcaccagctccccagtcaacgttgacgatctgcaccatcgaagtccttgcccaacgcacgaagacttccttcgagctccgcatccctaccagcagatgctgaaccctgccatggctgctgctgccggctggatggatctcatgctaccgtacttccagcaacctcatcatccaatttctcccgcccatcatcctctgcatcatctaaaacgcgacttcaacgtcctgccatcccttcaagtttcccacaaatccctcgagcgaaccgtcgaatccaccagcaagaaactcggtttcagcatatccgcgatcctgggctacgaccggtaa

SEQ ID NO: 450 - DNA, 2154 bp, Aedes aegypti
atatagtgataaagacgtgctcatacagttcagcaaaattgtgatttttccacccatttcatcccgtgtcttcccgtttcaacattttccctgcaccctgtcggtccaataaaacaaacataattgccgttcttctgtgcttgattagagggagagaagtacacagcactttcaccgatctacatagaagcggcaagttacatgacgcagtaatttttttgttgatgtgtgtccacttgcacgtacctactggacatattgaggtcccctttctggacggaggtagcgatcagttacgatcgagattttgtgacgaacggacgacttttcaaagctttcaaactgaccgccaaaggctcaaagtggagctctcaagagtgacgagtgattttcgctggcaaatgcatacgcaccattgtacttgggtaaagaatcaagccagaagcgttcacaaacgattgcactgggtggaagtgctggacaaggggtaaatttagtggaagaaatcgagaatggcgccaaatcagcgtgacctcgaaacggcctcgctactgactgcaagcaacgataataacaacaatgacaacagcagcagcattcgcagcaacctcaacggcgatcatcgactgaagccatcgcttttggaggttgcgatccgaaacaacatgcgacattacggatctacgcctaatcaatggcagaagataacgcgctatgatccacttcagcaccggaagctggagaaccccacgtccaatctggacactttgattcacatgttgaacgggaatttgggcacgggaatcctggcgatgcccgacgccttcaaaaatgccggattgtacgtcggattgtttggaacaatggctatgggcgttatctgcacccacagtatgcatactttggttaaggtttcccacgaactgtgtcgacggtaccaagtcccatccatgtcattttccgaagtaggccgatacgccctggagtccggtccaagtagcctacagcgattcagtcgcctcataggagtgctcattaactgcttcctcatcatcatgcagctcggattctgttgcgtctacttcctcttcgtagccgtcaatctccatgactttctggagtacatctccatcaaaacggacgttttcaccgttctcttgggcatattgctgccgttgatcgccctgaacatgatccgcagtctaaagctgctcacgcctacttcgatggtagcctcgcttctggctatctccggcatcacgatctcgtccatgttccttctaaaagatcttccgcgcagcacttcggtagcacctgcgtccagttggagcacaattccgctgtacttcgggacggtcatgtatgccttcgagggcatcggtgtgattctaccgttggagaacaacatgagaacgccgaaggacttctgccgctggaatggggtgctcaacaccggaatgaccatcgtagtttgcctgtactcggccgttggtttctacgggtatctcaagtacggggatgcggccgagggaagcatcacgctcaatctgccgagccacttgtttttggcagaactggtacggcttctgatggcggtggccgtattcgcgtcctacgctctccagttctacgttccgatttccatcctgggtccggtcgtcaggcgccagttcggatcgcaccgtgcccaagactacgccgaatacgctctgagggtggcgttggtattgctaacctttactttggcggcgatcattcccaacttgggatcgttcatttcgctggtcggagccgtcagcacatcgacactagccctagtgtttccgccgctgttggagattgttacctattggccgagtcggcagtatgggacgtggaactggattctgtggaaggacctactgatggtggcgtttgggttgagtggattcctgattggaaccagtatgagtgtggttgagattgttacggagtggcagtaagggcctatggacaattaagtaggcaactctattttttataatgacaaaccttttttgttagctattttcgtgattatgtgtgttgacaccggaacaaatgtgttcaatgttttagatatgtttcgttttaaattatttatattattagaaaatatacagtatgctagacaga

SEQ ID NO: 451 - DNA, 2364 bp, Aedes aegypti
tcttcgcaggatttttgctcggtttgaggaggagacccccaacgccacccgaatagtgtgagtgcgtgtgtgactcctggccggaaaacgcgatagaacatttccttagtgtaacaatagtttaacagtgagtaaaaagtgcaaacggcagttgggaggaatttgcgcgcgaaaatcagaagagtctgttcgttgattgaaattcccccaaaaattgagtggcgccgaaaaattattgatcaaatcgaaaaccgttgccgtggacattcgccactaagtggatattggaacgaaagtgaattgactattggacggcagacaggcagttagtgcaccgagtgaatgtgtgtgaaaacgacctgcagataacaattaggagaagtaccgacaattacaacgagttgaaagatataacaccggcagtataacagcacaccacaagagaaatgcagtccctcgtggataagatgagatttctctacaagccgtacgtgctggcggtgctgacgatcggatacatcgccggcgaactcggtcactatctgattggagtaacgtccaaagcgaccgccatcgaactggactacggggaccacgcgtgccagcaaaaccataccgaagttcatcggcatctgctcccacagcagtgcgccgacatcgagctggaacatgaatgccacggtcagcacgtgaacggaacggtctactgcgaatggaactacaatgggttgggtctggagtaccaactgctggccggtcccagcttcattgccgttttcaccgtcatgggggtcgttttgggctttgccgcggaccgattcaaccgggtccgactactggccatttgtacactggtctttggcattgccatcatcttccagggcacggtcaaggactactggcagttgattctgctgcgtatggttatggccgctggggaagccggatgcaatccactggccaccggtatcatgtcggacattttccccgaaagcaaacgcgccctcgtcatggccattttcaactggggaatctacggtggatacggaattgctttccctgtgggccgttacattaccaaactggatatctggggacaaggctggcgtatttgctactacggaacgggagtgttggctctcatcatggccgtactaaccggaaccaccctgaaggaaccggaacgacagagcatcggagaggaagcgtctggcaagggaaaagtctcgctggtcaaggccctgatgcagccacgtgttattctgctgatgattgcggcctcgattcgtcactgcggtggaatgacctttgcctataacgccgatctgtactacaacatctacttcccggatgtggatctcggctggtggttgtttgctgtgacgatcggaatcggaagcatcggtgtggtcattggtggaatcgtctccgataagttcgtggccaaaatgggaatccgctcgcgagtggcttgtctggcgatcagtcaacttattgccactccgttcgccttcggttccgtgtatttcgatccactttgggcgatgatcaccctgggaatcagctacttctttgccgaaatgtggttcggaatcgtgttcgccgtgctggtggaaatcgtcccgctgcaggtccgctcgacgaccatcggtgtgttcctgttcgtgatgaacaacatcggaggaaatctgcccattctggttgacccactggccaaggccattggctaccgaggctcggtgatgttcttctacgccggtttctacggtatcagtaccgtgctgttcttcattacgatgttcttcatggacggacccaagccggaaccagcgatcagcggcgacgagcaccggaaccaggtggaaatgggccacgagaacaataccttccagccggacgacttcatcaacggtatcggaggaccgaagaccaacggacacaacatcgtgaacgtgaggccttccgagagcagtagactgtagaaagtgacacgagttcgcagcagcgcgaatgatagttagggtttttaacaaataatcttaagctagaatattcaaaggacaacatgatgaatctaccgagcaggaatcatagaattattgtaacataatatgtacggttagctttccccaggctgtggaaaggaatctcatattcattcagattgttttataattcgtcgctctagaatctagaaaccgtgtacctctggcctgacggttttctttttcgttaaccgaagatctgtacaatggcaacgttcggagtgccaagctacgtgtatagttgatttgtatttaaagtggaagtgataacttatttccttcagacgtgtttaaacaataaaacaaaattttatacaaa

SEQ ID NO: 452 - DNA, 999 bp, Aedes aegypti
acgttgggaccaaaatggcgtaccttcgtagcgaacatgtcgatcgccctgttcttcaccgccgcctcttgtgctctcccatggattgcgtactatctcgccaactggaaaatcttcgccattgttacctccgctccgctggccttggccatccttaccccatggctcgtccctgaatccgcaagatggctcgtctcccagggcaaagtggacaaagctatcaacatcctgaagaagttcgagaagatcaacaggaagaccgttgacgccaaagtgtatcaggatttctccgaaagctgtgtccgcttgcaggaggaagaagccgctaacaatagctactccgtgctggacttgttcaagaccccacgccttcgcaacattaccattttgcttattgttatctggatggccatctcgctggtattcgatggacacgtgcgtaacgttggatcacttggactggatctgttctttacgttcacggttgctgcggccactgaacttccggccgataccttcctcactctgactctggatcgctggggtcgccgttggttggcctgcggaacgatggttgccagtggtgtgttcagcctactcgccactaccgtgccagttggtaagcgttactcgatgatcgttcttagggcttattccgctacgttggccattctgggtcggttcagcgtcaacatctcgtacaacattggactgcagtatgctgccgagctgttacctaccgtggttcgagcccaaggtgttgccttcatccatatcatgggatatgtggccagcattgtcgctccattcgtcgtatatctggcgcacatttcgcctgctatgccgctgattgtgctgggaatcttgggaatctttggaggacttctgtccttgatgctgcccgaaactttgggacacgatctgccgcaaacgctcgcagacggagaagaattcggacgtgggcagaagatctgggatttcccgtgcttgaccaagtat

SEQ ID NO: 453 - DNA, 2512 bp, Aedes aegypti
tgcaaattcagttcaacgagcgcgacgagcaactgcgaatccagtttcattccaagtgcgataaaagtcagttgattcagaaagaacggtaggcgccaaaatggtactgaaacaacggggagcggccatagagctacactctcctacggaggatgtgctggtcagtccgggaaccgagagtttgccaccgatcgaaaatggagccaccgccggttccgggacgattgatggcggcggaggaaacgaacgtgtcaaaatgaaaaaagaactggggctgctggaaggagtggccatcatcttgggtattatcttcggctcgggaattttcatctcgccgaagggtgtgcttcaggaggttggcgccgtggggacttcgctggtcatttgggtgacgtgcgggttgctgtcgatgattggcgcgctgtgctatgcagaactgggcacggcgataccgaaatccggtggcgattatgcttacatttatgaggcttatggcccacttccggcgttcctgtatctttgggacgcaacggtgatatttgtaccgagtacgaacgccatcatgggacttaccttcgccagctatgtgttccaaccgctgtttgcggccggatgttccgttcccacgatagggctgcagttgtttgccgccgtgacgatatgtttgctcacgtacatcaatgcttacgacgtccgggtgacgaccaaaatgcagaatgtgttcatgttcaccaaaatcggtgctctggtgctggtcatcatcgttggtgtggtgtggatgtcgctcggtggaacggagaactttgagaacgccttcgagaacacggaaaccgaccccggcaagctggcggtggcattctattccggtatcttctcgtatgctggatggaattacttgaacttcatgacggaggagcttcgtgacccgtacaagaacctgccccgagcgatctacatctctctcccgttggtcaccggtatctacgtgctggccaacatggcttacgttgcagttctatcgccgcagcagattctctcatcggatgctatcgccgtgacattcgcccagaaggccatgggctggggtgccttcgtgatgcccatcctggtagctatttcggccttcggtggtctctccgtgcacatcatgacctcatcgcgaatgtgcttcgtcggggcccgcaacggacacatgccggagatcctctcccacatcaacgtcaatcggtacactccgatgccgtcgctggtgttcctctgcctcctatcgttgctgtacctattcatcagcgacgtgtacgtcctgatcacctacagcagtatcgtcgagtcgttcttcatcatgctctcggtgagtgcggttctgtacttccgctacacccgaccggacatcaaccggccgatcaaggtccaactgtgggtcccaacgctgtttgtcatcatctgtgcgttcctgatcgtggtcccgtgctacgtggcaccgtacgaagtgggcatgggtgtcctcctgacgctggccggtattcccgtgtactacgtcggtgtggcgtggaagaacaagccggaatccttcgagaacgtcctgcgccgggcgacacagttctgccagaagatgttcatgacggccaaagaggaaaatgatgacgaggaatgagaggagcatgcccggtaatgtacagcttacagttttaattagtagtgccgacgcaaagtgatagtaggtttgactattttttaattagttaacgtgaccaaacaaaatttttattctcggacgaaatttaaatctcaatcgttatagatctgttttcatcaattgacaaaattttagatcagtgccaaatatgtttggagtcgattttggatcatacactcccacggttttttgttgcgatgaaatcgcgaaatcattagtcaaaattgaaaatttactttatgtttccacatgtgcgtccagttccagtacttacaatttaagtcagacaaatcaaataaaaatgtactttataatctccattgcattttgtgtaagagtctccatcaacgaaccggaaaccgaagtgtcccggtccggtatgatacttcttcataagaagtcaagcaaacgaaagtgtagaatattttcactcaatcctataatagaccaatgaggtttaagctaaaaacaatacgcttttgagcttttctctatcaaacatcacaccgatcaattagaatctcatgctcatgctatatgttgtcggacttgcggcgccagattgtaacaagaactggtttgatatctagaagcaaaacatctcactgaaagagggaaagacaaaagataagactattatacatacacaaacactcgaataaagcaaactgctcgtagttagccgttgaagttagcatagtgcgagtatggaagttttgaatagaaacgtaagagattgaataacataggttaagtttgcaagcaatgccgacaaatacccattatgataataaaccatgctagattttttgttaa

SEQ ID NO: 454 - DNA, 1868 bp, Aedes aegypti
aagagagccatcgcttcgttggaaattcgtctaataataatagcagtcggaaacatcgggatcaaatttatgaggcaatcaaacaaaatcagccacagaattcacaacgtatatcagcacgaatcacgcacactgctgagagcatcacaacatcaccagttcctccagccagacagaggtggagcaagtgaaagccacccaatcgcgtcatcatatcaatacaaaacactgaacgagcagctctagccgagtcgagattgtagcgagagagagagagtaacgaagaaaccagagaccgaagcggacatcatcgcaacccagtcctgcctttttcaggtgtgacaaagataagcgacaaaattgcgccaaacgataagaagactcaactgcagaccaaatcgtcatcgtcgtcgtcggaaggagagatggcatcggctctaaaaagtcccacggcaccaaccggggctggcggaggcaagttcagctggatggcccacgtcaagtacgaacatctgatggccggagtttccggcggagtaacatctacgcttctactgcacccgttggatctgatcaaaattcgcttcgcagtaaacgatggccgaacagcaaccttgcctcagtaccgaggactcacaggagcgtttctcaccatctttcggcaagaaggcttccggggtctctacaaaggcgtcacgccaaacatctggggatccggaagtgcatggggattttacttcttgttttacaactcaatcaaaacgtggatccaggacggcaacacggcccaaccattggggccggccctgcacatgctagcggcagccgaagccggcattctgaccctggtgatgaccaatccaatctgggtggtgaagacaagactgtgcttgcagtttaacgaacccggacagaagggctatgccggcatggtggacggactgaagaaaatctaccgaaccgagggcatccgggggttgtacagtggattcgtacccggaatgttgggagtgtcacacggtgcgcttcaattcatgacgtacgaagagatgaagaaccgctacaaccaaaaccggaagcggcccatcgatgccaagttgaccaccgtagagtatttgacgtttgccgccgtctcgaagcttatcgccgctgcagctacctatccatatcaggtgatacgggcccgcctgcaagaccagaaccacaattacaagggcacatgggactgcatcaagctgacatggagatttgaatcgtggcgtggcttctataaggggctcggtccgaacttgttgcgcgtaacgccggcgacgatggtcacgtttgttacgtacgagaacgtgtcgcgctatctgttggccttcagaaagtcgtagattagaaggcttatctagtttttacgttattatgtgtatcagttagtaggttagttagcgccaaaattgcccaaactttaaccgcattgctcgatcttttcacccacgacggaaaagatcgctcgccgcaatgacccatccgatactggactggactgcactaaacgggaaatgggcttttcaaaagcgtatccattttccctccgccggacaaaaccaaattattctagctgagttaggatcttgtttgccataggtagttaaaatacgcaattggtggcatcggatgccccctttttagttttgttctgtttggttcgttcctaatatacctagtgaatgtaaatttaagtgaggatccaccccagtggaaggacaatacagcagcttctgttctggagcgtctcgtttcgaggcaagtcacaatccagaatagttcagcagattggaatgaacgacctttatgctttagtacacgccagtttctattac

SEQ ID NO: 455 - DNA, 1179 bp, Aedes aegypti
atgattctggagtacgttggaccaaaatggcgtaccttcgtagcgaacatgtcgatcgccctgttcttcaccgccgcctcttgtgctctcccatggattgcgtactatctcgccaactggaaaatcttcgccattgttacctccgctccgctggccttggccatccttaccccatggctcgtccctgaatccgcaagatggctcgtctcccagggcaaagtggacaaagctatcaacatcctgaaaaagttcgagaagatcaacaggaagaccgttgacgccaaagtgtatcaggatttctccgaaagctgtgtccgcttgcaggaggaagaagccgctaacaatagctactccgtgctggacttgttcaagaccccacgccttcgcaacattaccattttgcttattgttatctggatggccatctcgctggtattcgatggacacgtgcgtaacgttggatcccttggactggatctgttctttacgttcacggttgctgcggccactgaacttccggccgataccttcctcactctgactctggatcgctggggtcgccgttggttggcctgcggaacgatggttgccagtggtgtgttcagcctactcgccactaccgtgccagttggggcttattccgctacgttggccattctgggtcggttcagcgtcaacatctcgtacaacattggactgcagtatgctgccgagctgttacctaccgtggttcgagcccaaggtgttgccttcatccatatcatgggatatgtggccagcattgtcgctccattcgtcgtatatctggcgcacatttcgcctgctatgccgctgattgtgctgggaatcttgggaatctttggaggacttctgtccttgatgctgcccgaaactttgggacacgatctgccgcaaacgctcgcagacggagaagaattcggacgtgggcagaagatctgggatttcccgtgcttgaccaagaaaatcaacgacgacgaggtggatgaccttccggtggagcgtttcacccgggccacctcgaagacctctatcggcgcctcgttgcgtgcgtcgacgcgtggcgaactgcgctccagtatgctgaaccgttcaatccgttcccgcgtctcggtgcgttctctccagcagcgttcggatcagatgtctgctatcgtgtga

SEQ ID NO: 456 - DNA, 1349 bp, Aedes aegypti
cacggctcgggactcacccgacaaatcgtatccgtgtgctatttcccgagaaaacagtacgcctcgtggagtgaactttgcagggattcgattgagttgcatggttttgacgaaaaataactcacgatgagagaaattgagtgggcaccactgaatgtgcccttgcgacgccggctggagacgctctgtgccttcggatggatgagtctgtttctgttcggtgagctcgggatgctgttcacctatttatacctattgatattcggtggactgctcgcgaaaacgttctgtctcatctatggagcgttcatctactacgatcggaaagctggcgtcaacggtggacgaggacagggcgtcaaatggttccgcaacctgttctgctggaagctcttccagacgtacttccctgccaaactgcataaaacggttgacctgcccgcggatcgcaactacatcttcgctgccttcccacatggtgtactcagcaccggaacgttcctgaactttgccaccgacaccacgggattctacaaactgtatccaggcatccggtcgcgaccatgcacgctgaacttccacttcatcattccgttcttccgggagattctcctgagctggggtctcgcttcgtgtgcctccaaaagcgtcatgtccatgttgacggcttccaacaatccacaccatccggccaacaaagacggtcgaactgccaatgccgttgtcctggtggttggtggcgccgctgaatcgctgcattgccggccaaacaactaccgattggtgctcaaaaatcggaaaggcttctgcaagatcgctattcaggccggtgcctccgtggtgccagttatcaactttggtgaggtggacctgttcgatcaaccgccgaatcctctgggctccccattacgcaatttccaggagtgggtcaagaatacgaccggaatcgctccggcagcattccgcggtcgaggattcttccagtacacgtacggtgtgatcccaaggcgacgaccgatcaacacagtcattggagcaccgttgcatactcagaagaacgacaagccatcccaggcagagatcgatgatttgcacgaaaagttctgcaaatccttggctgacttgttcgagaagaacaagcccaagttcatcaaggactacaagaacgtccaggtggttctggagtgatatggttaggataacgaattgcctacctacgacattaaatattccaaagtaagagtgctctactagtcgcaaacaaatgtgttgcataaacaacggtgccatgggaaacaaaattagaatggttgagaagctttaaagttcaataaatgaattgaataatc

SEQ ID NO: 457 - DNA, 2470 bp, Aedes aegypti
gtaaatatacagttcgtttctgctgacggcgactcgcaggatttgcagctatttgtccaaccggaatggataacctcgttcagaatcgggggcgaaagcccgccaccgtggtaaaacgccaaggcgaatcaaaaacctatcgggtgcacatcgctctgggattgtttctggtgatgctgtggttgtctttcccgacgctttgttccggccattatgagcacgatcatcatgaccaccatcacggccacgatgaaaacccgagcttcaagtactcgagacaagctaatgaaatgtatgaagaggccagtcatgatcatcatcatcaccaccatgatcatgatcatggacaccatcatgatgatcatgatcaccatcaccaccatcatcatgatcatcaggaagtgccgaaatcaaaggataaaccccaagtcgataccttctacatctgggttcattcgctggggtctaccctgctgatcagcgcagcgccgttcttcattctctttgcaatcccgctcgataacacggaagagatgcaacctcggttgaagactttgttggcctttgcctccggagggctgctgggtgatgctttcctccatctgattccacatgccatccagccgcactcgcacgacgatgatggccacgggcacagtcatggtcacggtcacagtcatggccatggtcatgaaggtgaggatggccacagccacgatatgcgcgtagggctttgggtcttggctggcatcattgtgttcttggcggtggagaaggcggttcgattaatcaagaaggatgctggcggacacggacatagtcacggaggacattccaagaaggagaagtcgtcgccaccaacttcgccgtcgaagaaagagaacaacaaagtttccgacaagaacgacaagaaaaaagtggaagccgaagctgccaaggccaagggcaaagccgtcaagaaggaacacaagaaagatcaaatcaaaatagccggttatctgaacctggctgcggatttcacccataacttcaccgatggccttgcgatcggggcttcgtacttggccggaaacagtatcggtatcatcactaccattaccatcctgctgcacgaagttccccacgagattggagattttgccatcttggtaaaatccggatgctccaaaaagaaagccatgctgctgcagttgactacggctgtcggtgccctggccggtacggtcttagccttattgggcagcggaagcgacgctgccgaatcttgggtgcttccgtttactgccggtggattcatctacattgccaccgtgtccgtcattccggaactgctcgaggaatcgaccaagctgtggcaatcgctgaaggaaatcaccgccctgttggccggtgtcggaatgatggtaattattgcaaagtttgagtaatatgtccaccttcctcgaactctctgtctgcgtgtcacttaaactgaagtgtgacgtcattcgtgtttggcgggaagccgcgtgtttgagaaaagtgcaaaaggatttcttaagtacgtctcaagtaataattgcttgacacaatgtgatcaatttcgagcgtttaacgttaaactaaattgaactaaactaattaaatcggagaacaatatcgcataaatagggaaacaaattggaaacctatccccataagttatgtttaagataatctactagagagcaataaataattaatccacatcgtacaacaaagcgcaccattgacttgtgatctcatccgatgacctttctcaaacacgtggccacgcaattggtacaggctatggcgtctctcttcccttgtctgtgaatgtttggcccggtaccttatctagtttggttcaatttgaagaggagcagatagataggtagttgtaaaaaatgtattgcctttatctagatcacgataactgactcccctatcgcatacgactgtcttctattactaattttctgattctctcaccacttactaaatcaaaaatacctaaaaggtattcgttataactgtattattactcgttaaactcataggggacatgcctgaaagccatagaagaaacgattgaacgctgagtgtaaaatcgccgtttgtgctagtgcaatatgttgattttaatctgattgttctgtttgtttaatgtttaggaaaaaaagaagtaaaaatatgttaatattttattaaagtggagaataaagttaaggaaatatgtcctactaaaagtaatccctaattaaaacggttgcactaacacaaattggagatctttttggcgtcaaaataagattgagaacttgttttatacggaaataaattcagtcggattttttctcaaagaggtgaaccagcctaaggctgaaagcctttataataaagaaaatcaaatcattcagtctgattcatgtctaagcaacagcgtatattttagaaacaaatacatata

SEQ ID NO: 458 - DNA, 2434 bp, Aedes aegypti
agacttccatcaaaagccccggcttagtcatcgcgcaaccggcacctaatatgtccaccccctcatgctggaagattctgacgcgaaagaaaattctctcgatcgaagccgacggcgctgctgacaatggcaaactgggacggatattgaacacctatgatttgacggcgctgggcgttggggcaacccttggcgtcggcgtttacgtgctggccgggcatgtctccaaagatcaagccggaccgtcggttgtgctgtcgttcctgattgctgccgctgcctcctttctagctggcctctgctacgcggaattcggagcccgagtaccaaagtccggttcggcctatatctacagctatgtatgtatcggcgaattcatggcattcgtcatcggttggaacctgatgctggagtacatcatcggatcggcaagcgtctcccgagggttgagcctgtacatcgacacgctcgcaaatgacacgatgaagatccggttccgggagatagctcccatggagtgggactttatgtccagctatttcgatttcttcggattttcagtggcgatcttgttgggagtcgcactggcattcggtctgaagaaatcaaccatggtgaacaacttcttcacggtactgaacattggaatagtgttgttcgtgatcatcgctggagcacttaacgcggacatttccaactggaacgttaatccggcaaacgtgtcaacgatctacaacgttggcgaagggggattcttcccgttcgggtttgaggggactttgaggggagcagcgacctgcttcttcggattcgttggatttgactgtattgccacgaccggagaggaggtcaagaatccccgcaaggcgatcccgagagcgatccttctatcgctgtgtacgatattcttggcgtattttggagtatccacggttttgacgctgatgtggccttactacaagcaggacgtcaacgcaccgctgccgttcgtgttcaacgaaatcgggtggacctacgccaagtggacggtggccatcggaggaatcatcggattggttgccagcttgtttggggccatgtttccacagccccggatcatctacgcaatggcccaggacggactggtgttcaaagcgctggggaaggtcagctctcggttcaagactcccgtgttcgggacgctttgcgcggcgctgctgaccggcactatggccggtttgttcgacttgaaagctctagtcaatatgctatcgattggtacgctgatggcgtacactgtggtagcgatctcaatactcattctaagattttctgaagcaccacaaacagcctccatcccatctaccagtaagcaagtgttcgaatcgtcgaacctcctcaggtcaggtggccgcctgacgggttctgcttttatgcgacaacttttcaacatatcctgcgtcaggataccttcccatgcctccactagtgtcgttggagtgctcgtcaccctttactgccttgtatccttggccctctccctgacgatcttctacgccaagcaacctctctacgacatggaaccgtgggccttgaccctggccggtactcttctcggcctgctgctgctcatcttgcttctgatgtcgattcagccgcgggaaacggctgaagcaccgttcaaggtcccctttgtaccgctgttacctgcgatcagtatttttgtcaatatctacctgatgttgatgttggacgtctacacgtggattcgcttcggaatctggatgggaattggtttggccctgtacgcgttctacggattccgcaacagctaccgcgatgtctactcctgtcgccccggatggaccaaactcaagtatgggcactgacgtcatctgagtcatccctcgtaccgtaaaagaatagtgagcaaaagtgatattttcctttcctgccggaagccaaggaacaagctggaaaattgtgttattatcgagctagagaaatgattatttatgtatccaaatatgcaacagtagtagaggaaaaagcccaataaaacttgaactaggttaagcgaactgtaggaaattagataagagagccacgaaaataaaacttgccatatgtacagaaaaatatatatagaaaaagagagagaggttacgtatcaaatggacagcacggctaattagtggctgtttagctaatctgaatcgatcttcgccaacggtgaaccccaacagctgtccaaatcagtggagagtagataaaagaaaccaaaacattcaccatacacgctttaggagataaccataaccatatataggacacattccaaaaaggttgaacacagaaaattgtaacatttaacacacacgcagagcagagagggggttgtaagatgatcaaacgaaagaaaaatccataaatgaaaacgaaaaatcacccgctt

SEQ ID NO: 459 - DNA, 2322 bp, Aedes aegypti
atgtggcggatcgatgcaaaaccgatcgaagcgggagatttggacgggaagctgctcgggggaagtggcttcagctcggtgctgcaactgaacgatctgcagaataacgtgaaaatgaactctcaaaatgctctctgcaatggctccatcatgacaaatggacaaaccaaggactcgaatctgcggaaagtccttaataacagcgaaaacggccaaaaaaagggcatggcctcgctaacacatctaccaaagaggccacccatcgacatcgagtttaacgagttggcttactcggtgtccgaaggtcacaaacggagctacaaaaccatccttaagggcatcaatggcaagttccgttccggcgagcttaccgccatcatgggtccgtccggggccggcaagagcactctcatgaacatcctcgccggctacaaaacctccaacctaatagggtctgtcctaatcaacggcaaggaacgaaacctgcgaaaattccgcaagctgtcctgctacatcatgcaagacgaccggttactaccctacctaacagtgcgcgaagccatgatggtatcggccaaccttaaactgggcaaggacatatccctggacctgaagaaggaaattgtcgaggaaatcatcgaatccttgggactgttggacgcggccagtactctggcactaaacctgtccggaggccaacgcaagcgactgtcaatcgccttagaattagtgaacaacccacccgtcatgtttttcgacgagccgaccagcggcctggacagtgccacctgttcgcagttgatccacctgctcaaatcgctagcccgaggcgggcgcaccatagtctgcaccatccatcaaccttcggcgaggatattcgaaatgttcgacaatttgtacgtgctagccgagggacagtgcatctatcagggcagggtcaatgggctggtgcagtttctggcgtcaattggactggaatgtcccagctatcacaatcccgccaattacgtgatggaagtggcctgcggagagcacggagactggaacagcaaactggtgacggcagtcagcaacggcaagtgcaacaactacaatcaaccggtattagctcccaatcaatcgcagataaatctaccactagcgagtgaccaacagacggagaagatcgtgaaggccctgtcgctgggagctggcgaagatgacctggtcaaaccctcagccgtcgagttcaccaccatcaatatcgaaccgctgaacaatgagagcaagttttcatcctctgcggttgttagcagtagtaaaacggttgaagaatcggtcagtggaaccagtacggggaaagggacctccgagggcggaggaactatctcaacgactgccgggggacctacgaccgcttcgtccaaaccaacctgcaccacttcgctgctggattcgaccgaaagcgtgagcatcgaggtgccgaaaaagatggccggcttccccacgtccggctggatgcagttctggatcctgttgaagcgaacgttcatcacaatcatgcgggatcaaacgctgacgcagatgcgactggtgtcacacgtggtcgttggggcgattattggaatgatctactacgacattggcaacgatgcggccaaaattatgagcaatgccgggtgcattttcttcaccacgatgttcaccatgttcaccgcaatgatgccgaccattctgacgtttccgacggaaatggccgtatttgtgagggaacatctcaactactggtactcattgaaatctttctactttgcgaaaacggtagccgatcttccatttcaagttctcttcaccagcgtgtacgtcatcgtcgtgtactacctaacgtcccaaccgatggaaccgaagagggccggaatgttcgtgctaatctgcatcctgacgtcgttggttgcgcaaagcctggggctgttgatcggcgccgggatgagcgtggagactggcgtcttcctcggtccggtgtccaccattccgatcatcctgttctccggcttcttcgtcaacttcgacgtcattcccaagtatctgcagtggttgacctacgtcagttacgtgcggtacggctttgagggggcgatggtctccgtctacggcatgggccgagagaaattgagctgcacggagatctactgccactaccggagtccacagaagttcctggaggagatgtctatggacaaggccgagtactggatcgatgcgacggcactgttttgcctgttcatcggtctgcgcgtcgttgcctatctggtgctgcgctggaaactgcattccatccgttaa

SEQ ID NO: 460 - DNA, 1479 bp, Aedes aegypti
gtgtgtttcgtgtgtttccgcgcgttgctttctcttggataatttcacaaagttttcgtgaattgtgccgtaaaaatcgtgttaattcaacagaatattttctgtaattgtttgccagacgcacactgtttgcacaaggctccaccctggggaaaatggcgaaacgcggtgcccaatcggatctgaaccacgacaactggaacgaagaggaagaaccggaggaggctggtaagtttgctatcgcctccgaggatgaactgaagaagagggtcatcaaaacggctcggcgtcgcgttaccggggcggattccggctcgtcttccggtggcaccggttcggtgttcagcggattcaagggattctcggcggttacctccacgccggctgcacccttggccgctggaaagacgagtaaggatggagccagtccgttttcgttcttgagcaacatcagcaaaccgacgaacggaacggcggcgggaagttctgtttctagtgccacaacttcggcgcttggggcaagcatctttgccacgacggatcctaataagaagccgttttccggctttggaagtccaccgaaggctccggcagctgctccggcggttgtcagttccggggacaagaaggaagatgtcggtaagaccgatgattacgtggaaagcatcaaagcgttaaatcaatccgtagcgacttggatttcggacaaggtgaaggagaatccgctctgcaagttgactccaattttcaaggactacgaaaagtacttgaccgaaattgaatcgaagaaagataaggacgagagcaaggattccgcttcaccggctccagcagccgccaagacaaccggattcactttcggaagtgtgtctccagcagcgcctccggcttcaactaagacctttagctttggaataggtgcttccacagctccatcaaccggaactgggttcacattcgccaacgttaaacctcccgcattggagcaaaagtcggacgacaaagaggagggcgaagccgacgatgatgaacccccgaaagtcgagttcactccggtcgaagagaaggacagtctctattccaagcgctgtaagctgttcgtaaaagtggacggtaaattcagcgatcgtggcgtcggaaccgtacacatcaagaaggtggattccaaggtgcaggtcctggtcagagcggacaccaacctgggtaatatcctactgaacatcattctgaacgaatcggttcccctgcaaaggatgggcaagaacaacgtgatgatggtttgcctgccaacgccggaatcgaaaccgccgccaacgtcggtgttgctgcgggttaagacggccgagggagcggacgagctgtatgagacgctcaagaagcacaaacccacttagagggtggaaggtaccgattgaagcagaaagcgtgtattcctgaatagtaaataaattatgacatattgatggttaaggaaaattg

SEQ ID NO: 461 - DNA, 5229 bp, Aedes aegypti
atggataagtcgaagaaaccaccgacaacagctggcggtggagcagctggtggagccccaggacctggaggaggaaaaaaaggtggccctggagcaggagcaagtggcggcggcaaaggaccgcccaaaaagcccagtgatagtgacgcaccgggagccggcgctaaggcggaaggagatcccagtggaccgggtgccaccaaggatgaaacttccgctgcggcaaacggcgacaaaaaatcggataaggctgacactgagcaaccatcgcagccgaagcctggcagtgctggagcgacggtccgcgacggtgcccagaaagttcttaccctggccatgaagagcgaatgggctcccgttgaagctgtgctgaaaggcttggagaaggcggtagccgccggcggagaggacgccaacacaaccccgctagccggggtcatggatccggccaccggaatgacaccgctaatgtatgccgtaaaggacaaccggacatcaatcttagataggcttatagaacttggatcggacgtcggagcgaggaataatgacaattacaatgtgatacatattgcttccatgtactctagagaagatgtagttaaattacttttaaataagcgtggcatcgacccatactccacgggagggtcacggcaacaaacggctgttcatttggtagctagtagacaaaccggcactgcaaccgctattttacgggcacttttagctgcggccggtaaggatatccgaacaaagactgacggtaaaggcaaaataccgctcctgcttgctgtcgaggctggtaaccagtctatgtgcagggagttactatcggcacaaacggcggatcaactgaaggccactaccaacaatggcgatacggcattgcacctggccgcccggcggaaagacgtcgagatggcccggatccttttggattacggtgccaatgtggatcttcagaacggcgatggtcaaacggcactccatatagcggcggccgaaggcgacgagtcgatggtcaagtacttcttttcagttcgtgcttctgcgggaatcatagataatcaagatcgcacaccgatgcatctcgcagcggagaacggtcacgcgtcaatcatcgaaatcctggcggacaagttccgggccagtatctacgagcgcacaaaggacggaagtacgttgatgcacatcgcctcgttgaacggtcacgctgagtgcgcaacgacgctgttcaagaagggagtctacctgcacatgccgaacaagggcggcgcgcggagtatccacaccgcggccaagtacgggcacgtgggcatcatcagcaccctgctgaacaagggcgaaaaggtcgacgtgcccacgaatgacaactacactgcccttcatatcgctgttcagtctgccaagccggcagtggtggagacgctgttggggtttggtgccgaagtgcacgttcgaggtggaaagctgagggagacgcctctgcacattgctgcccgagtggcggatggggaccgatgcgcgcttatgttgctgaagtctggagcaggtgccaacaaaacgactgacgatgggcagacgcctgtccacgtggctgccaagtacgggaatgtgcagaccttggatttgctgctggaggataacggtgatccactgataaagtcgaacgttggcgagactccgcttcacttgggcgcgcgaaattgtcatccagctattgttaggcacctgatagactttgtgttacagaagcatgggaaggaagtgttgaagagctacttaaacttcacaaacgaggacggagcgacggcattgcactacgcctgtcaggtgacgaaagacgaggtgaagtctggaacgggcgatcgggagatcgtgaagatgctgcttgagaatggggccgacgtatcgctggcgaccaaggccacccaagagacatgttttcacgcggtttccgtagctggtaacaacgatgttctttcagaaatgattaaccacctttcgactacggatatccagaaagcgatgaatcggcagtcatcggtcggttggacaccgctgttgatcgcgtgtaatcgaggtcacatggatttggtgaatacactgttagccaaccatgcgagggtggatgtgttcgataatgaaggccgatcggcacttcacttggcagccgaacatggctacctacaagtctgtgatgcactcattaccaataaggcgtttattaattctaagtcacgagtcggtcgaacggctctccatctggccgctatgaacgggtacacggaattagtcaagtttttgatccgagatcacaacgctgtggtagatattttaaccttgaggaaacagactcccctacatctggccgcagccagtgggcagatgaatgtatgtaagctacttctagaactaggtgccaatatcgatgcgacggacgacgttggccagaaaccaatccacgtagcagcacaaaacaattactccgaagttgccaaattatttctccagcagcatccaaaccttgtcatggccacgagtaaagatggcaacacttgcgcccatatagctgccatgcaaggttcggtgaaggtgatagaggaactgatgaaattcgatcggaatggtgtgatttctacgaggaataagctaactgactcaactccactgcaactagctgcggaaggcggtcatgcggacgtcgtcaaggtccttgttcgagcaggggcttcctgtaccgacgaaaacaagtccggtttcaccgctgtccatatggcggcaaaaaacgggcacggccaggtgctcgaggttatgcggagcactaattcgctaagggtgtccagtaaaaaattgggtttaacgccgctgcacgtagctgcctattacggtcaagcggacaccgtgagggagttactcatcaacgtacccgcaacggttaaatctgattctccatctggcacatcattagtacctgaattagggaacgaatccgggctgactccgctgcatctggcagcgtactccggcaacgaaaacgttgttcgactgctactcaactccgctggtgttcaagtcgatgctgcgactacggaaaatggttacaatcccctgcatttagcgtgctttggtgggcacgtaccgatcgtgggccttctgctgagcagatcggccgagcttctgcatagtgtggaccggcacgggaagaccggtctgcacatagcggctatgcacggacactaccagatggtggaggtcctgctgggtcaaggttcggagatcaacgcctccgacaagaacggctggactcctctgcactgcactgccaaagccggtcatctggatgtcgtgaagctgctggtggaagccggcggatcacccaaatccgaaaccaactacggctgcgctccgatttggttcgccgcttcggagggccacaacgacgtgctcaagtatctgatgcacaaggagcacgatacctatgcactgatggaggacaaacgattcgtgtacaacttgatgatcgtctccaaaaatcataacaataagccgatcgaggagtttgtcctggtttcccctgcacccgttgatactgccgcaaagttgtcaaatatttttatagttttatcgactaaggaaaaggaacgagccaaagatctgatcgccgccggaaaacagtgcgaaacgatggctaccgagctgctggcgctggccgccggtgcagactcggcaggtcgtattctaactgccaccgatcgacgcaacatggagtttctggacgtgctgatcgagaacgagcagaaggaggtgatcgctcacacggtggtgcaaagatatctgcaggaactctggcgaggcacgctcaactggacggcgtggcgaataatgttgctgtttgtcggcttcatcgtgtgccccccggtgtggatcatcttcacgttgccgctggggcacaactattacaaggtgcccatcatcaagttcatgtcctatctcacatcgcacatctacctgatgatccatctgatgattgtgggcataacgcccatctatccggtagtgcgagccagtctcctgccctactggtacgagtggggcctgctgatctggctcagcggtttgctgttgttcgaactgaccaatccaagcgacaaatccggtctcggaagtatcaaggtactggtgctgctatttgggatcatcggggtcggggtgcacgtgtccggtatgctgtatgtgcagaaaacctattggccaacgttgctgtactgccgaaatcagctgtttgccctttcgttcctgttggcgtgtgtccagattctggactttctgtcgttccatcacctgtttgggccttgggccatcatcatcggagatctgctcaaggatttggctcggtttctggccgtgttggcgattttcgtgtttggcttctcgatgcacatcgtggcgctgaaccagtcgtttcacaatcttagtcaggatgaggtccgacggttacctctgtcgacgaggaataaggaaatcttcagcgatgacgaaaacagcgattatcatagcgacgaggttgagcgtataaaacgagcggccgctggccaatccgtaactgattatcgtcgtaaacacaaaaccgacatcccgatgacgccaatcatcgccttcgagcgcctgttcttcgccgtcttcggtcagacctcaccggacgacatcaactcccagcggtcgacgcgtcccgaatggacggaaaatctcttcaaaatagtttttggcatttatatgttagtctccgtagttgtactaattaatcttcttatcgcgatgatgtcggatacctatcaacgcattcaggccaaactggtcaagaagaaacggccgtcgctggtgcagatgatgaacctccaccggggccagcagagtccccgctccaaagccggtgccaaatggttgtcgaaagtgaagaaagattccaccgctctgtccgtcatgcacctgtctccccttgggtcgcaagtcagtttcaccactgtcaatacgacccgaatcgagaacgttgccgattgggcggagatttccaaaaagtaccgggaactggtgggcatcgattccgaggacggcagcagctctatgaaggactcggagggtgacaaccgctcgacggccaacgagggcaacaacgagcagaaccagcagcagatgggcaacaacgtgaacgcaaatcaggtctaa

SEQ ID NO: 462 - DNA, 702 bp, Aedes aegypti
atgtggagcacgttttataccactttggctctgatggcaactgtgcacgctgctacgtttaaggtcacatcgcaggtgtacatggatgtatcaatcaacggcaaagaagaaggacgagtcatcatcgggatgttcggggaagaggctccaaagacggttgagaatttcaggcacatttgcatacgcgggatcgatggcatctcgtacaagggcagtcggttccatcgagtgatcaacaagttcatggttcaaggaggtgacatcgtgtccggcgatggacatggttcggtcagcatctacggcaagtacttcgaggacgagaacctgcacatcaaccatagcagttcaggtttcatcgcaatggccaaccgtggtcccaataccaatggttgccagttctacatcaccaccatgccggcgccgtggcttaacggaaagcacaccatcttcggtaaggtattggacggtcaaggggtggtgcacaaggtggaacagcaaaagaccgacaccgatgactatccggtgcccacgattatcatagaggattgcggtgaccatccgatgggcgacccgtttaccgtttccgacgatccgtacgatctttgggcgtggataaaagcagcgtatgttcctctgggcatgagcttctccattctagcattcttccagtacattatcagaaaactggatatctacacgtga

SEQ ID NO: 463 - DNA, 4920 bp, Aedes aegypti
gagttttttcttgagcggaacagaagctttagtccatgaagcttccaaaattccgagcatgtctaatgttcattgatcaacacaccatgcgtacggcacagctctatcatcatgacccatcattgtcatcattggtgtcatgaatgaaaatcattacgcacagaaccgtaacagcaagcaaccaaaacaaaatcaatcaccaaacgtcacacacagtcccgtgaaccaacaggacttcgcttcttcattcaagaacaatcggtcaccgctgtcgggtcgcgtttttgtccatcgttcgttccgaattcgactggctacgtgtggggcgtgtttacaacattcttcaggttttgatgaacgtgtaaatttcctgttccggacggcattgaactatatcgaattctgattgtgcgaaatgatctttagctggtacatgctaagttgaacaatgaagaattcgattccatatgtgtgcagcaaatgtgcgggcgtaaactcattcgaatcgaagcgcagataaggttgtgtaatggtggaatagagtcagtccgtttcttggacacaaagcttgattgttttaattgattcgaacaaagaggagttcagttcttggcgttcgcaatggaggaggaaacgaaattgaatcaagagtcgacgctgccggcagggtccgacgataaacccgccctgcaaacagtcaatgctaaccttatggagactcctagtccagctggtaaactgtacaagtctatagaaaatatggacgactacggcgaatcgaccggcttactggaggagcagcaggtagcttccgtgcggttaccgatcatcggtatgacctgccagtcgtgcgtcaagaacatcgaaggcaacatcggcagtaagctaggcataatcaaaattagtgtaattctggccgaaaatgccggctacatagactacgatcccaccttgacggatccggctcagattgcggccgatatcgacgacatgggcttcgagtgcgtctacaccgacgataggaacggatccaaaagcgatgtgtcgttagctcgaataagtatagaaggcatgacgtgcaattcgtgcgtcaggaacatcgaaggcaacatcaaagacaaacctggtatcgtctcgattaaggtcctactcgatcagaagctgggcctagtggaatacgatccgaaagtgatcagtccggagcaaattgcagaactaattgacgatatgggattcgaggcaaaggtagccggtgaagacaatgtaactcaaaagactgacagcaaacgagagccccgttcggagaagataatttcaattgacgatggattcacgccttcgaatgggaatgccaacggtaagcaggtccagctgaaggatagcttcaaacgatgctttctgcacatacagggtatgacgtgtgccagttgcgtttcggcaattgagaagcactgcaagaagatctacggcgtggaatcgattctgatcgcactactagcagccaaagcagaggtcaagtacgaccacacgttgaccggtccagaggatattgccaaatccataacggacctcggtttcccgacagaagtcattgacgagccaggaacgggggaagccgaggtggaaatcgaaatcctgggcatgacgtgcagttcctgcgttaacaaaatcgaacaaacggtgttgaagatccccggtgtactcaaggcgtccatagcgctgaccttgaagaggggcaaattcacattcaacaacgaaaagactggcgcgagaacgatatgtgaaacaatccagagtttaggcttccaagcgttggtactgtccaacaaggacaaaatggcacacagttacctggagcacaaagaggaaatccgcaagtggaggaatgcttttctcatttctctcgctttcggcggaccttgcatgatcgccatgatctacttcatggtcctcatggaaacgcacagccacgaggatatgtgttgcgttcttccgggactttccatggaaaacctcatcatgtttgtcttgtcaacaccggttcagttcttcggaggatggcacttctacatccaagcttatcgagccgtgaaacacggtgccagcaacatggatgtcctcataacgatggctaccaccgttagctacctctactcaataggagtgctggtcgctgccatggtcatggaaatgaaaacgtctccgctgaccttcttcgacacgccaccgatgttgttcatattcatctcactgggtcggtggctcgagcacatagctaaagggaaaacttccgaagccttgtccaagctgctctcgctcaaagctaccgatgcggtactggtaacgctgggcgatgattactcagtcctctcggagaaggtaatctcggtcgatttagtgcagcgaggtgacatcctcaaagttgtccccggtagtaaggttcccgtcgatggcaaagtgctatgcggcaattcaacgtgcgatgaaagcttgatcaccggggagtctatgccagtgccaaagaagaaaaactctgtcgtcatcggtggttctattaatcagaatgggctactgctggtcacggcaacgcacactggagagaataccacactggctcagatcgtgaagctggtggaggaagcacaaacatccaaagctccgattcaacagctggcggataagatcgcagggtactttgtgccctttgtagtggcggtttcggttgtcacgctgatcggatgggttattagcggctacgtggacatcaatcacattcccatgtcggaggcggccaaggagggattaaatcgggaggaaatcatcttcagctacgcttttcggtgcgctctaagcgtcctggcaatcgcatgtccatgcgcacttgggttggccacgccaaccgccgtgatggtgtccactggggtgggtgctcttcatggcatcctggtgaaaggggcgggaccgctggaaaatgcacacaaggtaaagacggtggtattcgacaagaccggaacgattacgtacggaatgccaatgacatcccggatatgcatgttcgtcaaaccgcatgtatgttcgctggcacgtgctctgagcatcattgggtcggcagaagtgaacagtgagcatccgattgccacggctgttgtaaagttcgtgaaggatgtcctggagatcgactcgttcagtaagtgttcgaacttcatggctgttcccggatgtggcattcgctgtgtgatttccaatatcaacggggttttgagcgatgggatgagatcggagaagatcaaaaattatcaaaattcgtacaaaagtgatgcgacttcggtgagctttgtgaacggcgcggttgtggaggagctgattccatctttgagcccatcccagaagaacaccatggagcttcaacagctgcttcagttggaaaccatagagcctgacactagtgtggaagcgttttcgcgcgtcaatgagtacaacgttctgatagggaaccgggagtggatgaatcgaaacgcggtaatcgttccgccggagatcaacatcaaaatgacggaggaagaacagatgggtaatacggcgattctgtgcgccatcaacaatcaactgatttgtatggtttccgtatcggatatggtcaaaccggaagcgcaccttgccgtttacacgctaaagaagatgggtatcgaagtgattctgctgacgggggacaacaagaacactgccggtaacattgcccgtcaagttggcatcaatcgggtttttgccgaggtgcttccttcgcacaaagtggccaagatccagcggatacaggaaaaccaaatgcgagtggcaatggtaggtgatggtgtgaacgatagtccggctctggcacaggccgatgtaggaatttcgatcgcttccgggacggatgtggctgccgaagcggctgatgttgtattgatgaggaacgacttactggacgtggttgcctgtctggatctatctcgcaaaactgttcgaaagatacatctcaacttcttgtttgccagcatgtacaatctcttgggtatcccactggcggccggcattttcactccgtttggattcattctagagccctggatggcctcggcggcgatggctctcagctccgtatcggtggtctgttcctcgctaatgctcaagctgtacaagaaacccacgaaagcctccctccagacgcccgaatacattgccctggtggaggccggagccctgctagatccggaaaccgtgtcggtacaccgcggcctggacgacattccgcgaccgaactttggccgctcaaccagctccactttagccaagttgttcatgcgctcgccgaaggactccaacgatgatcggctgttggcttcaactcatatgatcgacgacgatgactacagcgtcggtattgtcaagtccgtcaacagtggcatctacaaggacgcgaccgagctgcagaaactgtagatccagtcacttatgtgtttcgtttcgaaaacgtgaccatccgaaattatgttttaacgccttatggaaaagcaggtcgagccaagcatttttcggttggaattcaaccgggaagcagccataatgctaagctcgcagaaatgttcatttctcatctagaataatttcttccatattttttctaatactttaatcagtgattttgtgatatcgttttgcattgttatcgtttgtttcgtccgaactatttttacttagataaactatacatttttaactactcatcaattacgtttgtattgcaacgtacttatcaatcaagcacaaatccagccagttgaaaagtaccatatcctcgttcaggaggacagtttcctatagtgtatgtatagatatgtagccagaagagaagaagagctttatgaataaatgtttgtattgata

SEQ ID NO: 464 - DNA, 1374 bp, Aedes aegypti
attgaaatatttcaatcaaagtgaataccaaagtgcaaatgcggttttctttgttaatagtgtgcctgatagtgcactgctacgcagatgatgcatcgtcgaacagcaacaaaccatcaggttcgcagacgtggattgataagctgaagaatgatttgttcgtcaactatgatcgcaatctacggcctgctgaatactacaatgtcaccaacctggatattgggttgactatctggcatgtggatattgatgaggaaaaatccattctatctctatacggatgggtgaaaatgacttggaacgataacaaactgaagtggaatccgtccgactacggaaatgtcgagcagttccggtacactccggagaacgtgtggaaaccggatgtggttctctacaacaacgcccgaggtgcggacaatctacactacggcaacacgaatgtcatcatatacaactctggtaaagttttgtgggtgcctccgaccgatttccacagtttctgcgagctgaatctccgattctggcctttcgattaccagaggtgctttttgaaaatcggttcgtggacgtacgatgagttacatcttaacatgacgaccaccgaagtgaatccggagatattgtggctggtcccgaaccataagtggagtatccggaaggtcacagttgaacgccatgttaagaagtacgaatgctgcgaggaaccgtacgtcgatatccagtacaacgtcactcttcagcgacattcagcaacccacaaggccattgtcgtgagcccagctttcgttattatgctaatggctctatctgtattttggctgccaccgcaatgtggcgaaaagattgtgctgaatggaataatagcgctgattataacaatattcctcatctactttgctcagcaattgccagcgatgtcgggaaatccgcctctaattgtaaccttctacagcaccacattttacttggttgccatcagtacgattctgtcggtaattgcactgcgtatgactcgcaacaagcactgccgtgcagtaccacgaccactcaagggtcaattggacggatgtctcgggtctgtactaggcgttggcaacaccagccagttggacgacgaaaaggaaaccgtcggtgaagaagtatccgtaaactcgaagcaacgtgactggtgccgactggcaacactactggaccgactggcatttgtggtctatttgatagtatttgttgcttcaatcatttatttcaccttatagtctaagatatgatttgtcttcaagttccagtgtttaaagcaaagcaggtttctgtaacgtcaattattagcacgatgatatgcttttgttaaaaaaaagcttttcgataaactgt

SEQ ID NO: 465 - DNA, 1446 bp, Aedes aegypti
atggatgctatcgagagcagtaaacgatggaatcgacgcacctctttggatgtttggaagcgacggcgatacatggtggtggcgatggcatttctggggtacttcaacgtgtattctctgcgggtgaatctgagtgtggcgatcgtagccatgaccgaattgcgagaagttgtgcatccaaacggaacggttgggtttgaacgcgagttcgattggagttcaagtgttcaaggatatgtgttaagctcattcttctatggctacattttcacgcaagtgctaggaggctacttatccaacaagtttggtggcacgaacgtatttggcgtaggtattggaggtacggcgattttgacccttttgacgccggttttggcacgacagggagctggttggctcattgccgttcgcattctggagggagcatttgaaggtgtaacgtttccctgtggacatgccatgtggtccgtttgggcacctcccagcgagcgatcccgaatttcttcgatagctttcacgggagcatttgccggcacggtggtcgcgatgacacttagtggagttctggcagaatcgtggggttgggagagtgtgttctacttcttcggagtagtggcttgtttgtggtatatggcctggctgttgctagtaaggaagtcacccgagcatgattatcggatgagccagaaggagaaggatttcataatggtgacatccggacgacaagaagaggatgttgaagatgtgaaacatccttggttggcgatgcttacttcgaagcccgtcatagctatgtctattgccagtatcgtcgaagattggggttattacacgcttctgactggattgccaacgttcttaaaaaccgtcctgaacttcgacctgcaagaacccgggttcttatcggccttaccctacctagcgatgggcattcttcttagcgcatctggctacctggcagattggctccaaattcgaggctactttacgactactcaagtgcgaaagtatttcacctgcggtgcgtttttgggacagctcatatgtatgatgattggagccttggtgttgagtccagctccaacgattctttgtgtaacgattgccgttggactgggaggagtcgcctggtgcggttacctactgaaccctttggatctctccccgaaaagctctggagtgttaatgggaatctccaatggattcgcagccatttctggagtcattggtcccatcgcaactggatacataaccaccaacaacaccgaagatgaatggaggacagttttctatatagctgttgggatctacatcgttggaacactggtctactggttctgggcatccggtgaactccaaccttggtcacttgagatgacccaacaaaaaaatcagacgcgaaatgaaacgaattatattagctcaatagaaagtaaacaagtttga

SEQ ID NO: 466 - DNA, 2569 bp, Aedes aegypti
aatgcatcaatctgctgtatttggtcggacttgtagcgaaaatatagataagccagcacaatctaatcacgccacctattaaaaatgtgtgggacgttttgtttataaaacggtcatctcattcaaataaaaaaaatcctatttgtgcgagcttaacttcattaaaacatcattatggcgtttatttctaaaacaccaaaatacagccttactatacttcctcaatataacatttttgcgaaattgcacccacgaccagtgcgatgcgcgccgcacccatacgcctagcgcctcaataatcacggtttggtgactgaaatttcaaaacaacacatgtttgcgccatcaccgccgccgcaccgcgagcaaaatccgaaacaaaattttctttcgacgatgacgacggtagtcattcgtggcctgcttcgcggaacggacgtctaatcgtcggcgcgcctgtttcagcttccactagtagtttagtgtctcagtaggccttctttcggaactagatatcacctcgcctcggagcaacgccatcttcgccgcacacaatctcctcactcattcctaacctgccatcacagccaccatggaccgaagttgtttcccaacgagcaggcccaacttccgaaatcctttcggacaacggccatggatggagcagagtggtgctgcggccgccgctggcggaggcaccggactcaaaggaatcgttgccggtggaatcaccggtggtatcgaaatctgcatcacattccccaccgagtacgtcaaaacgcagcttcagcttgacgagaaaggtgccaccaaacagtataacggaattatggactgcgtgaaaaagactgtcaaaaccaatggcttcttcggtctttatcgaggtctcagcgtgctactctacggatcgataccgaagtcggcagtgaggttcggcgccttcgaaacgttcaaagggtacctgatggaaccgaacggtcagctaagcacctccggtaagctgttggccggtcttggagcaggtgtggcggaagcaatcctagccgtcactcccatggaaactgttaaggtgaagttcatcaatgaccagcgaagtggcaatccccgctacaagggctttgcccacggtgtcggaatgattgtccgacaggaaggcttatccggtgtgtacaagggactcactgcgacgatcatgaaacagggatccaaccaagccatccgattctacgtcatggaatcgctgaaggaactctacaagggaggcgatcaatcgaaaccggtgccaaagatggtggttggtgctttcggtgctgtagctggtgctgcttccgtcttcggtaacacgcccatcgatgtagtcaagactcgcatgcaaggtctggaggcggccaaatacaaaaacaccgtcgactgtgcggtgcagatttggaaaaacgaaggaccgttcgctttctacaagggcacagtaccgcgattaagtcgtgtctgtctggacgtggccattaccttcatgatatacgactcattcatggacctattcaacaagttctggcgttaaacgtaccgtcgtactgtttttcagtcagaggttaagatcttcgacatgacacggaatttgaagaatgaaagatatcaaccaatcgcgcgctggccaatctacgcgctagagcacacctgacaaaccagtatcagggaactgtctgcaaaaatccgttggaagcttttgtagaaagaaataatcaacctcaatgttaatcgtagtcaagctaagcaggaaaacgaatcttaaagaagcaagaatgcatttgtgttagtcgaaacgaacatagctcgttgtagaaggggagggaaatcacacgaacgggtagataataagcactgaaacctgactaaaaaactgttgaatgcacaaacaagtagcgaacacttttccctgtaggtttcaaaacgaaaggcgaccactcgctggattcgattttatacaaaaacaaataatcattatactttgtttgcgggttttatgcactttaaaaattttaagttgtgcaaccacgaagcattccattttttgtgactttaattgtaacgacccaagcttatttccattttacgaagtgcgcctcattgaaatgaaccgttctaacgtttcggttttgtttttgctgtttaaattttaaattctatactcacagttttgaatattgcagattttttacgatattctttgttccaaaaaataactaaagagtaatgcctatttattgcttgatgtgtaatatatgccacagtaacatgtgcaaaactaataaaaaccgatgtaaaacaatgatcgcttttgtttctgttttatgagctgacgaaatatccttggataaaactgaaacgacagtataattgacaaactaaaaaggtgtgaaaatgcaagtataatggcgaaagcattacggcgaacggacgttaggtgatctcgaaaggtggatacatcactacgatgaacacatgaacgatatatacagaagatcacaacagcgttgtgctacgtcattacataatagggtcctaaagccct

SEQ ID NO: 467 - DNA, 1647 bp, Aedes aegypti
atgccgaaatcggaagatgacattgatcttgacggggttctaaatgaaattggtcaatttggacgatttcaaatccgacagtatgggctgatggtgattcccataattctgaatgcgttcttcacgttgagttacgtttttacagcgggaaatttgaactacagatgtgaggtaccaggatgcgataatgggccgaattcggtttaccacccggaatggttgaacaatacagttccattcagacatggaatcccagcacaatgtgaacggtttcagccgataaccaacgcgagcttagataacctcttgtgcgacgctgatgatttcgatcagaagaacatcatcgaatgcggcagctttatcttcgaagatgacgaagtaacaattgtgaacgacttcaacatcacttgccccaacaatgattggaagctaacgctcgtggggactatcaataatgtggggcagtttgtggcgctgccgatcgctggatacatatcagatcgtttcggaagacgtttggtgcttcttctgagcgtggccggcagtgccattttcggtgtaatacgatcgtttgcggcgagttatgaaatgttcatcgccctggagttccttgatcccttgattggttctacgatgtacacaacggctttcgttttggccttggaactggttggccctaaaatgcgagtcaccggcaacaacatcatatcatgtgcattctcgtttgctgaagccgggctagggctgttagctatgctactacgcaactggagatatttgctcagagcactttacatacctggcatcgtatcactaccattcctatggatgactacagaaagtgtacgatggttgctctccaagggtcaacgagaaaaagcattcgatgttcttaaaagggcagcaaaaatgaacggcaaaactctgtcaccggctgcgatagacagcttctgcccggtgagcgataacgaatcaaggtccgagatgctggaaaacaacaacttcttcaatttgctgacgaacgcgttcaagaatcgccgcctgatactccgagtagcaaattgttcattctgctggctaaccaacgtgctcgtctatttcgggctaagtctgaactccgtcactttggcaggcgacaagtatctgaacttcatcttggtttcactggttgagctaccagggtttctgattatgcaattgatcctggaccgagtgggtcgacgagtgacactttgcaccaccatgatactctgtggactgttttgcttcctatcagagtttataccaacagggaatcactggctcagccttattctattcctggtcagcaagatggccataaccatgtcatttggaactctctacatttacacggtggaaatcttcccaaccaaccttcgacaaagccttctctcggtatgctcaatgttcggtcgaatcggttctatggtagcaccacaaacaccccttctggccaaaatctgggccccactaccgatggtcattttcggtagcatcggtattgcatccggtctggcaattctagaatttccggagaccctcaacacccaactaccgaatacggtggaggaagcgatgaacatgaacaccgacgaaggaaacaagggcagggagcgacttgcataa

SEQ ID NO: 468 - DNA, 3646 bp, Aedes aegypti
acataagggattgttacgacacacttcacctcaatatagaaatatgaaattttgcgaaatatatattttttttcataggaaaactaccacgaattccagcacaatcggagagcatcaatacaacctctcttggtaagggggttgcggttctcgcaaactatgaaatattgaatcgctaaaaataaaaccgcgttttggacaacattcattttttcattaattttttaagatgtttttaaaacgtaacaaaaagattcattcagcctgtagatcaagcgccttcaatgtttccaacgtgtgcctaatacagtcctcagatgatgataaggcacatcatcctgcccacgaccggacaacaaaacaagaactccgtttgaaaacaaaaacgcaaatgttatgtctgacgttcagggaaagctcgctctgagtttgacacttttattctgctacaatgtagaagtgggaggtgggcgacgcttgcgccgtttcgtgctatcgattgtcgtcacataagctcgctccggtgtaaagttgaagagagagagctttccgcaggaggaggccaaaggcatctcgaatgtgatgatgaaaagctaagctccatcattcggtatcgaacggtatcaatgaccagtttgttgcagtgacgacggtcgtgagcaatatttttctccatagtttgttatccggttggtgtaacagtgagaaaaatctgctttgcagatttacctgaacgtggattgttcgatttccacttattatccgcgatacggttctttaatactacgaatagtcgatacgcaatcagtgaagtgaaaataaattcgtttcaataacaaacgaagaaaagtccctagaggatagtgcgagtagaatagttaattacgacggtcataggaaaaagatatcgatttgctgatatagtgtgtgcagagccagtgttagaaaatcgaactagcagtgctggggattaccattgagtgatcacatcgaaaggaaataaattccactcgactgagagccttcgagaaagaacctgcaagatgggcgaccacggcccggatatgaacacactggaaactgattatgtcgttttggtttcagtggtgccagcagttttgggattgacagcggccgccatcctggcagtgacagcctgtttctgtgcccgacggattcgacgtcagaaaaagaaggccggtcatgaagtttcctcgctaccattccagccaccgagaccaccaagggccgttcgctctccaagtggacaacccccgcaatatctgaagaaatcgccttctccaacgggtatcaaacccccacctggcggtcatctaccggcacaatctcccactgagcagagttgcattccgacgaacgcaaccgcccccataactacgaccaccaccaaatacagcgaggagaatgagctgacacccaaaaaggttcagctggaaccgaaatcaccagacgtcgaccatttggatggcaacgaaaacgaaaccgaatacggaaagctgggttccattgtctttaagctccggtatttggccgaccgtagcgctctggttgtatccgtagttcgctgccggggattaccgggaaaaaatcatgggtccaccaccaccgatctgaccgccctgccagctggtcccttgtgcaacggaaatggcaatgtcaagcagtcggcaaccgatccatatgtcaagctgcaattactcccggataaacaacacaaggtcaaaaccagggtggttcgtaatacgcgcaatccagtttacgatgaggacttcacattctacggattgaccttagtcgaattggctggaatgtccttgcactttgtcgtgttgagcttcgatcgatacagtcgggatgatgtcattggagaagtagtttgccctctcagcggaatcgacctgcagcaaatcgagaaccaacaggtggccctgagccgggagatacaaccaagaagtttgaagatccgtgctcaaggtcgtggagaactgttgatttcactctgctggcaaccggccgcagcccgattgacggttgttctgctaaaggctcgcaatctccctcggatggatgtaacaggattggccgatccgtacgtcaagatctacttgctgtacaacggacaaaggatcgccaagaagaagacccacgtcaagaagcgaacactgagtccggtgttcaacgagagctttgcgttcgacattccgtcgactgagggcgctggagctacgctggagggagtttccctggaactgatgctgctggattgggatcgggtaacgaagaacgaagtcatcggtcgtcttgagctgggcggaccaagaagcaccgggtcggcactaaaccactggaaggaggtatgcaattcacctcgcaggcagattgcagactggcacaagctgagagagtaaggatggtaaggatggttttagttaaagctgtacaaattcccggtgggggaacacatgatttgatatgatttagttaatctcttgattcctcacttcattccttgggaatggactgatgttgctgcagtactgagttacaaatatcgagttattaaattctgactgttatactactgggcaaaaaactaggcttttatagtttgttaaaaactgataggaaaggtgattacgtggaataatccacagcgaaacctatatctgcgaaaaagaggaaaagttttcagtaccaactaactatataaccaactcttcagaacattgtaatcaccagagagtataaaaaaatgaaatcacagatcaagctataacagacattccatcagaaaatcagataaaagaactgcaagaattccataaaaatcattacataaatggggcggcaactgaagacaaaataaaaaccaatctcaattgatcgaatggatataagatatgtgccagcttagagaattcaatacggctgaagcattatgccctttttgtaggatgggcgaacaatgacagcattaccagcaaccagaaatgaaaaatactgaaacattcgaaaatgcgtagatgtgtgtacaatatagttataaacagtgagaatacagaagagtttgctacataggcacaacagtttacgaactatcgtaaaataaaaacacagatacaaacagcacttgaaaaaaaaacgcgaaacgcagcaccacaaatcaagcttacaagtagaggcaaagatgatatataaatccagcagaaaacaaagtcagattaatgcaaacaagttagaagaccgaatgatttaggatctttgatgacaaatgcgatataattgagtcaggacatttagaaggaatgaacgggatcgtaaagtatgagagagagtgctggacaagaatttgacgaggcgtagatgaatgcttagtgctagacttacttaccattgtcgtttttattaagctattggttgaaaaaagttttcttggaatgtatagtcataaagattcgaattttactttcaaaaacccacgtgaagtcatgtaccatttccaccattggcaaatatgtccttctagattgaggcagggctaatcttctgcagttgattctcggtcggcgcgccataggcgctgcaatgctagtaccgggtaccccgttggtttgaccacatttaa

SEQ ID NO: 469 - DNA, 1420 bp, Aedes aegypti
gccagaaagaagaagaagaagatatttgggtactttcaagttagcgtttgtccgaagattcgatttttggccacttggatatgccacagtgacatattttcgtctgaacggtgtaaatgcaaagcgaagtaaacggataacaccacaccagctttgtttacatttttgacactaaagtgcatcgctcacgggtgtatgtgtgcgtacgaaagtgcaaccgagtgcaacgcatacgttttggtttgacgtcttcgtattgtgatcttcatgatttgctgagagttaagtgcaatttcgttggaggtgtttttccaattttaaagtttatcatccagattttcacggattccataggatccgatagccaccgggaacgatgatcaaggcgatactggtgttcaacaatcatggcaaaccgaggctatccaagttttatcaatattttaatgaagacatgcaacagcagataatcaaggaaacgttccagttggtatccaaacgggatgataatgtgtgcaatttcctcgaaggtggaagcctaatcggaggttcagattacaagctcatctaccgacactacgccacactatattttgtgttctgtgtggattcatccgaaagtgagctcggtattttggacctgatccaggtgttcgtcgaaacgctggacaaatgtttcgaaaacgtgtgcgagctggatctaatcttccacgcggatgccgtccatcacatcctctcggagctggtgatgggaggtatggtcctgcagacgaacatggccgacattctggcccggatcgaggaccagaacaaactgcagaaacaggaagcgggactttcggccgctccggcgcgggccgtcagtgctgtcaagagtatgaatctcccgcaacagataaaggacattaaattacctgatcttccccaagctattaaggatcttaaattctgaccaaacacgaactttgatacgtcgttactcaccaagatagcttccgactcgtcctacattccaatcggcagcagtggcctcgatgggttcaactttgaatcgtaccagtcggagcagcctctggccctggcggcaagcgagaaacaccagcagcagaaatccagacgaaaactgaagaaagctgaaagccatagccataggatgggtggcgatgatggtcaagatcatgaggataaggacgatggctattacctcaagctggcctaaaatcgccgctttccatggttagttaaaacgctgttctaccctttgaacgatttaaaaacaaaaccaacaatgtaacgtttggaatctgctacctacctgttcgaatcttgaactgctgcatatttttaatttggaatcttatgttacggatgtcggaagtactattaatttaattaatggagatacatttttataaggtag

SEQ ID NO: 470 - DNA, 537 bp, Aedes aegypti
atggtcgaatcaattggctgcttcttccaccggcgttgtggaaattccgaaggtgttccttctcatccgattcgaccaacggccgtatccgctggaacccggaaattctggccttcaactcggcgaagtcaggccaagttgtcgctcgagataacaagaatcttccatcgaccagccccagtgatatcatcccaatccaccaaactacccggactatcaatcatatccaatcaacccaattcgaacggaccgcaacgtgaacgaatatcatccatgctacctacagcagtcatccaacgatcatcgtttcaacggcaggcatcgatcgagcaaggcaaaataaaaaaacgaattttcaatttcgttttgaggcgccgggatgttcgatctcataccgacaacggcagaatcatccaagccaagcgcaaattgaaccattcaatttgttgcccattgtttggttcttttgcttcatcgcatcgtcagcccaacgcaacgataggcagcatccagtgcactgctgtgcgcacggtttaa

SEQ ID NO: 471 - DNA, 711 bp, Aedes aegypti
gtgatcaacgaaaatgtgaaaccttcaagcgtggttgttgaatacgctaattaaagtatctaaaatattgttcacaatcgaaagaaataatacagcatcttcaatcgaatacgattcattagatcatacgcaataagctgctctcccgtcgtaaaagatcaaaatcgtaagatggaaaatgtccctacgattgaaaccagcaatgcagcctcgtcaccgacaaccgctgaactgagcatcagcccctcgaaagcggacgataatctcagcatcaaatcttccgactcggtcacaacgagtggcgagtacgaaatcgtccccgaagcaccatcccccttggatacggtggacggttcttgtccgatacttccctcgccgataatgaacattgtcaagacgattcccagctcaaaaacggagtctcgaactcgcaagcctgttgaggaaccgaaacagagcggcgaatcgctgttgaatctgagcgaatgcctagacgacgaggaaggaatgatggttaatctggtggtggccccgaagaagctggatgccatttcgccgatactgaacatcgagggtaacggaaatgtattggatttacagaaaaacatggatgaggtcatactcgagttggacgaggaacgcacactgagtgcaagcgatggtggagagccatgcggtagcggcgcgaacaaggaaatgaaatggagataa

SEQ ID NO: 472 - DNA, 492 bp, Aedes aegypti
atgtcaccatcggtggtgttgttacccctagtgttgctgttgctgccgttaccaccattgttgctgctggttctagtgatggtaatcgcattacgattgtttgctgccaccgccgatgccgaagttacggtctccttccccgccatcgttagtggtatcgaaaataacgccgctggcatcgacaccggatgccgtgccaacgccgccatccataactacttcctcttcgtcttctacgacgatgccttcgccggtttcctcctcgatctccacatccacgccactatcgatgatgcaatcgtaatcgactccctccactatttcgtacacgtcgcctccgttgtcgacgtcatcgtcatcgttctaagtcaaacgattcggctgatccggccgacgttcctctatcgtgtagacggtgttgccgacgcggaacagttccgtgtgggggcgcagcgtcggttcgtgtgtcgctatgatgccggcttcaattga

SEQ ID NO: 473 - DNA, 767 bp, Aedes aegypti
atgcatctcccaatcaagccactgtatagcacctatcagaaagacttatctaactcgctgtgggagccgctgaacactttttgggccaagtgctacgagtcgtgtaaattttcgtctcaacgtcgtgccaagctgcagatggaaagccgtcggaagttccaggagaaaatattgattccatgccgaatacggcagtcggaggaacttgcacgaatcacagtgcagcagacgcagcggaaggcgaaagatgcacacattgaccgtaggtggcagatattgaagcgcttcttatatggaccaaagggcgcgtgggccaaactgtgagtaccttaattttgaattacatttttccgaatggggcaatgtcatctgcaatggcaatcagaagccacgtacatacatcaaatctggtggaactgttttcattgagttcaatgatttcaatgattcaacacgatggtcgttacaaaaaggggcaggcccccctgttagattgtacaaaaataaatagtttgtcacgagttgttagtattttgtatgaagatattttcaggattcatatttacatgcgtcatggtagactgtttgaattattcttggagttcatcttcaaatcagactccttcccaatatcttcctataaatcattcagaaatttcggtgctgccttggttgatgaataaaatttcgttacggatattgatctataaaattattattcaagatatttaaaaaaatcaaaccagagacaaatagagacatagcac

SEQ ID NO: 474 - DNA, 1707 bp, Aedes aegypti
atggataaacggcaggatggcctattgttcaaatcttgcaaactgtgacatgatttccatataaaatgtccccagattaaggaactggactcattgcagacggtgcactcgattcggtaacatttgaaggaacgatttcaacggtttgtggcggtttaacgagttttgtgaatatgttcagcaaaaacgtagtcgtgtttgtagtgtttgccctggccgggttcgaatgtgcttatgctcaaagcaacaactggcgccgaccgaacgagaccaactactcggaagcgtcgtccgccacgaacgatcgcacgcagcggctcggcctgaccaccggctacggaggcggactcaacgggtacggatactccagctcgggcgtcggaggttacgccccgctcaagatcgacttgggcggagtggtgctgggaacactggtcggcatcggcgccctgctgatcctgcccaagctggtgacggccttcggcggcggctacggaggacactaccgtagcgagaacggtgacggcgacttcacccagctgctgaacaaggtcgacgacatgctggcccagaacaacatcgattcgggatcgtgcctgcagaaggccatctgcacgtacgtgcagaagtccgactaccacatgcaggtcggaaccgccgatcagatcgagcacatgatcctcgcgctggcagagaactccctggtcgactacatgctggacggaaccgccatcaaggaagcgatcaagaacggaaaagctcagagccgatcgtgcgatgaactctacaaatcctgcccgcttgataggcaatccgcctaccagatggccagtaaaatcttccgcgtcggaggaaactgaatgattctttgaataacaatactctccgctttagtgacgctggaacattctcactcttgacttgatatgaacccgtgccgtactttacaaactctcgaagaccgaatcaccagcctactacgtttcgcttgcttaaaaactcaccgtaggtgacaggtgcgtttagtaaatcacgagcagtgactcatgccaacctccactttatctggagtgcaatataaaattcgcacgcttagaatagatgaacccaaacgtttttcgcgacggtggcagatattcaacctgattccaataatgatgacccgatgtcgtcgtcgtcgtcgtaaacgagtggttctatttcaggaaaattccacacaactcaccgcgcatttcacttcatcgcaccttcgacgccatcatccaggttcgaggttaaatgtttagtgtgtagttaagtgtattacgatcctaccacacgaaatggtctaccgctgtgagagaaggccgtaaatcaacacacctagcagcacataaggagcaactgtttacaacagtgaaattttaatttttcgggaatgcgagcaatactgacacaaacacgtttggaaaggaatgcactctgcgctgctgtgaacttttttgtatttacacaaccattctttctgctttgtaattaatccttccgtgcttcatgaaactgctttctatcgcttgcaaaacataaattttgaaaataaaaaccaaaaaaaaaatgaaggggaaccaattttagtcatgtaagaaacaaacgatgagacaaacgactgtaaatacatattccattttttttttgcaatgaacaaataaataattccaattaaaccaa

SEQ ID NO: 475 - DNA, 3242 bp, Aedes aegypti
atacttatgacagacatgtgataccaaaaccactgtacaccgtgatatcatatgtctgtcacccagtatcaaggtggtatcacgcaagcatcttagtaccgtatcatggtctgcgggcgttgtactgtaccaacgtacagcaaatggaagtgccatcagcgctttttccagccagtagcgaaaccgtgaactaaaattttccattcgtttgacgtttgtgaaaagtaaacataaacaaaaatccaaaacaatctagcactagcgagatcgtaaattacgattacgattaaattcagtttaattgtttgaaatcagtttaattagctttagtgccgaagaacatgagctcccagaaggtgacgaaaaagatcgagaagattagtgagaaaaagccattaaaagtgctaagttccgatgaaatcaacagagtcatcgatgtgtggagtgaaaatgtggacgccttgcgcaaaacttgcaagaactcacatatttacttaaaaatgtgtgagcaactacggagctatggcatccgtttgactccaaccgaattgcgcaaccgaatccacaatttgtccaaaagatacagggccgagaaaaacaaaatgggagtgtccggaggaacacggtcaacctggacctattttgaggccctcaattgttttttgaaaagcttcaagcaaaacaatatgaccgaattaatggacgagagctttgttgccgactcgaaagcagcatccaaacatccggaagccatagaagaaccggaatgtatggaatttgcggaaagcatgagagatgatccggaaggcatgaaagatccggagaatccggcagaaagcatggatctgcaagagaaggaagatttcgaaggtgaactcttggatgatgattccgaatattgtgtgctgtacacacaggtgtccgagccagaatctccccggtcacctttgtcaacaatttcgcaggattttctcaacaacgatgaaccagccacgtcatcagcgggaccgtcaaaatctccatcaacattcggtgaaccatcagctactccatcaacttcgaagacacgagccaaatttgctccacctaaacgcggaaaaaagaacattcaagaacgattgttggatttggcggagaaggagaatgagaaatttgaaaccttcatgtcagaaagcttggcatatgatcagcaaataattgagcagatgagacagaataatgaactactcaagaaagttatcgaaaagatgtaatttcaggtttaaagacaggtgttcgaaagaaaataggtcggaaggacaaaaggtcgaaacttaaatgcctcattaaaattcttcctcatttcttaatatgctttcatccttttgtacctcttttttttgctttttgaccttttgtcctcttgacgatttatatttctgccgtttgttgttttggcctttcgtgtaatattcgttattcgattttggttaattcaatcattcacattatttttaagtatactataatgataaaatcattatatttcaatatgtattcaaactaaatcgttcgctgaataagttgttgaattgttgtttgatttgaatgatttgactatttcattttaatctgtctcaacattgtcaaatagataagaaagagaaaaaatcaactttatgtgtgttgtttttttaataaaagcaagataaataaacaagtgatataatttgatatcaacgaaactatttagaacttattgtaaaagtactctagaagtaagaataaaccagacttacccaaatgttccattagcacacgacgaactgttgtccccgaagaactgtcatttttgactgacaatcctcgctgtggttgcggcttggaaggattcattttcagttcagcaatccatgacttgttaatcttatcatttcgatcgttgcacaggttatgcaggatgcagcatgcctttatgatccgattaacattgttaacatctacttcgagcccacgcccaatctttcggaagcgtgctttaagatgaccgaagacgttttctacgactctccggcatcgtgaaaggatgtagttgaataaacgttcaggttcactttgattcagagcaaatggaaatggtttcataagagtaggagagagtttgaacgccgaatctccaataagaagaataggaacattcactccattaatcatttttgaatactgttgaaaaagtggatgagaatcgtgcaaagatttcaacgatgaattctcaaaaatggttgaatcattggatcgaccgggcactcctacatttatgtatgtgaagcggtatctgtagtcaacggctgcaaataataccaccgaatgccaacctttgaagttgtagtaatcaacagcttccgcttttggcacgttgacctcaatgtgacaaccatctaccgctccatagcactgtgggaacccaagctttaaaaacccgcttgtgatttcattaatcttttcaggtgttggtggatatgacgtaaatgcttcgtcgtggaaggtgtggatgattgcatcacaaacttccagaacaatctctcctacagtagtccggcctaccccaaacaaacttgccactgttctgtattccgcagacgatcccagggcatacaaagcaatggcaatacgtttttctagcggtattgcaaatcgccaatacgtatcctctttcctgaggtagaacaatttggacgccacatagtcaaaggttttgcggtcaatccggaaagtgttcttgaacttagcatccgtatatttgggtacttccacctcccaatatgatgatttctcaacctggaacatcaataaattgccaatcatcgcaaattcattcatatttcaacaataaaaaacacttaccattgaccaaattctacgtgtttttgttggtgctccacaggctgccatttgagcatagaaatttgattttcttttgaagcgcatagccattattttacttttattccgcttttttagcaacatttgtaatttaagattattttcctgaatgatattcagtatcttgatatttcttagtaacattttgaaaaataatctgacttgtttatctcaaataacagaactacagtttgtttaggtcagagctgtcaaacgcaatacaatgtacgagagcaaaatacgtgtgtcaccctcccactgtacgcgtacagcatggtatgaaaatcattgtactggtatcacatgtctgtcagtggtat

SEQ ID NO: 476 - DNA, 2352 bp, Aedes aegypti
atggcaaaagagtgcacgtgtgcagtttatagcccgaattcaatcgatggtaatacgtgcaagaagtgtaatgctggacccgttgctcgaacccagcgagcacagaagaagtgcaattcttccaagtataaagacgcgtcaacttcaccaaaatccaacagtccattgcgtacgctagagccgagaagtccacgtagtcctaaaagtccgaaaagccccagagcggaagcttcgacggatacaaagtttgatttccccggttcccctagaactgaaagtcattataagcgtctatcaacgttgagcattaacaatggtggtaataaaaatatggccaccagtcccatgaaacagcccactccaaagatgagtcctaacaaattgactccggtgaaaagcgacagaatcctggagaaatcgaactcacttggggatagcaaaccgcaaaagatgctgcgaaccactcgaagtttatcaccgcggccaccagtcaagcatcaacattcaataatggtttctgatgaaaatgacattatttcggtgaagctttcaccaaatgaggaattcgatgaaagtagggaaaaatgtaaggagggaaattgcgaagaagctgtaccaatccataaaaaagcgtatagcgaaacaacatctccaaatttgtcagactgtggtagtttacagctagacgatagtaatgttaaaaatcccaacaaccgaagcaccagctgtttgatatatgtgccatcggacccatggactcgtatgtcatcaaggaactcaccagctcctgccagcaagaaagagctcaaggcgaggaagctggaaagtaagtctttcagtaagccgaatttagaatatttagaggactctgacccgtgggtctggcgttccaatattacattggatgaacgaagcataaagaaaaaggggtcgctaccccaccagaccaaatcacttagcagtgctctcagtcgtgacgaactggattcgcggcagtcacgcctatgccagcaacggtccctgaccaaatttgataagactttaaccattccgggaattgatttgcattttgatgctcgcaagaaaattaccagaccaaagttgcagcgctccaaatctccggcattttacgaggaattcttccaaacggaaaaggaaaggccgctcaacaaaaacaaatctatatcctcgttgaagatcgaaaagaacgccagtaactcgaacatcaacggtgccaaatgtacttgctacgaggcaacctccctcaatcgccagcaatccaacaacagcaatcaccataactgtgaccaccaatccgggatccataaatccacaactagcattacctctcccaccagtaaaaagcaaccctcaccgaagctaagttttcctcaatctcccaagccaaagcaaaatcagaagaagcagcatcagcaacaaacgcaaccggaactggtgaaggcctcgcttaccgtactgaatccgaatctactgcagccgcggcacagtttctccaccccatcgcaaaaggacgatgaactgcagctgaacatccggcggttgagcgaacagatgaacaagtacagctcgggcagctactttggtcagactacgcccagcttcatgaccgatacgattccgttggacaaaaagaaagccggtggcagtggagggttaacgtctagtggcccgaatgtcaatggcggttccgccggcgttagcaccgggtcaggtgtcgaatcgaagaaacgggcctcttcgcactcgaagatcaacgatccgatactggagacgcgctgctaaggtgcggggttggtcttgcaattcgcggtttcgtttcctgcgaagagatttcgttgcggaagattcggaagcgacatactcgtggtaagttagctagtcaaaattgtacaaagaaggcgatctacttaggtaacacggaaaagatgttttttcccttcgatatcatgtttgcattgtgtgttagtaagatagttatcatcagctcgtttatcatcactcactgtagtaaagaaatacaattgttgaactaatgtggatagtgcgacgccaatgaatgtagatggttgacaattgatggcgggtagaagaaagagagagagagttgaatgtaactaataatcaaaagcctatggaatgaagcttctgtggtgcgatgtgattgtacaattttaaaattatgatgatatgtgcatgcgaaggtggtgccaaccgggaaagataggtagatgaagaaatgttttaatttgccaaaataattttgtatagttcttgatgtaagttacataaacatgtaaatgacgaatatgtaccaatatagtgtatgaaatg

SEQ ID NO: 477 - DNA, 3698 bp, Aedes aegypti
gtgcagtcggtacggttggaaaaaaaattgtcgaattttagtgagcatttttccgcttgttttgttaggaaaatggatgattacaagcaaatagtgagtaaacatagcattttagcaactgctagtgcaattcaaaagtgcatcaaatcgatcaacgacaagcaatcgaaatctaacgtgaaaaccaatgagctggagctgttgaaaagcttggtgaaatcggataatccaagaacggcgcaattggcggttcaggccctggtgcaactggtgtccagtggatcgctggatctcggtcagacgttgggaattttggttacgacgttagccaattcatcatcggcccatttcaatgcaatcgggtatggtatgtttgagctgctgttgctggatcttaggcgccgctgttctgccctgggggaagatccttatgtgtgccagttcgatctgaagccaccgcaacatcctctgatattactgctgagcaaccgggatgtggtgaaggtactggctttcagcaacaaggttaacgaaatttgtcatcaccacgaccagatcatacgtaaaaacagcgtggagttcttgaggcccgtctttctacatgtattcaacaatcctacactattcccggaaacccaaaaaatgtggcgtgccttgctgaaaagtgcctcgaatgatgacacagccgtgaagatgatttacgagattatatcctggagtaaaacatcgaccagcgaaaaatgtctttatacaaacaacttgctgctcgaagtactggattatgtcccggccgagaagcgattcgaatggctgcgaagggacatctgcttgtacatcgctgccgtcagtaaggaactgatcggatacaactatgacccatcggaaaactttttaaagattttctctgccctccatgtcgacaaagatcatgcatcggttaactacaatagtgtcctgctgatggtattgtcagacgtaatgcaaaacattgccccggctcatattcttggattgatgagaatcgtacatttcctgttagaatctggatgcaatcgtttgagccaacttatgatcatggatggagcagttcaatttcttggacagcagacattcattcataattaccttgaggattgcaactgtgttctcaacgctgtcctggacaactcatacccagcagaagttcccaccttgttcgagatgcgtccggctagctatttccattcggacattgcaaaatacagccatttctgtatgtggtggaacgatgtggaaaaccggattttaactatagatcagttccttgaggcactatcccgtacatccaggttcagcgacaaagtaaacctggttctcagagggctcatgtatacgcacgagatcccattcgaagattggagaaaacttttcgatcaactcgttatctgctctaaatcaaacgaagaaatctgctccaggctgctaacaccaattctcttcttactggccaacgatagcaatcctcgtaaacggcttcatctgctaagaagtctggcctcgatgggtgccaaagaccacgtgctgcgagtgctgaaagcattgaccaaagatgtggaccgggccaccagtttggatttgtaccttcggctgtggaaagctgaacctcggacttatccatttttgtacgacgtgctcaaggataccagtcgcaggccaagggaggattcctgggagacatcattcgcccgaacgtacacgattcgagaaatttgcttgatcaaaccacaacagcacggagcagatctggtaaatttgttctccgaaatccttagccacccagaggatgctaacaatgaagctgctgtagcgttggccatcgatgctattgccagcctttgtgagaatcacgtaattaacattgtgtccacctggaaagtgctcggttttaagttcactcacgagaaacgcccacgaatcattcaaagcctgtgcagatttttcgccaacgtgccttccatcaaagttaactcacttgagcaagaacgactggtcaatgaaatcattctcaagctgtggcagtttgtaacggatttcgatgaccgtgaagtgattgtcgcggccctggattcgttgaaatcattttctcctgatatgatgaacatatttcaaatacctgaattttttcggcaaggaattcctcttccaagtgaggatgacgaatctttagatgctaagatgatcccaggcgattgttggattcaattaattcactttgttaatcattccgctattgaagcagctggagatttggtttcgcatcatatacataatgaaatgcagtcataccgcggagggatctatctcaatccagaagggcgaccagaaccatcgtctttgaaacatttgcccaagagaagtatccttgctgcggtaatacatcacttaattagccatggtggcaaaatgaattccgcagataccaccgatatagttctctataacctcttgagaattgtggccaaaaagtatcccaagcccattccacctctgaattggtgcttcttgcatgaatattttcaccattgctacgaaagtaagaaatactgtctccagatagctatcaagcaaatgccacactcaggaactgccaagcggattgtggaaaacttcctcagtgacgccgtgcaaaccgacatggaggtcgaagatgtgctggtcgttctggaatatctggatgtgctgacagaatacgtgcaaagcgatatctacaaaagatttctgcatatgtcgttacaatttttgcttgaaaaatctgaggaacacggagccaataccggaagcccattcgttgaaactgtgcagcatttgaaaaatgctgttactaaaaaatcctatcagaatgaggacaacttcgattatctatgtgaagctttggaaaatttgtttagtcgttttagcatcaacaccaagctatttgacgaatacctcaaggtcttgagtgtgctgccttccaaacatttgacgtcacttttgaaaccaagcacgtggatcgacaaacgtaatcaaaccaagctagaaaaggcaatcgttttacagttttccattcataagcacaatccaattgccactgatctacatctcttcggattgagtgacattctgaaaaccatcggctcgtttgagacaaacatgcaaaactattttttgcgttctttcttcgactttgtgcctcagctagaaaaccacaaagctctgaacggatggataattgagcttatcggctatatccagtcggatctagcggaagtgaatacacttcaaatgaaggaggttgcccttttgttggatgtgttcctcacagctgtgatcagtttgtcaggctacggagcgctgttcggcaaagccattgtggaagacttagacaagcgacttttcgtatttccgtcgagcctcatcatggtgtttcaaatgaatatgtggagggaaattgaaaataagatttatgaatttctctatcatctatacaaccaccccaacatttcgacaccttatgcggaatgcttaaagaatgctctactatgctgcaaggagcaatcatatctgcagcaaccgaaagcgtggccgaaattcgtttcattacgaagactgtaagtacatacatttttagttaaattttgtttctttacgtagttcatgcaaacaagactgttgcactacgg

SEQ ID NO: 478 - DNA, 978 bp, Aedes aegypti
atgcagattggatggattgggaacggatgcgagatgggttctgcagtttcaattactcgttcagcttcgtctgaagtagataaggtctacacttccgttcacatcaccaacctagatgttccgcgaacttacatccttgagcgggaggagtttctcaatgctttctctgtaggacatcggcatccgttggttcatattgaatccgaatcggatgatgatgatagcagtagcagtagcagcagtacagcgacacccaccattgcctatacaaactacactgccacgagtaacatcagtagtaatagtaatgaaggaaaaagttttcacgagatcaaaccactgataatggactgccagtacgagatcaaggctaacgagtgcggttttgtgctgaaatggtactttaataggaagttaatttaccaatggataccggcgcggaatcccgtcggaatgaaccaattcaaaagtgaattgaggaccaattactcgatgtcggacctggctaactacaagtaccgagccctggtgatacagaacccgaagctgaaccatagtggagagtacatgtgctcggtgcaaacgtatgaatcgttcgaccggaaggcagcccgattccaaatcgttgtgccggagaagaggcttctacttcactacgaaaacgatgctgaaaaagagaacatgctgttgataaagtgcagtgtttttatgatctatcctgaaccgaatctggtactagtggtgagcggtgatttgctcctggttagctcacggactgtggtcgtctcggatcgacatcgcatgtacaacaaaaccatttacggtttgatcgacaaacatttgctcatatcgcccacctcaatagggtgcgtcctcacggtttccggatccagctatgtacgaaagcgcgaaacaatttattacggtaagcttatacgaacagcaatctctcctcatctacaacactatacctattga

SEQ ID NO: 479 - DNA, 2106 bp, Aedes aegypti
atggtgggctatttgaatttgatcgctgtatcgtcatcacctccagatagcaccttaggggaagcgaagtcaccggagaagacaggcggtggaacaacgtcagggatctccgccagatcgatcgacaagtttgaagccaatgagctacctgagggtgatagcaagatcattaaattagcgataaagcagattgagcctcaggtcacatccggctccagaggtgccaggaacctgggcttctcggctgatgcctcgttgaatgcaattcctggaggtttgaataacgagttgacaaatggggacttcaaagttcctgttaccccagcatcgaccgtagctaaagatagctatggtaatcccgttactccttatgcagatctaggctcgacaggactggactccgccggattcatcccagatatcaatagggacacactacagggattcagcaacaacaacaaccaatacagtcatttgaacttcaaattacctagttatgcttctggcattattgaacctgtactgcttccgccgatcgcgtccggaaattttcaaccaccgcaaggccaatcgcaatttcccttccaccaaacaacaacaaaagctcctacaactgcattccagtttgtatctaacgccaaaatcccttctgtagatgatggtcagattcttttcgctcaaaaaccgttaaatggactgatccccccacttttcccgggagaacaactgccggtgtataaagtcgaagtcggaaccgaacgttcgcccatatttgtgaaggacccattttcatcgccttcattagataaagggcttactctgccttatgacaaaccacctgttaacttcaatcaaggctcaccgcaaaactcccaagttccacttcaggtacctctatccttagaacctttaccaccgcaacaagcccacactcctcaatatcatcaaactcctcaacaacctcagttccatccttcgactcaatcccatcaacctcctcagcagccgcagttcaaaccaacacaagctcctgttcaaaagtatactggatcattcggtggcgcacctggacttctcggaaatcagcaaaacctcggaactgcttatacctcaactccaaaaccagcacaaccccaagctccacagacctatccaactcctcctcctactcatttcatccctactgtatctcagacagccactccaaccaaagcccctaacaaatttactggcagttttggaggtgcaccagggttccttggtaatcaacaaaacctcggtacggcttacacttccactcctaaacccactcaacaaggcgtccctcaagctccttcatcccaatcaacaaccaatttctctccagttatccaccactccaatcccactcaagcccccaacaagttcaccggtagctttggtggagcccctggcttccttggtaaccagcagaatcttggcactgcctacaaacccacaactcccatcccgacaactcaacagagacccatgtcgttccatcccccaccaccacctcctccgtcctcagcaccactgtacccacaaactcaagtacccagcatcatccgccctccaagtcccttccaacctcctccacagcagcaacagcaccgacccggtcaatacgtcgggaacaaattcagcggaagtttcggaggtgccccagggttactgggtaaccagcagaaaccgggaactcacgtgaaacccgatggctctattctgcctccgtccggaccgggtattacgggaccaagctcaacggctgctgttggttcgactgttcataggcctgcggcacctagcagcggcagtacatttaccggaagcttcggaggtccaccgggtgttctgcgtccgttcgataatgttaaaggataggatgggaggcgaagccaagaggggacaaaatgaggttaccgagaaagtattcgaatacgcaacagtgagcagtagttagatcatatgcatacgaatgtattttaagtttaggattaagtaaatttctaagaatatatcagaataattatgcatttagaatggatacgatttatggaatgcaataaattatgttcaaaactgata

SEQ ID NO: 480 - DNA, 1348 bp, Aedes aegypti
agtatcgctcaaaccaaccagttgcgtgatttgttttgcttctttagatcgctctctcctgagccaaccagacaacaacgtctatctacgtatttttttgttgtgttcttttgtagcttctgaggttctaagagcgtgtctatcgtccagtcagtattccttgtttaattggctagtatggtgattcaaagttcatacgttcggcggctacaactgatcgccagtggcatcgcactaagacactcatcgccccttgttgcacaaagctggagaaactacttgggacttggatcgcgacaaccagaactacaaaggtgcaatcacgtcatctctagactgcaggcactagtgcaacgcaccactaaaattagaagccccatcgaagcaaaatcgtccggtaccgcaaaatcgactactgctaccgtaggagttggctttcttgcgtcgttttcgttgttttcgtccggtaaagcgaagaaagattccaccaccgagaaggaagccggtgagaaaatggccgaaatggaagcaaccaagagcctgagcgagaccattcaacactcggatcagctgttcgacgagaacaacttccaggaggcttacgacttgctaatgaaaagttcgaatcctgaagcgtacgaaatcaaatggcgcattgctcgtgcacttttcaacctctcgaaaagcactcccagccccaagaaggaggaaatggtccgcgaaagcttccagttcgcgacggaagccctagcgctgaatgacaacgacttcgccgcgcacaagtggtactcgatcctgttggatgccaagagtgggctggacggtatcaaggaacgcgtcacacagttggagaacgtcaagaagcacatgaagcgtgcgctggagttgaaccccacggacgcaacaagctggtacatcctgggtcaattttactacggattggccgacctgccgtggtatcagaggaaaattgtggccacaatttttgccaccccaccagagggaagttatgaagaggccctggagtgcttcgaaaaggcagagcaaaccaagccaaatttctactcgatgaatcatctgatgttgggcagaacgtatcaagctctcaagaacaacggaaaagcgaaagagtttctcacgctggctgcaaacgtgacggtattgaacgaagacgataagcaagcaaaggaggaggcggcaaaattgttgaagaaattgtagaagaaagggtgggactggatcatggatggagggtttttgcaagtcatgacaccatgtaatattttgtattttttgttatcgatattattatgtgaaaaaagtaataaatagatttctggtatgatcg

SEQ ID NO: 481 - DNA, 183 bp, Aedes aegypti
atgccaccaacttgtatccgttgtacgttcctcccaagacgaacctacatctggatggcaaaccggccttggcatcgtataccgctgggcaacgcccacctacacaaaaatctcaataatccacacgcaacgaagtttatttttttcacatgttcatacacgttttgtgttgtgtttacgtaa

SEQ ID NO: 482 - DNA, 441 bp, Aedes aegypti
agtctactgggcgtgtgcgcagctgcacgcgaagaactgccgagcgaggatcaccacccggaccgacagcacgaagataacgtacaacctccggccgcatactcatccgccggaactatagcgcccaatttccgaatctcggtcaaagaggagttccgcatacagccaccggatgacgaactcctcgagccaataacgggcgtacagtatccgctggacgtgagaactgtactggacaaccgaggacggcccgttctgctcgtggatgggcacgccttctcccggaacaacatcggcaagacgcaaacctattggctttgttcgaagaaccgggcgctgaaatgctgcgcccgggtgaccacccggagcgacagtgccggagtgattttcacgaatccgtatcataatcatcccccgcttcgctatcggagtgggtcgtaa

SEQ ID NO: 483 - DNA, 1294 bp, Aedes aegypti
aatgtccttttagtagaggctcagtgcacagcttaaacgatgaccgactccgatgggataccaccgccgcagccggagaatcccttctccggaatgcacatcgacgatacggccttcttgaaggaagtcgaaggtcgcagctcgtgtaccgtttgtgggaagtcgaggaagttcttctgctaccattgctatgttccggtggctgaattgcgggacaagctgcggttcgttcagctgccgatcaaagtcgacatcatcaagcacaggaacgaaatcgaaggcaaaagcacggccatccatgcggcgatccttgcccccgaggacgtcaaaatctacacctacccggacattccggattaccgggatgaagaaggggtggttctgatattccccacgccggatgccctaaccgtggccagtttatgcagtggggagctcccgaagataaaggacaactatggacttccgaaggggcatcacatcgggacgttgcttcgctgtcggctcacggacatagtttcggaagaagcgccctccagggcggacgaaacgaagaagcaacagcttgcacaaagattgccggtcaagaaggcggtattcatcgacagcacctggagtcagtgccggggaatctacaaagacgggagggttgcctgcctgcggacggtggtcatccagaaccggatctcacagttctggcgacaccagaagaacagtccccggtggttcctggccaccgtggaagccgttcatcagttcctgatagaactgcacataaacgccttcgggttggactcgcgataccaagggctgaagcatttggggtatctaaacttcccccatgacaagctggtgcaatgggaggatggcctggaaaatggccaagcctccccatataacggtcagtatgataatttgcttttcttcttcctacacatgtacaacttgatacatgattattacgagcatcatactctgcgcgcctaccggaggccactgttcctggaggataagtatcagcagcaacagctgaagaagcagcaggaacaaaccgctgaaagcctaacgacgtaaatctggatgtgatttttgattaataaagttgaatgtcgatatctctttaagtttccattagtgtttaattcttatccaaaacgtacggtcttataaactatttctttttcttcttcgcggactcggtttccgttccggcggcagtcggttgcggttctgggcggggcttctgccagttcaatggcttgcggcgataaatcggccatggtggaatggtaag

SEQ ID NO: 484 - DNA, 1750 bp, Aedes aegypti
cgtcagtcgtccatcgccagccagagtcgaagtggattttgtttggatcggatcgttgttatgtttccagttttccggtgaaaattcgtgcaaaaattgtgaaaatcgttccgcgaaataatgtgaagtgcggttccggtggtgaggtagctaaatctatccgataattgagtcggcgtagcttcgaacgaacgctccagcgctttttgtcggcgtgcatttcgattttcctcttgcagctgctgctgtttttggtttactgcttcggttcagctgctaggaagatgtccaccgaagaaaatgtgaaatcgttgagggaaataaccggattgaagccggaacaggcagccaatctgttgacggcttacaatggtaatctggagggcgctatcaatgccttttttgagaatccggaaggagttttgaatccagaaccaccggttgtaatcaacgatgatgaagaagaggaagtacgggcaccgattccgagaaagactgaagttttgctaccggccgaagatacaaccagagggcgattgaaacggcgaggggccacaatcaccgaagtaccatttagaaactttgagctcgaagggaagctacaagaacagatgctaatgcaagggcagggtccctcctcgaagaaaattacccgattggaggctctgttcatgccgccgttcgaaatacttttttcaggcagttttgatatggctcagaggcatggaaaaagcgttgacaaatggattctggtcaatttgcaagacgatctgaacttcagctgtcaaacgttgaacagggatctatggtctgattcgcgattaaaagatttccttagaaacaatctaattttctggcagacgtccaacaagacgacagatggagccaagtttaaaacattctacaaagtcagcagcgaaccatatattgggatgattgatcctcgaaccggtgaagaagtgcgaacattttcagttagcgacgtaaatccggttaaattcctatcttcgctgaagtcctttctcacagaaaataaatctccccatggaaaggaggtgaaattcgtagaatccagttttatgcgtccatcgacttcgcaggcttcttcaagtggcgcaaatggttccaaagcccccagctccagtaaagccatttggattccggatgaggacgaggaagagttccaggagattactgatagcagcgatagcgacttggaaccggatactcctacatcaaaatctccctcgaagcaggcgacaatccccacagaaacgcctagctctccgatcctcagctcagatgacgagacaaaccttccgccggcggaaaaaactcgtatcatgctcaaaatgccgggcgacgtcaccgagcggttgttcttccgcagttcccgaaccttggatcacacgaaagcgaagctaatgaacaaattcaccagcaagtttgccgaccagaaagggaaatcggttcggttcttctgcccggcggtcaaaacagatcttgcgtcgctcgacggaagtcaaacgctgctcgacttgaagatccacccgaatgcggtcatacacgtgacggtagatgactgaatatgttacgcgttccggtatggtgttgatcttattaattctaatatgttttatctcgtaagaccagtcgtcgccgcagtcttttccgctgatgcatgaagggcaatgactaggattgaattttagtttctgagaagccaataaattactcaaacgtatgtgga

SEQ ID NO: 485 - DNA, 567 bp, Aedes aegypti
atggcttttgagttcattctattcgcaagtctgttagttgctgtgagagcaggattttctcatcaaacaattagtcagcgcgtgccatcttcctactactctgggagaccctatgccgtagaagaatccgggaaaccaatatacataggcaatgatgaaatcatcaagcaccaacatgaagcccaccgactggatatgacccgtggtcaataccgtttagttgatccggatggcaaacttcgacttatcaactatcacggagctcaacgtgcccgctcaaataataatattcatcatagggctgttgaaccccgtcagtattacaaaagaccagtccaagcttcaaatcttcacacagtgccggtcgaaacccctgtcatcttacgtcgccaggcttcagcaccgataggagctcgtattttaaaatctcactccattccaaaatctagtagatcccaaagtgatattcccgtgtcttacgtcagcatttcgcaggtgctacccactggaaactatggtcagaaggagcttcgcacgaccagccatgccagtcaacatccgtactaa

SEQ ID NO: 486 - DNA, 925 bp, Aedes aegypti
caacaacaaaacatctgcggcatttaaattacagtttctgatgctggaaacaaaaggataaaattacaaaagattttattgaaactaaacaaaaagtttaagcaatcctcacggtcaagaagttcaatcgcagatagcctttgtcggataagtaatctggagttaacaaattaaggatggcgacaaaacgagccttcaacattctcgagcaacggaacgtcaacgaaaatgcccacattggcaaaacgccattgccgggcaaaaatgtctcccgagccccgttcaaaagcgccctcaaggatttgaccaacagcagcgcggcgtcgcggtcaaatttaaccggaaaaccgtccgagggaggagcagcttcgctcaaaaagccttcccagcagcagaagtcctttgcttcgacgatttcgcgaaagaaatcgtccgaaagtaacattcccgcccaatcgattggctccaaaaagcaaaatgtcacggcgccgttgtttcccattttcagtccactggatgcggaatacagctggggcaaagaagcttgcctccgggaggatttgctggagcagatgatcgagtacaatggtcccacttaccggcgggagattaagcccatgaaggcgcttaaaattgagccactggaactgccggaacttgaaatgccgcgtccggaggtggcaaagcgtaacagagcaaccgtaaaagagaccttcccgtccagttttctcttcggtctgcaggaggtggacattccggatttggaatttctgttctagtcaccgaagggtggtgacgcaggtatatttttgattctattttagacgaataagctttctgtataatatttaaatctcaatttctatttgtattagttgttctatgataattgtccaatacaaaatgactgaccataaaaggacga

SEQ ID NO: 487 - DNA, 2047 bp, Aedes aegypti
atgggttgtgcgagcagttcaccgctaatcaacggtggtggccccggtggcatcgtggaaacggcaaaggaaacagccagcaagactgcgaacgaggttctgcatgccggagaaactgcaattctcgatgttggagagcacatgaaagatgcagtgaaaaacgtggccagcgaaatcgaaggagtactaggaggaaagacggcaaacaaagacaagagcgaccacgtaaacgaaagcgatcttccccaactgaacggtcacgacaaggacggctcggactatcaaatcattcctttgaaagacccgaaacaacccggcgtcgatgagagcttagagaacatgaaaaataatcttctgaaaaaggcacaaagcttcagcgacgatacggagaaaatggccgacgacattatgaaggaaacggaagatctgattcgggacgcagaaaccggcattgcagatcaggggaaggaaatgctgacacgaataacctcctccgatgatggtacgattgaaattctcaacttagaagaaccggaaatcgaacggatactggacaacgacccgcaatgccccccaacgccggaagccaccatttacagtttggtatcgtcgtcggatggtgctgctaccgagtccgaagccgtagattctgcggcaacagttatcgaacaggtgaaaccggatcccggtcatgacgaaagcaagcgagaagcaatcgaacggtgtagtagtaatgactccgagaacgtcgatagcgtcgagattgctgacaattatgacggtagttttgaaaccgataatatacttcctccggaacaacaacatccagaagctataacaaatgccttcgagcgagatgcgagcgttctttcgccggatggggatgaagctctacaggatgcattgttgaacgagctggaagacgatattcaacagtatgaggcggaacagcagcgacaaaacagaattcatcatttttctttcaagctgaattcagcagcgctcagtatcatcgaagaaagaactgacgacgacagcagtgtcaatcaacaatcaccagagagggctgccatggaagaaagtacgattcaaaagctcactaatttggagggagatgaagaaatacaccaggaaggtgaagtggctttcccagtcgactctgaaggaaatgaagctttagaaaatgtccaagatgatgaagttactgatgaaaatccagttccagttgatgatgaagatgattccagtgagcgcagtttaaaaggcttcgaagacgttgaacagttgctgaatatgatgccaccggtaacgaggttaagaacgctaacacgatttcgatcattcgattacccaagaggcggaattgaagatgatgaggaaagcgacgaagaacacgaggaacaaataaaaaatccaccgaagaaattcaacctgaaagactttaaaggtaaaatgcaatcagagagtaaattgaacatttcagaaggagacgacgacgagggtggagaagacgtagacgagaatgaggaggccgggaacgatgatacttgtgtgcctgatgagccggaagaaaacttcgatttggaagcagccatcgacgaggtgctgacggaaacatctcccgaggtgcagaaaacgaaatggaaaatgctcatacgtaccttgcgcaagattccctatcgagccaattcattcgatttatttagtgaaaacgatgaggatgtcctggagattttatttgagcaaagaagaaaggaaatgtttacgaacgctgacggagagtcgaacgaatccgtagacgattcgtaaatgttgcacttgcagcgtgcagggcaatgaacattgaaaggtttcacgctttttattttcttttgttgaatcggccattccaacaagtacacgtatttacacaacattgagtattccacaaaaaaccgattcaggtcgcaacattgactgtttattgtgtgttgtaaaaataatgtatacaataattaatagtaatatctccaataaacggaaaaagtaataactcagaaaaaaaaaa

SEQ ID NO: 488 - DNA, 479 bp, Aedes aegypti
gcttcacaccccgttcagctaatcagcaactacaacgacaatgaatgcaatgcaaatcagtttcctggtgatcgctgtcatggccgtcggagcctttgccgtgccgtttgatttcttccaggtgtccggatttgatgagtcaaacaaccagcagaatttcgaagatgctccaagcagcgttgaccagtcgcgggatgccccagttgaaccggaacgcgatatccgcattgaatttgaaccggaccaacaggaggaagttcggcggggagctgctatcgaagaagtgctgaaccgagacgatgccgcccaaaactcggcccatgaggattccagctcgtcggcggtgatgtccatcagtcagcggagaattgctgtggactcagttcattagggatgagagataagctttttttttttttaattttggatcttgtagtcgatgctttagacaggtgagaataaacaatattgtttggccc

SEQ ID NO: 489 - DNA, 2170 bp, Aedes aegypti
gaggaggtgaaaaaccataccgtgaaatggcgacaaaagttcgagtttccctgcaagatgacatcgaatgcgtccaccggagtgctggatccctgcacggtgcggatatcgatacgcaaggagatcaaagggggtaggagttttcagaaactagggtttatcgatctaaatttagccgaatttgcgggttccggcctgacgtctaggaaatgtctcctggagggatacgatacccggcatcggcaggataactctatgctgaacgtgtcgttaagaatgcacatgattcagggtgatattttgttcaaagttccttcgccaagcccaaagtcgaaagcgcttccccaggaaaacctcggacttggcctgcagccacccgcgtctgtcgtgggccctcctgcggtggtagccccagcagtgactgccaatcgcgtatcaaccaaagatgattcatcgatagcgtccggatcgtccggattcgactcgctgaccaagaagaaaaccccactgtttgccacttcgggtaagctattaaattataacaatcaatcccttctaccattatttctaaccgattccggtatttccgaatcttccgagccgccatcgtccctgctggacacgtcggttgcgtcccaggcgacgcttccttcgcatctcgggaccaacagcaacgcgcagtctgtcgtgggcaatgccgtgggctcaacgaatacggtgactagcacggccacagccgcaggaacggttccgggtggtatcgaaatgggtcattcccgtaactccagtaacactagtcaaatgtccaaaggatccggttacagtagtttttctcacagtcaacactcgaggcaaagctccgagggcgactctggacatcaaaggtaggtcacttgtcgttgaaattccattcatcccccgtaccttgacactgcaaaaaaacttctctccctagacactgtgcaaattggtattccgtttttctttttcgtttggtttttcgtcttctttcgttttatatcttatcatgtatagtttcgtcccacgtttacaatttcttctgtctttcacgagtttcgtttggtttttgtctagaaaaaaaaaatgtttctgctccgctattttgaatctcgttcggctgacatacaaatggcatttaagtagggaaaaagtatctctatattgtcgcctcatgcgatgctgataatctgcgacgctgcttctcgcagctgataaacttgcatatatatataaatcgctattcgtagaatgactttagaattgctgttgctaaataatctggtattcatcgctggcaaaggaagttcatctcatctaacagcgctgcctaacaaggttggtctgcgccgtaaacaaacgaccatctttattgaacgtcgacaaaatataggatatattaaaagtgtcaaataaattaagaaaagtttagaagacgtccttagttccgatctcttttcgctatactccaatggtaatacaagttattcactcaatttaggcgaaaccataagaaaagcggaaaattatccttttcccattgatgccccataatccttctcctcactactgtcgctttgagtgtttactttattttgatcttctactcctcttcatcgacaaaagataattcattcgtatattcacattcttcaaattcttaacatgtgtgtttgattgagttttattacaataactgaacgatactaacttgaagcacacaactaatatatcactatcatgaacataaatccgaaacgctagtaacctacggttgaacaggctgttctataatgtcgtatgctttcctgggttttagagttttgcgaattgtgcgattgatgaagtctgtatttcgcagacgaaatagacctgtagtaaccaaaaatatcaacaatcttcaaatatatactgtagtaacaaagttgaaaggaattatcccttctcttaccagtattgtgtatttatttcgaagtatttttttcttcttcaagtgagtgataaagtaaatagaagtgttcaaattcaaatagtgttcttatttcttattaaagattttgttcatataagctgaaacgattgcaatcacggcaaaaatcatccggccaagactttacagtcagttggaaagtgagggaatgttagtgtgtaa

SEQ ID NO: 490 - DNA, 928 bp, Aedes aegypti
ctgctggtgttatctctccttgtggcagtcattaaattaatatttcgcgcaaagaatgttcgcaatttataattgcctagtagtgttatcgacctaacgagtggccgctaagagaatttgtttggaccgcaagcaaaagtgcgctcccccaagatggagtgtgatgacgctgccgtcgagaggcagaaactcgtttcgaacgacgaggaagacgaccaagcaacaatcaccaatttgtcctccagcggccaggcaaaatccattcaaacgccaatctcgcccgtgcttagtaataagatattctccagcggcgaaacaactcgcagtcacaattccactagctatccggccagcctcggaaagacggagaagagcgatgccgctcccgcggccaggctcaattacgtcaacgagcggaagagccaggaagccaaggccaaacaaaagaaggttcaaagagaagtgccggacgtgcgacacatggaacgggccctgctcgggctgctcgaggacttccactcgggcaaactgaaagcgtttgggtcgggctgcacgatggaacagatgacgagcattcgggaacagcaggaaagcctggcgaagctgcacttcgatttgggcaatgaggcgtccctcagtgccaacgccggcaacaacgaagctcaatcgcaaaatggcatgcgaaaactggtggccaagctggagcagctctcattctcgatcgagaaactccactcgagcaaagtggagcagtgactcatttaggcggtagtttggaatgctttaagcggtaggtatgcatcaatgagtagatgtaggaacctttctaggagtcatgacattcgtgtttttccaatttgttcgaataatttaatttatgtaccttcctatgttgataaatgtgatttggtaataaaacatcatttga

SEQ ID NO: 491 - DNA, 192 bp, Aedes aegypti
atgaaggttcttgacgaattgaagtgccgaaagttagccgcatccaacatccaacgcaaccagtgcatcgattgtcacgaccttttctgttcaagaaaacatcctgcatccggcaagtgttcctcccctgatgaatccaaaataggacaagcggaatcaatcctggagtcacatcctggcatgtgcttgtga

SEQ ID NO: 492 - DNA, 237 bp, Aedes aegypti
cacgctttcttcgtcatcgtttgtttgtctgtcgacgacgactccgaaaacgtcaccggtgactggttcactgatctcctcgccgtcggctcaaaaagcgtttatcagggtggaattccagcaactgaagtggtatcacgcatcgcgagatatcatcatcttggcgcgcattttgtgagcaaacaagagaaggaagcgcccgcagtctttgatccagtttgctgcggaaagctgtga

SEQ ID NO: 493 - DNA, 2452 bp, Aedes aegypti
atgaaatttcacaactacagcagtccgccagagaaagtgaagacacgatccgtcagttcatcatcggagcaagagtccacacttctccagcaagccacggagcagaagcagaagcaaataccttccggtcagcagcagatcagcctgaagaagaaaattacgcctcagcaactgctcgagctgcagcagcagcgcgaaccactggccaagcgactccgcatcgacgagtctgtccccgtcgaggtggaacagcaacagccccacgaggaggaggaggtggaggaggaagaactcgacacatcggccacggaatcggaaacggaaatggatcagagcacggataatgaaatgataatctcacacccctcgcagcggttagacgccaatgcgttgaaggcaaaggccaccacgacggcaatggtcgtgacgacagacgattccgactatggacccaacgacaaacacgaacagaagaaagtcaagcggaaaatagtcagtaaaccctgcaacaacaacacatcgacaaaagcgaaacttcagatggtgcatgagtttcccacattgttcctgggactgaggcgcaatcgaattttcctggtgaactcgctggctcaaacgttcgacctcaatcagcgagatatcatcctgacgttgcgaaaaatcaaactaaacgaacacaatgctcggttagcgagcgtctttggactgactgacagtgaggtggacatcctgttccgtacgagtgtgcctaaaatagccgactgtttgcgaaatttcattgtgtggccggacgatgtcaccatgaagctcaacgttcccatctacctgcgtcaacacttcaacaaaatccacctgatcctgaactatcttgtggtgaaggtgaggcaaaacgccgtcaaatttctctctcaggcacagtcggaaacgtcctattgcgagggggaccagtgtcacaaactcaaatatctagttgcctccaccctggatggttgcgtgtgttttgtgtcgcgaggtttcggcatccaaacggacgacgaagccgtcctggcgcagtctggcttcctcaccaagttcaaaaccaacacaaacctcattgccggcaaaaatttccacaacttcgaagatcgcctgaccaacgggaacgatcacgatcacgaaaataacaacggcggaggcggcggtggcgaatccgacctggaacggacaatgaccaccaacgaagaggatgacaactttggcgaaatcgtgtcggagaaaatcagcaaaagccggacgttcaagctgaaaaactacatcgaaagtgtgctggaaagcttccagggacacatgatcctgtcgccgatgacgtgcgtagatgtgcggtcgttggaactgctagacgatattgtggtgatcgtcggggcgctcatcaacctgcagaagcaggaagtggaatagagaatgtacgtgcatccgtgcgcgtatttgtttgtgtgttcagaagatccatatcggccggattgtctctttttggcgcgcttgcccatgctctttttctcctgtacgattagtgcttttactttgttgacgatttctgttctttacgggaatttttttctatttccggtatccttcggagttggagtggcagaagggcccccgatgagggatacccaaaccatcagttatgtggttcgaatgcgctaggccgtattgtagataatttattataattattattattatcattgatgtaaggttaacgcgtagtaataacaaaaaaataaaagtttactaatgaagtctaaggaccggcaacagatttatggaaaggacgagttgaagcaactgaatcgctatactacagttaaactgctttcatagtttgagtaggactgggaagagaacacacggaagttgattggacagagagagagagtaggttctcttatgggatgcttcatgctttgaaattactgaaattatttcctgtttttcctgacatctcattattacgtaatgaatggtagcctttgaaattagtttttgtttcgacttgatcagacgtaacttttctgacatgacagatgaacgtaatttgcgcacgtaactgtaaaatatttacatttaaatttaccttcactggtacttttccatgttttacaaatgtacacaatttcttgattaagatcttcaataaatacaagtttgcttccattacttcatgttaacttaacagaaaatttgtgaatttcctatccgcttttcttaaaaaacatgcaaaaggttcctaccagagcccttacgattcgtgtgtattgtatcatgaaaaaaatcactgttgtatccttctttatccttgcgttttgaggcagagtatatttctcagtttactcttccttccataaaactttctttcaggatgtaactcgtacttcgcatcatgattaacttttgatgcgttggtggagag

SEQ ID NO: 494 - DNA, 2089 bp, Aedes aegypti
gacaatcgaaaaatgtgttccagtgtttagctttgtgctacgactatttgtatcgcgattccggaggtaaatttccgaaatttcgtcccttcccttcggcacatcatggctagcagctcccagatcccgttggctcagcttcagcctgttttcaaggaaatcgtcgaacacattttcaatcgctggaccgctcttcgactggcggtagaacatggcatgggaggaccgctgggattgaatactgcaatagaaattattaattatattacctgttactgtacggaaaataaaaaagtcgattcctacgacctgcgggaagttatggaagaaatcatggaccaggaattcgaaaccatttgtgaagatgagtccgttgatgaaatcagcgatctcctggtcaaatacctgaacatgttgaaggaaaacaaagaagaccaggtgaggctggaattagctcgaatgggtccgtgcgagatttggatcaagtcaggaaatagaataaaaatgcaatcgatggacgacagcagcggaaccgatgctgatgatgatgacatggatcaggatcaagatatggatatggagtcaacgccacccgcgacaagatcagatatgaatccctcccctagtacgcaaggttcaacgacacagtttctcgaggaagatgtagatccgggatggacacaggttcgcggtaggcgaagaagataaaacattgaatggggaataataatgcgtggctggaaaatcaatttcgtaaggattgtgtgttcggatgacgacctgtaatatatttctacctactcgtaacttacttctcatcgtcaaagctactaatgttccaatcggagtcttcctccgcttttgaaacttgaatcacggtggaagacagcttagggcctatctctttagtcacgttcaacgtggattccgccttttcgaccgccccaccagcgttatctcgatccaaattgaataggacacgttttttgggtatcggcttcggttgcagcggaacggcttccaagatgtcacttaggtcggaatcgttttcgatcgcacgtcgactgctttccacggtgatcacatccggagaggttgatagacgtttgatgggggtgtctagcaggcgttccacatgtcggtcgtggtctgacactgatggacgtggagaggttctagctgaaggaacaggacttcgcgataaggtttctgctagagggttgatttccgcatgaaccgttatgacgtcatcgctggtaagcttaatctccggtgccacaagtaaagatgagccggttctggttttaaacaggttcgatgtggtttctcttggttttggaactgctgggcgatcctcatttactaacttcaatttggatggtaatatgtcgataactggattatttccggacacttgcaacgttgaccgcagctttgggactggttgagaaggcgtctcccgttttctgacaatcggttgatcaactgttttgctgcgaagagttcttggtttcggtgcttctcccagtcgacttcttgctagttgatcaacttttgtcatcaactgatttctggttatgaagaaaccgcgattttgtcttttgctagcatctctacgctccgccaaagtttcggtagcggcattgagatcttctttagatattgctttcgttttggtatcaatgcccaactgttttaaacgggttttaaaggtgttcaaaattagctttttaggtgataacagtggtttctccaggctgctcacaattggcttttctttggattcttccatcgccggcgcagagacattacttcgtgacagcaattttgcttttgcagcttccaaagctctaatctcctcatcactttcagactgatctgtttcatccggagtgctgtcttgttgcgcttcaacctcattaaccttatactcaaatgttgttcttgatagtgccgggggaagagatgacttcaaatctataattggcacaggaatttgcaacagtgaactatcgttaatcacccttttggtttggtcttgtttggcttcattcgcggttgtttctttttgtcgctccaccatttgttc

SEQ ID NO: 495 - DNA, 315 bp, Aedes aegypti
atgtcaaagaagccaaggtggctaaaactgttctgtctgctgcagtgcgttctgctggcgcttagcatctcccactatgcccatcccgccgtactggaaaacgaagcccaggaagcactcctgccggactatctgcgcaatcccttctaccgaactccccgggtggcaaacgccctggcccgcttcagctggattggccccggcgaggaactggtgcgggaacgacatgccgagaaaatctcccgagccgacatctacagcgtgctgacccatgccggattcgttccgcggagattgcatgggttcaatcgttga

SEQ ID NO: 496 - DNA, 938 bp, Aedes aegypti
tagttcagacctgagagttcagacgttcagacgatttttggatatctgatcaaagttttaaaatattcatcaagaaaagtgctaaatatatgtactctaataacttttcgagtcccgcctcgaaatgagctttgaggacaaaaagaaagcgctgtttgccagtttggaaagtgccgagcgcagcattccagtggactccgttttgcaccaggatgataacgtagattacgatcagcggcgacgaaccgatcgggacagcggaagccgcaggaatcgaaggtcgtcgtccgaacggggcccgatcaggaaattccgcggcaaagaaagcatcttcaaaaggccagcggcgccgatatcgaaatgtttacccatgtcccgggttccggatttcaaaaaaaatccccaaaaatggaccaaatactctctggaagatgtggacattagtgaccggagcaacactgctgccgcgttcagctttctgcgagaaatggagaataagaaacaagatcaaccctccctggaggcgaccggtagcgaatccgccacccatggattccgaggcaaagttaaatttaaccggtcgatcaaattgaagtcccagctggaagaggagcaggaaacgccgcccacggaggaagaaaaaccgaaggttaaaagtacgaaggtcgttatgccggagtatgtaattgggcagaaagtgaagaagcccaaaccggtcaagttgggtatggcgtccagcaagcgagatcgttcgaaggaacttaagctggatcatctcatggatgaagaggaagatccagacggagaggatgacgatgatgaaatgaattgaaaataatgaaattaattagatggtaagctttaaataagtggttctacattaaatgtaatgtaaataatttaggtagtctgtcaaagaagattcgaaagaaaatatc

SEQ ID NO: 497 - DNA, 894 bp, Aedes aegypti
acacaaaacaaaacaaaaatgctaaactcagtgcaacggagaaattgaaaattatcaaaaaatcactgttactaatcgtttttcacgccaaaaaatggatattctgcatcctcatttactcagcaaacaacagctattggacatatttcgacagcgccacatttcgatccctcgcctggaggaatcgacacgcgatgagctgatcagtctctactcgaaatatcttctaccgttgccacgaaggggaggatcctccagcaatccccaagatagttcctccctcccgcaagacgtcgaaatggccgacgcctcctctaaatccaccaattcgaacggcgacagccggagaccgagctcgaacgtacgaaatcggatcgtatattccgacagcccggtggacaacgtaagccacggcatgaaacggatcaaactgatcaataccggcggagggggagcaaatgtggccagcagtcccaaaccggtcatggtaaaacgaacgctggagattagccctggcaagagcagctcgatggggagtgcggtcagtccagctcccagcaaacggcaaaagataacgtggccgtagattggaaccaacctacgaggtaaggtaggttggatgatttaaacttaagtattggatgtgaacaagtcgacaggtaattttaggtaataaacgtgatattgaacatggtttctatttgtaggcttctagtattgaagaatcatttttaggggaatccttaaaaattcttggggtaacttttaaaggaattcctgggaaaaacaaaattgtggaagaatatagaaaatttctttgaattcctatagtcagggctattcagatacgtgttctttattttagtgcaagaatctcgtttttaatggtaggtc

SEQ ID NO: 498 - DNA, 1461 bp, Aedes aegypti
atgtcatttatgttgaaatattggtttaatatcgaaaatatttaccaaacaattcaaccggcatgtcgctgtatgaaatggttcggctttatgctgttcacattgtcggctcctgagccgggcaaaataaacgattcgacgacgcagcttcccccattaacccttactcgaaaaaaactggatattcttctgctggtcctctggcaaatatacatcatatccatgtacaacacacactggttttcgtccctgttcaatgcaccgatgtcgaaaatcatgatttttctctcggtactgatgtacgttctcgagggaatccttacaagctgggtccagctgcggacggcatttagtcgggccaaaattgacgagcttctgcgattggttcgcttcttcgacgaattgatcgaatccctcggactggcagtcaatcatcgccggcaccatctggggctggttttgctgatcttcggcacgataatcggtatcattttcgtgacggcaatcgagctcgcattggcaatgctttttcacgagaaaatctcccccgtatgggaacagtttttcacgaccggtgccaccatttactactacttgcttcgaactgcccaagtgagctcactggtgatgttccttgctgcgatgctggcgtttcgggctcgcttccggctgttgaatgaggcgtttcgcaaacattttctacaaaaagaaagcagcttcaatgttgacgatacacaagaaactttacgaacaattgctattggacacgatgcactgacagaagctgtagatctattcaatgacgtctgttgtctgcaaatggtttacgcctgtgcctcgtacgtgatgttctccatttttagcatgttctgcattggagccctcgtctcgtaccaatcaaccgatgtcctcttcctgtcactgttctacacgatagcgttcctccagtactcgctgcacatcattccaatcataaaaataagcactgatgtccgaaacgagggcaaacatatagccgtgctggttcataaggccataaatcaatcaccactttcggtcggctcaatcaatcggctcatgctgttctccaagcaacttcaacagcagacaccggccgtttccagtgggatgttttctttcgattggacactgtgcttttcgatcctgtcgacggtggccacctacacgatgataatggtgcaattcgagctggaggtaccgaagttcttcctggatgccctggtgagctcaagtattgagcagaatgcagcgctgaatggaactttattactgtgaaaggcagtattatgtgcgagttgtgttgctattgggaacaatgaacgaaaatccaaaatcgaaataaaaaaaaatgctagaaggtatggatgaatggtttattacggatatgtaacacattttctttaaggtaaggtaacgaaaagataattctcattgctattt

SEQ ID NO: 499 - DNA, 885 bp, Aedes aegypti
ggataaacaagtattgacgaacatttcagtttctgcactgaaccattcatttttatgagaatttattgtaaataaattgagtcctccgcgtaagaaaacgatgacatcgcgtagtttttaggtacaaaaaagcaattataatgttaagcaacgattgtggattgagaacgctaatttaatcgagtccgtatgtgtagtgaatgccgagataaaactccctttaaatggtgcatcatggatgatgaccttcaaccgctgaggagcgacgaatgccttgagcagaacaacaataacgttatagccaacgacaacagcgagggagcagttggcggatctgtggaaaacgttgatccgcaaccagaatccgagcacgatgaaattgtatggagcgaggaagagttcgaccgtgatccacatagggcgtacttttatgatgcataccgttcggaggcaggatccccggaattggacgattcgacggagaacgcgggagcgacgaccccggaacgaaaaccgctggccctgatggacgactgggatctctgggactacatggacgaggagacgttgaaacagcgactgaaatatcaccccgaactgttggaacaaatcacacggaagagaaagcggaaagccggacttgaggaaagcgacgatgacgatctctgtgcagtgatggagaggcatgctaaagtgacgaagtttaacgaacatacaaaagtgtactgaacgtggaatggtttagttttgatgttcatgggttatgttttacaaactatctatagcgaagtccaatttagcatgtgtaatattgatagtaatctttcaattttagctgtgtactataatctattattgtaaatatatttttttatcgattgcttc

SEQ ID NO: 500 - DNA, 877 bp, Aedes aegypti
ctatcataataaatcgtatgaaatttgtctagctaacattaattttccaataatggctttcctgaacaaattagtgctgtttgccggatttgtgtcccttcttcatgcggcatactcagctgcccagcaccgagcttatctgagaatcacggatcaggaattcacaaatctcccagttgatattatcttccaagctattctcagtctcgtgttgattatctataacatcctgcaagtggtcggtgacttcaaagaaattcgcgcagctgtggatctgcaggccaaatcgtgggaaaccctcggaaacattccttcgttctataccttcaatcaccggggtaaagcactatccccattctatgaacagcccaatccggcagcgatggatcggtccgatttaagcacttttgagtgattgggtaacacattgttctacgctagtttgatgggaagtatgtaaaattttctaatcttcaaatctgaagtacatagggtcaaatgtaatactaatagcaaaagggcatcttcagcggcgtcacaatttgtatggagagtcacagaaattttaacgctgctgaagatgatcaaatatctgtttgacgctttgtatcttcacatccttagccattttttcaaggacataatcaaccaatcgttgccacatagcgtccaacagtttagatcttaccatgcgatagaagaatttaatacgccatagtattccggacttcatattatgctgacaaagagattctgcccaattttaagatgtttgcatattagtcatatgtttgacactttgtactgatagcatatcgtttgaaatatgtaatttatttgcatctaaactataataaacatattcctttcgaatttt

SEQ ID NO: 501 - DNA, 1144 bp, Aedes aegypti
cgagtgcgtttcgcttattttattgctgcaatttgaagtaaaaatagttgaattctagctgtgcattcataatagttggtatcccgcttgacaatgagtgccaaaaactcggccctggcatcgttgacggccacatacacggattccgaaaatgaagacgaccacaaatcggacgacggatcgatgatggcttcggatgatgagagttcttcctcgcagaaccgtgcacgttcccgacagcagacaccgatgcgtgatccatcagaatcctcaatcacaccacccgtggcaactttggccgtttcgaagccaacaacttccgcaacgactgctagtggttccaatgaatctttcacttctcgacagaaagccttgcgcctggttagctacttcgacgacacggttgtctctgatgacgaaaatctttccccacatcgggatcaggaacggatggacatgtccgaagacgaaactccagcagcggaaacttccgtgtcgccaaaaaagatagacagggccaaattgtatggattcagtttgcctccggaaccgaaagggaaatgctcactggaattgcaggaaaagatagcgaacctttacgaaaaaatgcgcaactcaaatatggacaccaacaagattatccaggagcggaaagagtttcgcaatccgagcatttacgagaagctgatccaattctgcgacattaacgagctggggacaaattattcaccggaaattttcgatccctcccagtggggcaaagagtcttactacgaagaattggccaaagcgcaaaagcttgaaatggaaaaggtggaaaaagccagaaaggaaagtgctaagaccgaaattcaggtcggtgtcaaaaagatggatccggacgattcgaagaagcgcaaatcgaagtgggatcagccaggagtgttgggagctgctccaggagctattggcacggccactgcccttaaaccggctggaatcatagctcaaacgctgactgcaacagccaccggaacgaaagggaccgtcatatctgcgtttggttctttgcccaagaaaccgaaggtgtaggattaatgtgtttgaggtaagctgaactttatgttatttatactttgtacaataaatagctttaaacaagatt

SEQ ID NO: 502 - DNA, 255 bp, Aedes aegypti
ccaagtgagaaagattttggcggaagagtgaaagagatcagcaagcatttctttttcttttcggttttgttttcattcctccttccgagagaccgcagaagctggccgccagagttctatctctgctgctgcaactgctactccatagtcattgcgcgagtaaaattgtgtgaagggactcgcactgcgtgcaagatacgaccatccctccctcgtatcaacgtcttcactcccccttccgtctgcctagaatag

SEQ ID NO: 503 - DNA, 1259 bp, Aedes aegypti
atggatgacggcaatggtgaaaacgctccagcaaagagaacccgatttgccctccgggaaccactaaaactcggcgacggagaacttcccggtcccgtggtggaagttttgacgccacatcagctggaaggaatccggttcatccatcggggtgttaaacagaacaaaggtgtaatcttgaatgacgaatccggattgggaaagacgcatcagatagttggttacttatcggcaacggttggccttgctgctgataagactgcgatcttgtgtgatagtgcagagcgggtgcatcattggctgtaccatttggagttgcttaccgagttcagaacattgattctgggagaggaaggtgaaagtgatcaactatcagggaaccaacagataattttggctactttcgattgcttccagaagaattcccatgcccttcttgctagggaaaaagacattaacctattggtgatcgacgaaaccaaagaagtgcagtgtgagattggatttctttcactgatcgccgaattccagcgcgcggccagaatatttttggtaaccgaaaaccttctggacaacccggtccgattttctctgaggctcaaactttgtcaagtgcaatttcatgtggatgcgttgaaaaccttgctggaagaagcaatccaaactaatcgaccgttgaaaaaagcgaagaagttgaaactattcttcctgacccggagcgtttggttcagaaggtatcgatctcatcacaacagctacctccccctaatagacgagcacgagttcaagttttgcttcaacgcttggaagatcgccaacggaatggaatgtagacaaattgaagagaacagtttgcaggttctcgaggaatcgagtcaagaactggttgaaaatgagacagccggggaaacgagcctcaatatggccatcgtgggggataaggaaacttcaggcatcggaagggacttatcgaatgagacagatgatgacaaagacgaagcggtgaccgtttcgtataaagttagcgagccgttgttcgatttcgagctgagtacggaggaaatgcccaaattggtggtggaaacgtctgattcggagactaaatctactattgatgatgttaggaagtctcccttggttaaagcgtcaggtaatttcatttaaatagtttgaaaatagcataagttgaggtttcctacgaaagggtgaaagcacaaaaggctagggtatcaaaaagctgaaaatattgatgtccttct

SEQ ID NO: 504 - DNA, 828 bp, Aedes aegypti
atgccccaagacaaaaagtgttcaagttatgtgtcaaatcaacttggtcccagcattaccatgctctcgtcaacttcgctcctgcataacaattgtattttcaatcgaaacaatactgtcgccacccagcagggtctcaagacatactggttgtgtaaatcttaccgggtttcgatgtgccgagcccgttgcatcacccatcacggacaggtcatctcttccacgggagttcacaaccatccgcctcacatgaagggtgcccatgaattccctcatcaacctccgcaaccgcctccgccacctcctcctccccctcctaacttaggaccacctgctgctccaccccctcagtctcatgaacatcacaacgtttctccctctttgaacaacggagcatattacgagttccatcataatcctcactaccaacccggcccgaaccacgtggcgatgggccctcctccacatcatgatcccagtcagtacccaatgcatcaacagccaccaccttattctgaaatacctccccataatcaccatcatcacccgcatcatccatatcacccccacccgccctacgtcaatcctccaatgccacctcctcagccgcctatgaaccttcaaccgtcgaatgattcacagccttcgtcatcccatcatcagcagtcggagtcagccgctgccccatccaacagcattccggaaccggaagttccgcccgacgtcaagctgattcagcttcaaccgccagtggtgcccccggttgattcgactggcgaaggagtaacaagcgagcagcttgaactcaagaccgaacagctttcctag

SEQ ID NO: 505 - DNA, 537 bp, Aedes aegypti; identical to SEQ ID NO: 470

SEQ ID NO: 506 - DNA, 4373 bp, Aedes aegypti
tcatgattgaaactttagcaggaaatgcaggaaattttgatggagaacctggtgaaatctctgatggaattcctggtgtaatccttacaacaacttctgatagaaagtttttctaattcaaatgcagcaaatcacatggcgtagttaacgtcatgcggtccaagacacgacccctactgagcgctatattaacgacagaatctagggcgctgaggtcacgttgattgtaggtaatttagaatgtatgtgttgttcggaaattaacagtagaatcataatttacatgctctactccattgttgctatattatttcatcatcttatttaaagattggttcaggtgcttaatgataacaattccagttgcattcatacgcacatatctccctagtagaacatttttgatataattggtgtatttaacctttcagtaggtgttgctttcgtctttcttttgtttcttacctaattgcctcaaccagctagggaaaccaacaactaaccctcatcacacaccacattaaggtcaaatacgtcccatgatcttcaattatttgtatcaattgtgtcacgagtggaatcaatgctacacaatcattcaatcagcgttcaacggcatttgtcttttccggacattccctataattccgcgccgccgccatgcatctcattactcatacactgctccactttcttcccatccgaaatcgatcacactcaacacggtcagtccaaactgaactgcgaagtgctgctggatgacctggcattcgaggtgcgatgggccgtcgccggcgagagcatcgtcatccaattggtagccaaattagaggatggagagtacatgtcattcggggtgtctccggatcattcacgcagcataatggtgggagctgatgtggcagtcgtgtgggttgataaggctaccggaaagggatacgctcaggactactatctggatgccaagtcgcagtgctctggagctcgcggaagttgcccggacacgaggatcaacgaaaacagtagttcgatccgtctgttgaacgccgccatggttaacggttactccatcgtaacttatcaacgaccgttgagagcatcagatcatctggatcttccgatcttcaccaacggatcgcaagcgatcgtttgggcaatcgggcctctgaatcaacgctacgaagtctcattccattcgcagtacttgaaagatactaagcaggttgacttcggccgtcaaccgtactggaattgccctacaccggaatcggatcaacagaagcaacatgagagccctcagaaactgcaaagtctagagccaaatcgtcgtgtagattccatgaaacgtccgaatgcaccggcaaccgctcgaccgcccgctaaggctggtgcctgggagatacctccagttcagtgctacgaaccagaagatggagtattctatgctcagatgggtcctaccggaggcaaacaaggctatccagcaatcaccggtcatgttggatggggtatctcgtggtacatcaatggacttcttatcccggaaatcaacgtggttcgtggtaaaacatacactttcgtaactgaaggcggcaacgatccagagactcctgccaaatatcacccattctacattaccgatgattctgttgggggctacgaacatcaggacgaggaagccagaaagaatattcgaatttttgccggagttcaccagaatcgcaatggccaactagttccgaatggcgttgggcggttatgcaactggactccaaatcctgatggtccccctgcggactcgtatccttcgtttggtgcttaccagagaagtctcaccttgaaatgcgaccccggtgagccaggaatcatcacctggactcccgatgccgacactcctgacaccgtctactatcagtgtttcactcatcgttacctgggatggcgaatcaacgtccacgatgcgtgcgatgtagctgccccgagcgaaatcgatgaggtctacgtggatcctaacgaagaaggcattaatgctgaaccgtcaattcgacacgaatccaaattgctgccatcagacacattcctggaacaacatgagaactttgttcagaaaaacgataaggatctgatcaaaaaccataagatgaccgctgatcaaccaacggagaacttgaagttggatctagaaaacgacccagaaatgtccaaaatcatcgaagaaggcatccgagctgccgaagacctcgaagaaaaactgaagaacaatcaaacatatgcaaactacacctccaatgaacagcatcctctgtctcactctgaaatcatgcaccatggaaagccgattcttagctcctctggactaccagtttatctacgtccgccaaatagtggtccgatgttccggccggtaaagcttcccatgagacgaccaatcgccgttgaacgacgccccgtcaatggtcggccctctcgcccatacaacatacctcagccttccatgatcatcagtcactaccaaaaaccggtcaacccactgatgcgaccatttatgcccaaaacaaagctccccatgaaagccattgcgccaattttgctgctcggggaaccaacagaaatcaaaccattccgcaaagttcctcctccaccacctccacagtcaatgattcatcaacctatggaaatgatgctcgtgaaacccatgaaaaccgttccatacatggttcccgatgtttctccacatctgaccatgagcctcaagaagatcgaacccgctccgatcacacttcccattcgtctcaccaagcgaccggtcctggtagaaccccaaaacgtgaaaccaatattcaaagctccgtatgacgttcacgaaaacaaaacacccgttgatccgcagtccagcgtcggatttgagccaagttccgtagtagtagaaagtggattcaaaccgatctaccgtcgcaatggtatgatgaatgccgaatacgacgatcaactgcgccatcatggggatatgattcaacggcgacaggactacgatattgacgaagccatcgagagtgatgctttgatgattggcagtggagaaccacagcagcaggctttcgaacctatgttcattccatcaccactggatagtatggctatggcgcacaaatcagccgaagttggagatcgaaaggatggcattgaacggttaactggcgacttgaaggaaatgaaagttgaagaaggtgaagataagatggcaatgcctgacgatcgagtagattcgtattaccttccaccagagacgcaaaacgttgtcaaagtctatccagaaggatccgtagtttcatacgatggtaaagcggtacttgatgtatctttattgaattcgccgagcaatgtccgacacgaagccattaagtccgtttccaagacagaacaattcatcagagacactccccaattcggacctttccgtggagaaatcccacccatctctgattacgttgcgccagactcacatccaatctacggaattcgtggatcaaattcagtacaaccaccagtttcagagtatgccaaccccttggtccccggtggcatcaacgtgcaagacaacaaagatctcagtgtaaaacccatctccaccaaactatcgattatcaagccagttgaagaacaaccggaagagtcccgaaaaaagcgtgaagcacatcatcatccagaccaccacggagatagtcacgatgacggctgggaagagcaacgcaagagcgttagcagcacgtcgaccatgtcaatggcaacactgctttctgtagtctctcctttaatactcctccgaagagcgctgtaaactcccaccatcataacgctcagtgcctccttgctgcataatttgttttgggttaagtattgttagttaagttttatttaaatcgaacacacttcagtggaagtgaactacaaaattgtgcttaaagttttacacacaaactgtaaataccaataaagatgccgttcgatggcgttccaattagatcttgagtcgtcgtttgatgagattgatgaccccctgctgatccgtcagccgagcgtagtccaacggcatcagtcgatttttgtctcgaattttcaaccgacactttctctccagtagatacttgataatctccatgctggtgtgcatgtagatcgctcgaaaaatcaacgtccagctgcagcgatcacgtgactccgtgctccctccgtgcgttagaacaaacttcagcgtgtgtagatcattcgtgtcgatcgcatagtgcccagctgtcattccaatacagttcccagcattgatatctgccccgtgctcaagcaagtgacgggcgatcttgatgttcttgttgtag

SEQ ID NO: 507 - DNA, 1990 bp, Aedes aegypti
gtcaaacctgagcctatttttacgttgtacgataaaaatagtccaagacaagcattctcgataattagtacttagtcgcatcctcgctagcatgcctagcgacgcgaaaacttttatcatcattagggaagatttaggatttgaacgcgcgcaaaaatccgagtcagagaagtcagtcgagtgaagtgcactaattaagtgctgagttcgtgtgatcgtttgcatacacgctgcgctccgatggctatcatcaacatttaattcccaatcgccgacagataagaagaaaaatcacatcaaacgaccgatgaacgcctttatggtctgggcccaggcggcgcggcgggaaatgtccaaacaggagcccaaactgcagaactccgagatcagcaaggatctggggaagatgtggaagaatcttgccgccgaagacaaactgcccttcatcgagcaagcggagaagctccggatgacgcacaaaagccagcacccggactacaagtaccaaccgcggcggaaaaagtccaaaaagtttggcaagcacggaaagcactgctgcgacgaggactgcgaagattccaacggttctccaccaccacctccgaagccacgtgccaaaaaggccgccggtgccgctgcaaacaaatcgaaggcgtcaaaccagtcgaaggcagctgccacgaccgtgctgaacaccggttatgatttcaccaatcagcaaaccattataagaattgctcagccgacggccgatcttccgacgccctcgtcttcgacttcatccgtcgagcaatatccgagttattcgatgaaaacggaaagcggaaaccgattctacggaattggcccatgtgagatggagacaccttgtagtccgcagagccctagcgcaacgtctatccattcctctacggaagaccatccactgacgccaccaaccacgccgtacaccggactggccaacgtcaagtccttctcaccacattcccggttgtccagcaacgacagccccgtaggctacttcaaccgcaatgactacatcaacggcggaacggccaccgattaccgcactagcgaacagtggagctacgcggccaacacactttccgcttcgtctgccttcacatcacagacatccagcaaagacttctaccgcaacttcccgaaccaaatgcaccaactgcacgactccaactccatctcgtcctaccatctcgctccctccacgcttcaatccactctgtcctcttccccaatcccgtctctcccaccggattactccacgctcacctcaatccccagccagaactacctggtatcccccttggaccaggaccaggtcgacatcgagcagtacctggacagccaagccgtggtcaagagatccctcaccgattcgctcctccatcaccatcatccgcaacagcagtcctctccatcgccccaaacggccgcctcatcgctggatgtcctcagctccgatcccaccatgggagccatggccatcgacccaaccgcccaatcctcggtgtactacgattcggtcgggtcttcatcgtccccatcggtaccggcgcagcatcattcgccgcagcatacgcaccatcaccacctggcggcccacctgcaccatccccatccgcatcatctgccgccgggacatccggggcatcatcatcaccacccctcgatggcgtcccatctgccgtcgtactacagcagctggggcaccgggaactacgggaccaattcgtaatctaggcatacgggaggattttgggacggaagggcgttagtcaataggtttgcttaggtcagtaggttatctcactttaaatgttaaacttgaatggttgaaaggctggatggatgaaagaaaattaattgtatctagatgaacaatcagaggaatacgcctaattttcattagttactactaatacgttgacttctctcaagaacgtttctcataaagcagttttgcataaat

SEQ ID NO: 508 - DNA, 1272 bp, Aedes aegypti
atgcatgatgcattcacggacaggacggtgcgatggctccaccatccgaagcagcttcactacccgagtgggtatccgatgccgcggtcaccgccgctatttatttgctcgtcaccggggccggacccgtaccgatcgcatgacaacgtgtacgaggagctggagcatccccgcgatacggactcggagccaccggtccaatcggacgacgactttgccgaggacgaactgagcctacccggtgaccggtcgtttcataaatcatcttcggacggtggcacgacggtggccacaatctatcacgaccgaagcgctagcagcaatgggggaaccagcacggaccagtacatggagcggaaccgaaccgaacgtaattcgttgctctcaaagcagcaatcatcgacactaggaagtggaaggggcaataagcatttgaacaatctaaactcgttggccgagccttctagcgaggtgtctcatacattgccggcggggtgtgacgagcgagctatgatgactttgccaccctcctatcaagcagcagcggtggctagccgaaccagtcctaataatttgaatagtatcaacaataacagctttgtgaatagcaatagtttgaataacaatagcagccgaggcaattactacagtacaatagatgatgagtgcgatccagttgaacggcggaaccggatcaatgcgcaactgtcggcttcggctgcagccatcaacaatggcggccctggcgtgtccaccatcttccgcaacatgcggccaccccaatatcccggcaacaatcacaatcatcataatcatcaaacaacgaacgcaagcagtcgatcacggacgaatccacgttccctggatcgacggcgctatcttatcaataacaataataacaacaatcatagtcccggtagcaatctagcggtaatatcttcccaagatccctcccagtacatctaccacgagccggtgtttcacgaaggactcatctacgatgcctgcttgtcgtacagtgatcgaagtagtggaggcagtgccggacctccgtatccctacgtcctgccacagttcaccaccttccggaatcaccacggccagcagcaggccatctactcgagggacagcagtttcgggtccgattccggctacagtcagcacacgcaagcatcgaaccgtagtgtcggctggagcaggaatcgtccaccgcagccaacgccacatcaactgaaccctcccgagcagcaaccgacggtgacggactcttga

SEQ ID NO: 509 - DNA, 4607 bp, Aedes aegypti
atgagtgctgaggagtttatttatagcgtgatcaacagtgataacgtagcccagctggatctgaacgtaatcgccaacacgctggccagtgcggattcgctgatccagcggatcaaggcccagcaggtggagaacgagggcctgaaggagaagatcagctcgctgcggagttccgccctgcaaatcaagcagctgtacgaggcggaagtgggcaagaatcagggcatcgtccaacggggggaggattatgtaaggaaggtgcaggaactggagggacgggttgccgcggccgagaatgccagggtcaatgccgaactgcagggcaaggaaacggtggctgagctggagaggaaggccgaacactggatgggaaggtacgacgggttggccatggatatggtgcggaattgctgtctgctggcggacaacggattacttccggcggaacagctggggaagtaccgggattggaagtgccatgtgcaagggatggtccaagacgggaaggaagtccccgaggatgtgctgagctgcttgagcaagaagcgatcctcgtcgtccttggcgcggaagaagcgcaaatcggaggcggaatgccgggatcaagggacgatgactgctggcccctcgtactgttccattggggtcaatgccgtggaagagaaacctcgctcagccgattcttcaacgagtacggaaggtttggaaccagctaaaacgcaatactcgatcacggatgatgtcttcccggtagaacctcagcctaagaaagtcttcgccgacaagagcacgatgtattccagttccacggtgacccgttccacctgcacttcggccttcatcaagcgggtagacgtgggggtaaacttccccgaagttgttcccaagtccattagcgaaatcctccgcgagtgcgtcatcgagcttccctcattactatctcccatcctggacgagattccgatccggaaagaatcagcctccacccaaacggattccgcggacaaacctcccctcgtcacaaccggtaccaacaccaccttgcgcaacattcgtcggaaggtggactacgtgaggaaagcggacggtctcctcgttaacaacctcctgtccttcatcaagaaagaggaaagcatttcccctgtgggttccctccagaacctccccgcagccgttttccaaagcgacccatccgatgtcaatccccagttgacgcacatttggggcctactgggggagaccatgttccgcctgttgggtaccggacggatgttcgacagccagtgctatagcataatcaacgaaaggatagccatgattaacagtctgatcgagtcggagagtcgccgaggaacggccatgatgagtgaggtgtttgcggcggcggctacgatggcgtcggataaagcgggtgaagttggcggaaagaagcgtgctgttgttggggaggaaccggtggtcagtcgggggaagagcatggacgagtacgaggaggatgccgtgggaatgcatgaggaggaagactctaacgggccgtgggaaagtcaaccaccgctgcccgatgaagaggtggagccacaggaagatgatgtagtcagggatgaagaaactcagacggaagtgataccttccggcagtcaaattagtgtggccgtggtcgaagctgcgatgaatacggaggaatcttcagcgatggctgctgcagcagatgatgtgccagaagcgacgtcatcagcttcagtctccaaccaaaccaaagaacaagacgaaagtccttcgtcgccaaaacccccacgtgagtcaccgatccccgatgaaatatccccggaagcaccatctccccaaaacgacgaatccgttgacttttgttctctcatggaatccggcagtggcgccgtcgaaatctgtgcgaacagctccgcaacgaaagacgctgatgaacaactgccacagctgcaggatgaagaaccggacgagattgcgaacgagttgcgccagatggaggaaggcgtcgcgaaggagccggagctggatcgacttcaaccgtgtctgattcgcgtgcgggacatagaacaggtggaaacgaaacactatctggatgtggtctgtgaggaggaatcctcgcataccacggatgacgagagtgatcttcatatgacgatcgtggagacgtctccaaatcggttgtccgtcagctctagttgtacttcgataggaagcaacggaacgctgatttcgcccatcaaggtcaaagagaccaatgagttggtcaaggatcaattcaaaacgccaactagtcccgcgatcagcaaacggaaactcagagagcgcacggagggaggcccatccaagcgggggagattgtctccgacgacggaatctttgctggaggacgactgggatcacaagttctcccggataaagaactacttcacgctgccgtcgggtttgaatccaatcaaggatggttcgggtgggtcgcggactacgcaggagtacttcgagttggacgaactgtggggcgatgaggatgatgatggagatgagggagaggagaagaagggcgaatttgggatgccttgtgagcaactgttgcaaccactgcggctcgacacgagctcggcggtaaacgtggcggttagcgattctcccgaatctcccactgaagcagtgaaaccgatatccggtgaccatgtttccgaaacgaatgcaacagtctgcaaattgaaacaggtgattttatcaaaaccttcagcaacatccatctcaagttgggatggattcaaaaggcctctcaacgttgacgtcacccggcctacagttcctccgtcaacactcagcaatactcctgcttcacccgatgctgcctctgcatttttggacgattctccaatgtcgccaatagctgacgaagaaccccgtagtccccgctgcttcagcgaactagagtcccccatgtctccgcctcccgaaagccgatcaaccatatacacggaaccggtggaaccgcgaaacattcctctggaaaatccgctagcgagccggatactaaccgaagcatccactccaatgggaaaggccattgcctgctacaagagggaaaggcgcgctgaagtcctgaacaaaattactccgaatgcgtgtaagaaggagaagaagctgatccaagagctggtcagtgtgataatggcttatgtgaaggacgaatggacggcggaaaatgtggacatccgaagtaaagagttgctcaatgtttcaggagataccagggtgatcgctcaagcgatagtagattgtattatgtcccttacggaggatctggtgatcgatgttcagtgttccccacctgctcctccattaccgaaggccacgcaaaaagtggttctgctggcaaaaacgcttaatgaggtgttgttcacgctagacaggatactccttcaagaagtggatcgccgggtgttcaatctcaagtcggataaaaccgacctggcagcgatcactgcactgacctatctctacgtaggaatagccgactgcaatcgactctacggttgcactgccaggatgtacatctacaagtgtctctactacttcaactacaaaggtctacccctgatctattacgtactgaaggccttcccgcatgcactgccaaagaaggccagcgcctttttcgataattccgatgcgatggtcagcaccatccgcacagttctcatgaacatcaactacatggagaaaagtactcaccccgaagctgccctgtacaaaaagtgcgaactgcagaaactactcaaatacttctacggctatcagcacgggtctccgacgtatgccgagctcatcaccaacctgatcgagaagatcaaagctaacaagctgaaaaatgtcgactactgtctgattctggtggccaaacgccagggatacgagtgggccaagcggcacattgtccagaagcacctctaccccctactcaacgactacctcaagcggatcgaaaccgttcaggggacgcacgacgatcagatccggtgtctgatattctgcatctcggccatcctcaaaacccagcccaactacgaggacgtgacgggtgtgatgcagatcttcggcagcatcatccagcggacggacggcaaccaaaggctgcaggaagcggccgtcgctgggttgatgcggtttacccggttcgattacgccgacatctacgagtggttgtgcaagtggcgcccctcgtatgaggttagcggccgaatcaagctaatgctggccacgttcgtccaccggaaggacgaacgcttctggaagcaactcggccagcggaagttcgtgtagtctctgtgatctggtgggaattgttgtaaaaaaccggttatttattttcgaaggccgaactccttctcgcttcgtagtaataatagtaagcttagtagttttccgttgtttctttagatgtaagcgaatcaagagttaggtttaagtagattgcgtgatcctctattttcaaagaatgtggaatgtttggaagcaatcgggcgaattacgggtgctttgcgttgaactgtacatagctgcaaagcactcaaatcgctgcaaataaaact

SEQ ID NO: 510 - DNA, 1147 bp, Aedes aegypti
tgtacccgaagatagtgcttatcgatcgtcgcgacaaaccagtttctgtgagaattttctggtgacaataatcgaaattgaaatggaacgatcgctgttgagtctatcgctggcgattgttttggtgcttccggtggcttggaattacccactggggaagaatgtgtttgcctcgcagaacggtgaagaatcagagttcagggacaaggctttcgacgaggagattcgcaaagtgacatgggttggagacaaacctgtccatgcacttgaatcgtatgacaaccctcccgatattgacaacgccgctcgtgagaaagacaacttcccatcgaacattttcagcaaatttgacaatacgcagaagaaagtgaaggattggttcgataccccaccgctaatcgacaccatcaaagaatcggacaagtacggcaacgaaggcgatcagttttacttcattacccgaccgctggtcaaactcaccgaaacggtatcaaatacaatcaacaaggccatcgcggcccctacgcaaatctatcgatcggcgaaaaagatcgtgtccgataaactgaacgatgtcggcgctggattagtcggtttgagaagatagttctctaagttgtgatatgtgtgtaaataaatcttagccattcatgttagtttgtaagaatctctagactgatataccagtaaaactctacgcccagcgacgacgtttatcgacagttaagagaaaaaaagctttattcgagtcaagttgagtcggtgacccagtttgtcgacgcaaaggccaacaaccgcagactgcgccgtcatctcctttcgccatcgtatttcaaggttacaacagctacggccaaacagcatgttgaagatttcgcgctcggacaaaagcgaagacgacgaaccccaccatcatcagagcacgtgttcaccgaagctctttggttccgatgaactttaggccgccaacactttggttgaaagtgaaaatgaattcaccgcgctcagctgatcagcgtcgcggtgcctaacgtgttgaatagcttctaagataaagataatcgtcaatgtgaacaaaaaagacgcgattcactcgcgagcagcaaaggcttaaatagctgaccaaaataaatacgcaccgaaaacg

SEQ ID NO: 511 - DNA, 444 bp, Aedes aegypti
atgtattcaatttgtgctaaatccttttgcggattcatcccccagcaaacggccatctgtgtgcaattgatccggaaaagattgcctctacgacgacattcgtccaaagaagtgttcaagtgcagcaaggatgaaatatttttaattaaatgcaacatttccccccggctgccaccaattggaccaccaccgaacccggcagaaaacatttcctcaccagaccagaatatttccgtccacaaaatggtgcaccatcgtcaccgccaccattcatcgtcaccatctgcattatatttattcattttcaacgaacgactcggcccattcaccacctcccgggtgatgcattttcataccccattcaacgaacactgcaaaacttccctccccatttttttctcactcaaattgcatgcatctcatcaaactcgcacacgctcatag

SEQ ID NO: 512 - DNA, 1052 bp, Aedes aegypti
tatcgacaaacctccgaccaacaaacagttcaaaattggacaattattacgcgaatggggcagcggcagaagtgtggcacggtgcggaaccattagatcgtctcgaactcgggatcagtggagtgatcatcaaggggaaccaaaaaaatgagcctgaaaacgagagggatcgtgtttgccacctttttcggcagctgtctgatcgtgggcctactagtggcggcactaaccaccgacaactgggtccaggccagccccaagcggtacaactcgagcgaatcgcaaggacgaatccatttcgggctgttcggagggcagaagcatctgaacgtggcgtacggctggcggaggcacgacgtagatgtgcttgcggtactccaggatgaacccgatgtcatgagctactggctatggcttggaacggccatcggtaccgggctgggcgcactaggcggcgcagtcagtgccgtagcttccgtactgaaatcctcatccgcctcgaagaaatccggcaccatggtggtcctatttgcagccaacatcctctcgggactctcccagattctgtcattcgtctgctggatgctccagttcctccaatatctcactcataacgttctggtggcggaggatcgcgacaacaattggtacagcagtgggctggcctcgctcagtaccagtttctatctggtagtggccggaatcgtgatcgtgataatcaacatcactctgctgattgtggccaccagcatggaaaaacgcgaacggaatcgggtgctggaggtcccgaccgacgagaaaacgcaaggagcgatcatgctttactgagcaaaggagtagtttttgaactcatcgttgaacaattttgaaatttagaaagtaattttctacgaactcatcgccgaagtaactcaagttagccatacgttggaactaaagatgaaacaaatcattttttttaatctataatttaatgcctaggttaaggacaacgcgtcgaattgccaatcgtgaaatcgaacttgtaattttatttttgaattaaaattcgt

SEQ ID NO: 513 - DNA, 2477 bp, Aedes aegypti
gcctatcgaagacgtcggagtaggaaaaccgcgacgcgtcaacagagagagaatatcatccccggttatagaggttacagctggtgtggtagtggcggtttatgctggtgtgcgagcgtaggatagaaagaagttgttccaacgggagatccagtacggaaccaagaagaaacacgatcgcggagtgatccaaattccccgttttgctagcaagttctgttattatcatcgggcgaaatccgttcgattggttcgaatgaattggagtttgacacctttgatccgggagtgttaagggaatgttaacagctcaaaccaagtgaagattttgaagcacttgttggaagtgaagttttgcggtggtttgaaggcagaagtgtagggcagtgagatccgtagagttttgaatagcatattttctgtgaaaacgtagccaatgatcgccagcgagtgtgcccaaataacctgattccggtgaagatcgtagtgcctcctagagaacgtccagcagtgtgcgaggtatttctggaagacgaaggctcccagcagcgagagatcgtgtccgtgtgtggtggtgtagttgtagagaaagtaccctagaaaatccgaagacgaagacaacgactgcgaagtagccaagatgccctgcagtgcagtaacgctgtctctcgcgacgatatccgccatcattgccgttgccctgctggcaatcgccttctccacagacaattggctgagctacgaagtgaagcggaataacatacagacatttatagcgaaacatccggatggagcgtcactcaccgaatcgttcaacaacaggctcgtctactacacccggacgcgtggtttgttccggtactgctacccgaaggagaaacccccagcgtcatctgttcaaatctatctctccccggtagagacccactgttccaacattgactacttccctcagaccgaggaagacaagtcgtcgccaggcttcaacgaggacatcatggctcgtctacatctggcccgttccgtcattgccgccttcattctcagcttcgttgccatcttctgtgccttctggaccgggctgtccggctgctggaagcgatcagccggtgccatcacggccacagcgattctgatgctgacggcctgcttgctcgcagccggtgccatgggactgtggcatacggtggagttcttcgagaaggaaaaggtcgtcggcgatgactactaccagagctggaccacggttctccgtgacaacacccgcatctcgtacgattggtcctacatcgtggcctgggccggcgtagcatccagcttgctggcgtcgatcttgctgtccggagcggccgtatgcctccggggcgaacgcgaaaaggaagaacaactgaacctgcaatacctgatgccagtgtatcctcaaaagcagcccccctacccctatggtggtttccctcagcctcagctctacccgcagccatactatcacggatcgcagtacggaccgtacaactactaagcgcacatatatatttttttcgttagagaaaaaaacaaaaatcacacaaaacattacaaatgcaatttttggataataacgtaaccgtcgacttttgtccgttttgattaggagtctagaaatttcgtttgaaatcgtaaccgaacaaattaagaaatcggaacagtcgcttgcataccgcagcaatctaatccgagaaatagcgtaaaatctcctcgaatcgcgcgccctctattttaacatcagatttaaaaaatccatcctctcgcttccagtttccgcttttgttctatcgcatctgtagaataactctgagagacgttactagccccaattcccatttatttttgaagaagacgagagcaatcgaattttactcgaaatgagctgcagcgcgaactaggaaaacgtctactccctcaatccagactgctcctatggtcttccattttattttaaactatattctttatgtaaaatgtgtgtttgaatggcagagttggtatccgtgtcggaaaaaaagacggagatttaaaaccttctcataagcctttccctccgtttccccactcggatttcgaatttcactctcattaacacgtttttatctttgcaaatattatacacgtgaaagccggtgtcattcttatcatactctatccttctttcttcgagtgtgtgtgaaaccattctactgtttccggtattacttttttgtttaattttatgtcaactatttttaagcttagaatgacatttgctatttttgttttaagtaagcaaaagaattcgacgttagaagcaagacagaagtgtaagctcttggagaagatatttttgttttccgagaaacaagcaaattccaacggcaggtgaagtgaacaatgcgtaatgctgttttgtattatgtatagaagaagataatttaatactacgttgtaaggaaaagaaaaatgaa

SEQ ID NO: 514 - DNA, 3773 bp, Aedes aegypti
ctggccgggcgggcagctgtcatcgtctttttcttcgcgtcgttgtttgcttttccccatcatcatctttcatcagtcgcggttttagtgttgtatgagtgtgacagtagtcacgacagaaaaagtgaaaatttttctttactgcactcggaaaatatgcactaaattgtgcaatttttccgttccgttcttgtgcgaaaccgagtgcattatggtgcgatagcttcggcccggctaggcgtgtgaaatagtcgtgaaattgtgtgcactagttagaacggtgaagtgttccggaggaaaaaaaaagatccgcggaggagttttcccccagagcgagaagtgcgaatcaaaaggaaaaaaaaacgtatcattgaccccttcccgtctcggtaccattttccgttttgtgggagccctaagaggaggagcagcaggaggaaaggttgtccgcggaatcgccgatatttggactaggaaaagctttaaaaaggagaacaggacgataattgtccaaaacactccacgcggtaggattcgataccgaacatggaatcagctgaacccgatgccccgcaggcatctacttcggcggcaacaatggccccgtcaacctccagtggtggccgaaagcgtaagctttccgccgacgaatgcaccagtgagcagccgaacatgaagatcctctcggttgagctgtccgacattgagctgcaggtatcgctgatggacctcagcgacgaaattctcatggaaatcttcctcaatctggatagcaacagtttggtcgccctgtccgagtgctgtctgcgtctaaacaatctggtcaaggacaagaagctctgggtttcggccgatttcagctcgtcccggttgggcacccaggaactgcaacgaaaaatcaaacacctacaggcggaaacccgttcgctcaagatacgaggcctgaccagtttgtatccgctggataagtggaaaaccccgacgctaacggcgaatctgctcatgtggatcaacaagtactgtccgcagttggaacacttcgagatcaacgagggctattttgataccaacaacatggccatcatttcgtttcctccgagcatacgaaccttggtgttccggaaatgcgaggcggaccggtcgatggcgtccgaaattaggatgggtttcctttcgaagatcgatagaactttgcaaaagttggaagaattaacgatagaatactgcagttggttcgacacgcacgattttatggcactgtccaaggtgccacatttgcgctatctgagtttgcgtggttgcgccaatatgaaggatagtgtcccgtacgctagcattgcaactcgatttggttttaagaaattacaggttttagatcttcgcgacacccccatatcggattccgacgtgagctgcttcaacatagttcaatcgctgaaggagctcttgctggaatgtccggagtaccttcggaccgaacgtggtttgaatgagtacaacgaagccgaacggcagcgcgtggaacagttgcgaagaatagccaatcaggacattatcaatatccgctatcagccgggcccggatgtggccgccaaccagcaggacaatgctcaacaagcggaagagaatgtagcggaaccggttccgccgccgcgtccccccaggccacatttcctaggcgagggccgaaacgtgttccgtttcgtcaatcgacatttcttcccgaacttgtacgaaaatgcaggcgagaatctaattcgtttcataaaccgtgccgagttggatcctgccgctgccggagggaatcaaccagatcagcaacaaccacagccaaacaacaataatgaagccccagcggcggcagctcctccggcaggcaacgaagaaccagcacgaccaccgcctcctgtcgccccactgcccccagtgccggagaatccggaaattcgccaacgtcatgtgcgaatcgtgtacaacagacacaacatcatccggatcgtgaaccatccggagcggaacaataacgtagagaataacaacaatgagcagcagcaacagaatcagcaaccgattgggcgacttccggttgaggtagcttatcagcaaatcttcgaagcaggcaatagggatcgtgtagaaaatggaccagttgcagtcgcggcagcggccccacaagccgaagggcctgcccaagcggaaccaagaccagtagtagcaccagcagcagtaatagtagcaaatgggccagtgccggaagcggaagacaatgccaatggaaacgagaaccaaaacggtgagaatggggaacgacttgcaccggctgcggcggcgcctgaagcgagagaaccgcctccactacagccacaggaagatgtcaatgttcgtgtcattctgcatggggccatacagaacaaccaaccgaggatgatgccacacgtgatcatcgtccgaggggagaacaatcccgcaggaggagcaggtgaggcagccgataacaatcagcaacgaccggcgaacgcattctaccagtatcttaacctaggtccaggcgctcccggaccgaactacgtctcgctggtcagcgatcgcggcgtttgcgcgtacggcgtttcacggcacgaactggccggggcggccttcatccgcgagtacttccggccgaacaacaccagcctggagcgactgttcgtgcggaactacaaactggttaccgatacctcgttggaccacctcgaatcggcagcaccgcacctgaagctactggacgtcaccggcacctcggtcacggcgcagggcgtccgtaggttccacctggctcgacctaactgtaccatactttcggactttgaatagactctagtgtgttaacttagattgtaaaacgtgaaagcagcagggtaggacactgtgcgtattcgttttagagaagacaatttatattgatctgaaccccctattgaaaaattatttaaaagtgaattttatggactaagttattggattcaaaaaaggaagtgaaatttccggacaaatgaccgtattcaaaatttacttttaagcaaactacaaatcatttttatgactataggaagaacattttttattttaactatattttttattttacaaaaaaatccaacttatacatgaaatacgccactaaattatcctagaatcattacaatgattgaaaaataaatgtgcagtatttaaagaaaccgcccaggcgttgaactttgtccttattcttcgaaaatcttaaaatgtaaacctctgcctcctacttcttggcatacctggccgcggcagcatcggacgccgccacaaacgtccgcttcagtttggtttcgcgcgactgccggtactcggccgccacgtccttggacagttccgcaatcagggtcatcgtctccgccggatagcgacagcccagaaactccacgttggtgaaaacctgcgccaggcaaaccagctcgtcctcgctgaagcggtccttgtgccgttccatgaacatacggcgcagttcccagtgttcgtcgcactcgtagaaggtcttgtacttgctcacgtcgaagctggttccggcggccatatcgaggtggatcgtttctggtggatgttcctgtactctagatgactgcttctagctggtggcgcctttttacggtagttgttctgggcttgaacaggaaccggagaatgcggaactattccgaggcctagcgggttgtgtacgatttcacggactgacagatgaagacatcattaacgag

SEQ ID NO: 515 - DNA, 1961 bp, Aedes aegypti
tgaaatctggcatgtttactttgtgttatagaacttacaaatgaacatggtatttggattaagaaaaagtttcaagtcaagaaaaatctgtcaccctttaggttgaattgatcattctcgtacgcgtaaaccggcgacgacgtcgcatctcctgaagcttcgtttgatccgcgagacgcaccacagccgcgcactgctgctgtttcctcttttctgcacaacctgcgacgcttcttggccaattagatataaataagaccactgtcataagcaactgccgtagtcccaaacgtagccacagcctagaacgatcgcgccatcgtgtggcgatatccgtgtccgaccggtggagtaatacctagtagtgggcgaagtgcttctagtatccgcttacctgagcatccgagcattacggatgtgcaaggtggttcctacgagaaggtgtgaaatctgatcagatcatctggggttgcttgaaaaaaggtgatccgtgaaaagaagagcgaaaactgttctcgcactgctgctgctgcgtggatcacgttggcggaagaacaaacagactgaagtgataatagctggcgttaggttgtgtaatcgataagatcggggaagaactgaaagtgaaatttattgctgcttgaaagccataaccaatcgacgaagatgaatatcgccgccttaatatttgttgccctggtggcagcttcacaagctcaacaattcaacggttactactacccaaagcccagctgcgactttggtgtaccgcaaacagtgtatgttacccgaactctaaccgattaccaaacccgtaccgaaaccgttccaggaggaatccaatatgatgagcaaaccatcacccaatactcgtcgatctacataacatcggcctacacacaaactgttccgatttatcaaaccttgactagaactaacaccttcactgtaacagcccctccaccacccccacgtgtacaatatagcactatcacgcttcctccggtcgtctcgacttacacttcaacttacattcaagctactcctgtttatcagaccatccgagacgttagtaccgtcaccctaccacctcaaattttacccgcacaaacctactatgacaccgtatcaatccctccagttaccagaacctcaaccgttgttcgtactagcaccgttccagttgtacaaactgtgcgtgacgttgttactgtagctgctcctccagtaactcttccccctcaagttgtctactccactgtacagttgcctcctcaatatctcacttctactcagtacatcacctcaacgaaaccggtagtccagaccatccgtgagacaattacccgacctgccgtcactcttccaggacaaacctactataatactatcactcagcctccagtcaccgttgtttccaccgtagtaaataccgttcctacccccgtctaccgcaccatcactaacacccaaacagtcactctgccaccaccacctccacaataccaaaccatctattccactgtaactctccctggtcaagatcaaaccattacaaactaccgtacgaccaccctccgagatgtccagtacctcacccgaaccgtaacaagcactcttcctggagtgcagtacgatgcacagaccatttattccactgtgacgctcccagctgtcacaaagaccttctgtggaccggaaaatacgtatcttcccgcagcaaacgacaacaccatcagcaaaagtggatttggaggtttcaataggcagtacaaccgtttcttctaaattagatgatagcgacttaggatgctgtaaataaaatactctttgtaaactgccagtagaccagaacggaaagaaaaactctaaatgtaaataagtgcatgaggaatttggacaatttcaaattgcaaacgaactaagatagtatacgaataaataaatgaattgagcgaaaa

SEQ ID NO: 516 - DNA, 2031 bp, Aedes aegypti
atggccacacgaaaacgatccggttccggttccaagcgcccgaaggaaaaggtcgtttacatctacgagcttttgctgcacggagcaaacgcggatcaaaacaaacagaacttctgggacgagtttttcttgcttcagccaaacacggaagccttcgagtcagagctgcaaaaattggattcgtcgaagctttgtgcggccaaatcaaaccttctgcttctgctggagaaatgtgtggatattatggacgtgaatgatgtgaaaagaactcacaatgccctgattacgcttagcatccttacttatacgatgtttaaaaagtacagcaattccgaagatggaagcgtcgaaaatatgtttgccgagtttcgactttgcgacgtggaagaacatatcaaaaagttggtggagaaaatcaaggaactgatcatctgcgataactcggacacgttgcggttctactgcctcaagctgctgtttattgtcggttccgggacggacaatttggacgataatctgctgctcgagtacatcatgtcgaacaatttgttcgactctctgaaaaaggttctgagcgattcgacggcacggctggaacacggacacgatatcgtgattctgttggcacttttggttaactaccgaaagcatgatgctacaaatccatacgttgtaaaattgtctctgctggacgacgaacttgcgcttcacggctttggacacgtgatatctgccacattgttcgaattcattaaacaacaaactacaaacgtactagcagtacaaaacaactcttggataagttcgctatcctcgatggtaggaaacatgttcctctctgacgaagtggacgaaaagatgtatcaaatcagacaaaataatgccttgctgttagcactgtacgaagcagtgcatttgaacagaaactttatcactacattggccaccactcaagcagagtcaagttcgccgccctcgccgtcaaacaccctcaatagtcatcattccatcagcgacctctcgtcggcgcctatcatcgacgtgacgcagtatccaacgaatttactagtggccgtatttcagtactgctcggttgttatgatggatcataagaacgaatcgagtgccgtaaatctgaagctgtgtttcataatcctaacatgcatatcggaggatcaatatgccaattcgatgatgcatgactcgaacctgacattcaagatattcctccacagagcacacatgcgccatagaaaagcgaccactgaccgagcctcgcggccacaaccactagctgcaacattattagatttgcttgttgagtttattgtttcccactttatgaaaaagtttccaatggagttgtacttgctgtgcaccggaatcatacatcgcgtcatcgtctatcaaaagcgctgccgcgtacgacttatatatccttggaaggaactgtggacggccctaataagtctacttaagtttatcgtttatcaggaacaaacgttagttaaaaagtgtaacatatttcatctagctattcaggttgttaatatcttcaatctttttatcacatatggtgatacctttttggcaactaccagtagctacgatgagctgtattacgaactgaacagggaagagaaagtatttagtgagattcacgctatggttctacggtataccacgattgaagagtgcgaatacaaagaagatgtatttaagcttttgaattcgatggtgaatattttggcaatcatcaagcattttcagataaaaatcaaagagtggctatctgctgaatctttatccaccccaacggaggagcaaatattggcccaaatacagaaaaactacgatctaaccttgaagctgcaggactccttggagtttttcgaaaggtacacggaaaaaccacatgatctatttttccgaaatttggtaaaggatgtagtcattgatactcgaaaatcagtgtatagcgtgataaagaactataacgccaacaaatcaaaagaaatttacgaacaataa

SEQ ID NO: 517 - DNA, 2148 bp, Aedes aegypti
ttttttttcttcggtaagctgtcaaacgcgttaaagttggagagaaacgaacaaaaacaacactatttttgatttattatggaccgaaaagtgaaaatttagccaactaccgtcgaaaattgaagaaatcgtgcgtcaactcggatacggtaattttcaccgttgtagttcaactagtggaaaacatgttcgtgtgctgaaccagcaggaaaaactacttgtggaaaagtgctcaacttgtactcaaccaactcaatccacaaaaagggaagtggaaaaaaaaatcaacatgtctgtggtttgatgtagttttgtgggatttttttcacaatcgggacaatcgtaacttattttgaaacaaacggcgtaattccgtcccgattgtttgtggaaaaccagggtgttgcaacaacgtttttgttcggctacgttcacacaatagggttctaaaggttaacgatgagcaactctgccggaggatttcgaggtcccggtagtgccgggagtggccgaccggagcctagtaagcgtttctcgattcacgatgccttcgaggaggaaacggacgaggtcatcaaagtgtacggatcgactgtgatatcgacgcctatgcgggccaaggccagatctccggacgatgtgtccatccgggtgcaccacgaccaaagggacagtgactcgctgatacaggaatacggcaacctgtcgtccaacgacacctacacctactgctggcgccacccgaaggttcgggaaaattggcgaaccgtcctggcggcagccaccctactagtcatcggaaccggcctgatagccatgggggcgtacgccatcgccgaaccacacaacggatcccaggcagcagtcttcttcgtagcgggattcatctgttttgtgcccggagcataccacgtggtgtacatctggttggctgcccggggctaccggggattcgacttctaccatttgcctttgttcacgtaagatcaattctaatggctaggaaatgtgctcgaaattatacgaaatagacaagtttgctcatgaatccttccctggggagaaggatccgtagaagggcttgaaagaacactagatagttcgacggtaggtaactcgactagacgagatgtgattaaattataagttatttaggtaccttttatttctttactgttttaatacactgttagagttacgctgctatatacactgtcctttgtatagtcacttttataactaaatatatgggataattttataaccaccccaactaaataaaactaaatcgaattggcgattttttgaccacttttaaatgaattctattgttttgattaaaactaggcgatgaaaaattgaagaagtgttcattattgctcgattgaatagtcgttaccttgttacatcttccgaatgaacggaaaagatctttgaaccaggtaatagatcttcctttgcgagagagtttgtcttcttatattgtcatatacgccaggtctggcagcagggttctttttagatacttgatatctattttattgctagtcccaaaaaaaatcattattttcaatggaaggtcttaaatacctaattaggaatatttacaggggttacttcaaaaattttccaaaatgcctttccagaattgccttcaaaattgtttccaccaattccagtttccacagtttttccagtaattacttaagcagatcttcacatttctacaagactccttcggagaaaatacccccttcaatttttgttgtaaaaattcttttaatgtatttccaggaactctttcaagtattgctcaagaagtttctacgtcgatttttagttagttctccggccatttatcaaggttgagaaacagaactctaaataacattcataaacggaaattgcctcaaaattcttgcagagattacaccaggaaatgtattaggatctcttctagatattcttccacgatggcgtttacagtttttttttcttataaacaatactcgagtaattttaaaggcaaagggttcatggattcttcataattttatttgaggtttcacatcagtgaatactaaagaaattattccgatcatttctaaaagtttctgcagggattctgttcaatgttttttttttcaa

SEQ ID NO: 518 - DNA, 960 bp, Aedes aegypti
atggtgcagcagaagggacgtgaagatgatcgtatgagctgctgcagtgaagatagtgaactttcagtaggtcaggaaggactggaagaaagcgataaaactatgaacagtgatgaaaaacttagtgtaaggcataatgtagaaatgggtgaagaaatgagtaatgattcttcacggtattcaagttccaaggatccgtcggaggattacatgaagattccactgatgcgaccaagcccaacgcgattgcatgaagagttccttagaaattctcaactgtatgctgaagagcttatgcggcaacagatgcagattgtcgctgctgcgagaggtctcaatttaagcccaaaacctttggaccctggcctcggactgacaacgtcgttccgaggcattcattcacatttgagcgccatctcacaaataactcagaatctcaacagtgacattagtaagctaacctcccccgcaagcctagccagtatggcctctcgggaaaattcacaatcaccaccgcaacatcccgctcatctgctacaaatcaacaacaacattgccctcaacgatcaaaacctcaagttcagcatagacaacatattgaaggccgatttcggccgacggatcacagatccgctgaaacgtagtggcaaaagttttgcgaaaaagccgtcggctccaggcgaaaagtctaccgcgatggatctgacggcaatcgttaccaatggcagtgcaggcaacagtgcaagtgccagtagcagtgttgccagcagaagcctaagttcaagtgctagtggaagtgaattggaagtgcccacgtcaccgtcgtcctctagcggtaagacggctgcggaaacgagcagcagtagtggaagcggtggaagcagttcgtcatcatccggagggccaatggtctggccagcctgggtctactgtacccgatacagcgatcgtcctagttca

SEQ ID NO: 519 - DNA, 855 bp, Aedes aegypti
agaagccatcgcgctaaacacttttgttaactctctgaagaagtagttctaatcggcagagatcaacgtcatcggcgtcattatcaccaaagatactgtctaagtcgcatacgccagtgaaaaagtccgcttaaccacgcgcttcgagataaaaggcgataatttaatctataaataataatcggaacgatgcagtgcaattggaagccaacaacaggccaccatttattgacttaaaacttttggattacaaatcttttacaaacaataggtcgtgccagttgagccgtggacatgcgaaagtgaataaacattgtgcgttgacctcatcctatataattgagatttcctgcttagagaactgtaaccatcgtcataccggttcaaatcatgcatcatccggagcagaaacagaacaacgacgaagtgctggtagtgaagcatgttcccgggacggccgagttggacactaggtacgatgtgctgctgctgtgcggattcattctgacggtgatagtggtgggcatgatcttgcggttggccttacaagtcacccgagcacggttaattaccaccacccggtcgaatcaagacgaaaccgccagctcggatggctcagtgctcagtttagtgctcagaagatgaaatgtaattagcgattgagaccgttttataacatacctatctacatagatacgctcgtccgcatgtcgtgagtgagtgatacattttttaatacgatcacgttcaatgtgataccggcgtgatgtgttcgaatgtgacacacataatcttaagaatttctaatcgtaaaacgttcatctcaatgaaaataaagaatgtgtgataaattat

SEQ ID NO: 520 - DNA, 1469 bp, Aedes aegypti
gacaggatcatacaacgtgctgcgacgacgcacggtgttactaaactctcgagttgtgattagtaaagttttagtgtgattgatttcataagtgataaaagacgcgagtgccattctagtgggcggatactagcctagtcgcgaatatgattaaagtaaccaaagcaaccggggcatacgcggccctggtttccgtcgtgtctgggaccatcgtatggttcaacttccgaccgttgggaatattcttcttctccggattggtggtgttttggtgtcggcagtacgccaatctccgcctacagatgaccccgctggtggaggacaagcttcgacatctgggccgccgggtgctggaattccgcaataaaaggcctggcctgttctgtgcgctcatatcgggcttcctggttgtggtggccgttctcgttcacgtggtttccggggcgtacatcgtggtgacgctgctggtgctgtccatcgtggtttccaccaagtatgacatcaaaatcgttgtcgatcgtgaacaaacatcaaccccactatcggcaagtctcctggaccaagaggtggcagaattcctcccagagatcaacgaggccagtgcatcgctcctgaaacaggtcggtgaggaagcggacgtcagcgccgtctacaagacggacagcaccatcagcgagcgcaaggcaacgggcgacgacgacgatgacgacgatacctattcggatctgctgattccgcagaacagtattaaggaattggacgaagccgaggaagaggagcaatccaacgcgtccagcagcgacgagttgttgctcggcggtggcgatctgccaagccactccggtgagattagatttaagagtggccatttcaatgccaacacttcctccgattcggacgatagcatctcgcgaggtttgagcttcgacgacgtacccgacaatgcgggtagtaaaaaacgaagctaccatcatccgcagcagccacagtatcaactgttggagcagcggtcccaacaaccggtgcagcaggatcaactggccagtctggcgggaagtttgctatcgggcggtgtgcttagctaccttacctctgccatggccagcgcttcggcaatgagccagtcccatccggctccgagcctcaccaggcaccccaatcggatgacggtttcctcggcaagtggcgacaggcgaacgttcgccggagattcaaccgacgaagacgaggatagcgactttgaaatgctgaacccggacgagctgaacaatgtgtaaaagacgcgctcggaaatgcaaggtactttccggtgggatattcgtatgtgatcgattttggtttttgtggggcagtgatctgatattttgataccgttttgggggataattttttagtttattttgttattgatggatacagtatgattttgaactagatttgacgatattacatatcttcgaaattgttca

SEQ ID NO: 521 - DNA, 408 bp, Aedes aegypti
aaacggtacgattttgccccggaaaacggttccggaacgggttctgggcggtgccgatcgattccacccccggaaggacggattcgagtgccaggcggacgtgaaaatcgtgccggaagtgtcgatccgtgtgaagagtgtcggtcgcctactagaaggcaatcgaaatcgaatctcgaatcgaccgcggagtgtgtgtgtgtgttttgtgtagttgcagaaaatcttcccatccataatcaatccaagacggcggcggaggagcgttttcttgttccgattcccatcaagcctgtccgcggtttggaagttggaagaagaggaagaaccaagggaagaggttgcagtggaaaaaagagttttttggaaaaagattcgtgtgtcgtactagaaaaaaatgttaattga

SEQ ID NO: 522 - DNA, 1756 bp, Aedes aegypti
atgatgcccacgattctcgcgcttagcttgtccttgtgcgaggggaaaacgcaggcaggccaacgccagtggggtatgttttccacggaaccgcacgctttgaccaacaacaacagcatctgggatgctggggggttgataagcgagagcttcaccacaacgtgtttccatagcaatacgaagttgggcaccgggagagttgttttacagattcatgtggagattgcgagaataatgccattcgccgttgttcaaacaactaacgcacggggttgcaatgagctgtcggtagtacctgcgtcgtggctgcggggatcaaggagcggaaacattctgctgtggccaaatgtgaagagtgtcgcagaacaggaaagattactccgcgacgaaaacagctccccgaagaagtcctgggtgaaatataaatgcaaggtgaaacggaatcccatcgcatcatttaatgccgcgaagcgtatgctggatgatttatccggagaatcctcatcggaagtcagcaatctagttcgacgtaaacgaaaacccaaaaacaatgaggctaataactttcaagaaatgctcattttaaacgatacgccttgctcatctgctgcagaaacaacctcgtcatcggttcccattgtcattgaggtaagaggaggggttcaaggcgagattcaggatgaatttcctcgaggaacaacatcttcccctcgacaaccacccgccaccgttttgacaaacgttgaggataatgttcaaaatgcccaggatgaaatcctccaacagccactacctgtacttccagtcaatggcatcacgacgctgtctgaagataatgtcccggaaattcagactgttcagtatgtggcgtacgatactgcagatactgtggtggagccgggaacgcaacagtgttttgatacggttatcaaacaactgcaagaaacaaacagcagactggaacgactggagaagcgtatagcaagtattgggactcaaaacgaatttatgttagacgcggtccgaaagttcatctcccatacgacgaacatcgaacagccatcgtctttctgtttcgaccctatcaaagatgagaatgaattggctgatttggaaaataagctgacggacaacgacttcaagttgaagatgattaattggttgcggttgaatgtcagtggcgactgtgcggataatcgcatgcttggagtactcgatttgttattcagcaaggaattccaaacgaaatgcacgtggactggagccagtcgtaaaggaccaaaaactgctataatgccaaatcgacatgttctgcaattatttcagcaagttggaactgatgagtctgaaacggtaactcaacataaactggccagctttttcatgaaaaagctaaaaaattctctcaaacgattactcacaaccggcatgcgtcgtgggacaaggcatgtgagacggcgaaagcagcaatgtgctactaaagatggtatgaaactcgagccagagttcacacctgaagatcatgaggagaatcacagtgatcatgagtccgatgaacatgtttcttcggtcgttgattcgtctgatgccattgaagctgtagatatcgagtcagactggaacgatccagcttttgatgattccagtgaataacatcttgcaacgttgtacttgattaggagccgactgataatgtatctgaagagatattgtaggggagctaggggcaaaataacacatagtaaccaattataac

SEQ ID NO: 523 - DNA, 576 bp, Aedes aegypti
ttgttccacttttcgtttcaggacgtcgactacgagggtttccgtaagtttctggacgcgttcctcgactgcgaaacgccggaggaactgacgcggcacctgttcatatcattcctgaagccggccctgtatcaggcccagcacagcagccatggcaaggcgctcagccagatggcggcgatcagcagtaatgccgcctgcgcgccggtcacgtctcacaatcgagggtcgattcccaaccttaacaacattatcgacctgcccactccgcagccttcgcaggaatcgcagcgcaacagtttcgtcgatcggatacagcacggcatcgcggacaagcttcaatcgctgggccacttgggacatggcgacaccagcgatgggagcaggcaggggaaaagcgtgcacccgatgttgacggttacgccgagcccgatgggaggcagcacctcgattctgccggcaccgttccgaaggtcggccgattcgagtccatcgcacagccacagtcacagccactcgcagatttcccggaactcgtcccgcaagagcaacaattccgtcaactgtcggatagaa

SEQ ID NO: 524 - DNA, 1035 bp, Aedes aegypti
attgtgaagtttaaaaaatatattgaaacactcaccacgaaaatactggagcctatcttttaccttctgtaccggtatcgcttgaaatggaaccacaactggaaaatattgttgtgaaattgacagcggaaacctcgcttgtagctgaattcccactctcgatttacgattttaaacgcaatgtcctcgtaaggtggccccgcgtgaaaccgcagcgttgcaaagtccggattgtccgagcaaggtgtcaggaaatattgtggcgtagaattcttattgatcaaatccggatagaaaatattgaacttgtatccctgaacgattttcggaggaggattatccatatcgtagtgagtttggttatacttgttccattcgaagccagtgtggacacgattgaagtaacgcggcttcctaggacgatacttgtcagaccacaagtagacttgcgaatcgactcgggattcgacggaaaattccgcttcatcatcgttcattcctcgttttgcttccttgcggaggataagttcgtccttcgaaaaagtttcatcctcctgattgattcccaacactttctgtcgaagaagatccaacacttcgtcgtctttttcctcggacactatctccactcccgcttccaggtcactctcagaaacgtattttggctcataaccaccttttctgtacaattcgaagcattcattgagcagatctgattcgtgactttcctcatctttagcttgttcagtgccggattgactgctgctatctctggaggtttcatccattgcctccagttttcgcaatccggaaggacctgctccgcttggccctgcctcggaatcatcatcttcttccttctttacgcttgactcttgctcctttttaagcatttccagtttattacggagattttcttgatgacgatcgcgcaatctagcacgagccatatgagccttcagctgcgatagcaagctttcccagtaaccaatatccaacccatcctgttggctattgattttgtcctcaattttc

SEQ ID NO: 525 - DNA, 1569 bp, Aedes aegypti
ccctctcgctgctggctctgctagactcccgtgatccttatccctcgatgtcggactacttcccgctcgtgccagccaacggaccgaacgacgtcctaccctatccgcccaactccgtctaccaggaaattcctctctcgctggcgttggcgcaactaggtgaagcttccagaaatacggcacggttggcaccctacagcgatgacgagggcgagtggatgaacacgtggacccagcctgccgtcgactatctgggcttcccgacggacgttgacacactttcccggctggaaaatctcgacacgaaacccaccaagaacggattctcccatcagaagcgattcatgatcacgaagaagaaacgcagcgtgagcctggacgacgatgacgactgcaagaacgacggcaagaaaacctgtctgctgcgaaaatatagtcaattggcagccaccaaagtcgccccagcctagacagcaactggacccattggcaaactctactcggacacgagacactgagtgtgtaaatatacggaaaattgaaaaagcaaatatatacatgaaatactgcagcctttggaaagtcagtcgaaggggtactttggctctgtagaatatactgtcggagttgtgtcacccctcagacggctgcctcagattgcactacgggatggaatcaacggcaaccagcatcgcatcaacggaaactggataatgaatttatcaatatcattattattgtgaagatacggatagcagaaattgtttccttgtattttcgtttaaaaattcataaacatacattgggaatggaataacataacattgaaggaataaaagaaatgtaattatcatgatcccatatacatatttaatctctttcggatataacaaatcaaacactgtcccgtttcgatgttgttcaaaatttgtaaatgtatcgtaaaatatatcatatggctaccattgcaaatgaaaacaaatatcagacattttataacatggaaatccatgtatattcagagttctaccaattgacatcataattactcaatttagcaattaaatataaacatcactatgacaaaatgcgataagattgcggttcagaggtaaaaattttaattactagataaatgaaagctacattatataaccccaagcaaatgacaagtaaatatctatcgtataatgatgctgatcgttcaaaatccacaataaacatttattacccaaacgatgtcaacaggcacaatagaaaagtaaatcaattgaatcgtgattatttctacattcaaatcaagcagttttatacccttaagttaccaaataccaccattatgccacgtaatcgctgtttcgacaaaccatctgagaagcagatcgatgcactttgatcacgagtttcaaataaaatgcccttggttggaaaacaatcgccttgtgttaaatttcattgcaacaagagcctaatattcggaatgcgcaagataacatttcgcgtttggaaacaaacataagtgtgtgagtgtttaaatgtgccgttgttatgatcgggttcacaattata

SEQ ID NO: 526 - DNA, 1486 bp, Aedes aegypti
atggaagtacacgaaaaacgacgaacatttacgaactcgggaaccgccggaagtcgcgccggcagccatgactctgaagacaagggcccggaggagaaggaaaagcccaactttgccctatccggcaagctaaccgaagaggccaacaaggtcaacggcgtggtcatcaagtacgctgaaccgccggaatcgcgcaagccaaaacgccgctggcgtttgtaccccttcaaagggtaccaggccttgcccacgatgtacattcaccggcagagctgctacctgatcgggcgcgatcgcaaggtttgtgaccttccgatcgatcacccgtcctgctcgaagcagcacgccgccctccagtaccgcttggtgccgtacgagcgcgaggacggaacggccggcaagagggttcggccgtacattattgacctggaatcggccaacggcacattcgtaaataacaagaagatcgacaccaaaaagtacatcgagcttcttgagaaggacgtgctcaagtttggttttagctcgcgcgagtacgtgctgctgcatgagaacagtaaggaggacgaggaggacgatgatgtggtggatgagaagggtggcggcacagctcccagtaatggagcttcgggcaatgctcggagcaagcgggaaccaagcgagtgaaggcatgggatcagactcgagatttgaattttacttaaattgtagaccacatggaagatgaaaaagaagaagacgaaatcaacatagggaggaagcaagaagcatctcccattctaagcatattgtcagcaagaaattttagaagaagcgcccccactcgttactagtgtgtgtgtgtgtcactgtaatagataactaccaaccaatatcaagagaggaatccacaaataaaaagtattctaatcacatctaaacacgtccagtgcaaaatgtgggacccgatccaggccaggccgggtgccgtcgtcgaactatcgaagaaaggagcaggagaatgaatgcgttgttgtaagttgccgttttgacgacacgttccaaagtcgaaacctgtgatatgcgagcgagcgtttgaatgcgtattctcagtaatccacctttcctgcgggaagtatgcgaatcaaaactttcggcgaattgtatggtggcctgattcggtcgagggccagcaacgaactacctgaagtctgcggaaaaactgtcgtcgctggaaactccactatgtctacgaagcaacccgcacatgaactcgaccaaaattacatcctgaactctagatctacaagtaatcgctgcggaagatctggattagcaagaaacttgccgaactgaaccgtttaattcctctgtctagggtttgattatgttctgttggagccttcgataagctggacttggagaaggtcacccgaacaaagaggaagcccagctggaaagtccgagcaattgacgtgtaatcgcggaaaatccaatgacgcagaga

SEQ ID NO: 527 - DNA, 464 bp, Aedes aegypti
gctaatcagcaactacgacgacaatgaatgcaatgcaaatcagtttcctggtgatcgctgtcatggccgtcggagcctttgccgtgccgtttgatttcttccagctatccggatttgatgagtcaaacaaccagcagaatttcgaagatgctccaagcagcgttgaccagtcgcgggatgccccagttgaaccggaacgcgatatccgcattgaatttgaaccggaccaacaggaggaagtacggcggggagctgctatcgaagaagtgctgaaccgagacgatgccgcccaaaactcggcccatgaggattccagctcgtcggcggtgatgtccatcagtcagcgaagaattgctgtggactcagttcattagggatgagagatttatctcttataagtttttttttttaattttgggtcttgtagctttaggtaggtgagaataaacaatattatttggccc

SEQ ID NO: 528 - DNA, 1513 bp, Aedes aegypti
tccgatctgaaccgccaactgtccaagtggttggacgatgctgatttgactttcggcccggcccgtgcaattatcgccccgcacgccggctatcgttactgtggagcatgtggcgcttgggcttaccgacaaattagcccagctgttgtgaagcgcgtgttcatactgggtccatcgcatcacgtccgattatcgcgatgtgccctctcggcagcccagtactgtcgtacgccactgtacgacctcaaagtggaccaggaggtcaatgccgagctggaagcgaccggccacttcaagtggatggaccagaagacggacgaggacgagcacagcatcgagatgcatcttccctacgtggccaaagtgatggaagacttccgcgaccagttcaccatcgtgccaatcatggtcggctcgatcagcaacgactgggaggaaacgtacggcaaaatcctggcgccgtacctggccgatccgcagaatctcttcgtcatttcgtccgacttctgccactggggggcccgcttccggtacacctattacgaggactcgcacggtccgatctacaagtggatcgaggtgctggacaagatgggcatggacctgatcgaaacgctcaagccggaaagcttcggcgagtatctgcgaaagtacaacaacaccatctgcggccgacatccgatcggtgtgctgcttcagtccgtggaggagctgaagcgacgtggctaccggatgagcttcaaatttctcaagtacgaccaaagcaatcaatgttgtgataagaaggactccagcgttagctacgcctcgggttcgttgattttcgaatagaggtcgcacgcgctcctcagcgcccggcagttgaaaacactacaaatgtattgcataagttaggaagcacatcaatcggaacaaaagcagagtaacaaaagcgtaaggtaaaacaaaacagattgtttagagaagctaataacaataaatcggatcagagaggcacggatttaggattgcgagaaatgacactaaaaatgagagaaagctacggatcaagagacagaaagaaagagttttaatatatacaatttccgtcaaacgaactcatatgctgattaatatatgattatatttacttatatgtactgctagtgtgtgtaatccagcaaaataacaaaccgtgtttgtctcatcgtttttagcattagcatgtaagtgaagcagagaaccccttccttgatggtcgattttagaataacaaaataaaaagcctgtcctcaagagtttttattcggaagtttggaatgtagattagcagattgagttcaatgttatgtataggtttgtctctttccgttcattgttacgagaaacatattttccactcagagaagcgaaaaattactatgttttgcttcgatcacaggttcggccctgtgtaatattacaaaacccgcctgtactttgtatttcgaattagttgtttgagtgaatacaaatattcttaatggaaaataat

SEQ ID NO: 529 - DNA, 2431 bp, Aedes aegypti
atgtcactgcaggtgcaatcaagtcagcaaccgacttccggtcgtcgcactccccagatctaccaaaatcttggtagcacaacccctgcgacaacgcctcccaccaacggcaacagtggcaaaagtgcgtccaaactgtccctcaaaagtggcaagcagagtccggtggtggttgagcataccacggagcctacgacacccaaggatgtccacaagacgaccacgaacgtggcggtagcggtcaccaagctggaaaagactcccacgggtgccgccagctctccctcgaaaactgacaagggaaaggaagagaaagacaaagcggccagcaatggagcctcaaatggtacccacagtgaaaaggaaactaacggcaaacaggaggaaacgcccaaagcagcttccgaaacacccaagaaagaccaagcggaaaaagtggccaaggaaagccctcgagccagtcctcgttccactccacagaagcaacaagcggagtcgattcccgtggagcaggtcaagacccctgaaagcacaagcaagaagacaaaggaatcgcctatggtaactccagtggctgccaaagttgacgaaccgaaggccaatgaaaaagcagtgaaggcatgtcccgccgaaggagacgagatggaatcgctggtcgttgaaccatccgaatatgaagattctcctatgccaccgcgtaccggaggcaaaactaagctgctcaaatattccggagcaccaccgactcgggcccgcatcagcccattccgtgttaaagaaactacagccaatgcaagcacgattgtaaacctcagtaccgtcagcgaaggacaagacagtggttcaaaagacacctcactggactcggactcgcagcaagtgcccgctttaggcgttcgtccgctacgtgcaatctccggacggcgtggaatgcgccccatcacggacattcagttcacctatcgcaaatccaccgaattgaatgattccgcatcgagtctgaacgtaaccgttggttcagagatccacaacgacagtctccgtacgccagctccgggttcgacgcgcaaacggaaggccatgactccagagtccacatccgatgcgctagacgtgaaggaaatcgttgacagtccgaagcgtactcgtttggacttcagcggtttcctcggaattgttgccagtcccgttactatgctcaagaaccgtctttcacgggtacggctccaatcgagcactccggttgccaagcgtagctttgacgaggaagatccaaccaagtgtgtccaagcggaagccacgaccactactgccaacatatccggagagggggccaagatggatgtagacccagctgcggatgcaacgaacgacaaggttgaggaagtggaaaaggctaagggcgacaccgagggacaaaccaccgatctgcctagcgaggaagacgcctcaaaggtggtggagggctccggggatgccagcgaatcaccggtcgaagtgaaggatgtctcaaacaagcgacagttttgtgttgttatgtaaatcaaattattgttttccccccttcttaaatccactctctcgcaacagtcttgctttatgtaccttggtccaacaattaccccattttttgcccacctgatcggggctgctatagctcttatgaaccgtttataaacgcggttcagttgaaagttttagcaaatattttttaaatcgaaagaacaaaatgttcttaacaataaaaaaataaaagatatttaagttttttttagtttgtctaaatctctttgattgctttcccccttttacgattccgaaccacaaattatctacttatcacgtttattttttatattatcaatatatgagatttgttataagtatttagagatatcccgtaaacgaaacttccatgaaggagaatccaaaaccaagttaaaattggaaacaacagagaagacgcgtgggaagaaatccttgataaggatgcaatttgagtagacatatgaataacaattgaaaacgtttgggagtagatgaatggaaaactcatttcttagttatagtaagaaacagataaaagacgctggtataaaaagcaacattgtgtcactaaatcctgtattcgtctcatgcgtctacattggtttgagaacaaatcggaacattaggcagcggtatagaaaagaatcatgagtcaaatatgggaaaagtaatcctgccctcattatcatgcaggcaatttgagaatactacctactcgtagattaaaataagataatcctcgatatgaatactagaaacactttcatagcgcaacattagacatgaaaatatcacccgtaatcgaaaaagagtaaaaatagataaaaaaaaactgtaaaacttaaaacaatcacaaaaatatggaataaattagttctaaaac

SEQ ID NO: 530 - DNA, 827 bp, Aedes aegypti
atggaggatgaacatccgcagcagcaccatcaccatcatccgtcagctcagctcacctcggacagcagtgcaccgctttcgtcaacggcaacgccttccagtgcgtacatcgtcggcaatcgtttcttcggaccggatttcaacatggaacagtacaaaggttacttctctctcgtagacatggccgcagacaacactgaccgttcgcctcgaaccccgaaaacaccttcggcacggtcagtcaactcagccgaagagaaggggcaccgcaagattctggagcagcgccgcaatttggttatgcaactgtttcaggaccacgggatgttcccaacgtcccaggcgaccaatagttttcaggtggcccacagcgacatctttcccagcaaacagagcttgcagctgaagatccgcgaagtccgacagaagttcatggctcaaccgcctggctttacgccacactcggccgggccgatcacgccgaccgatctcggtgccggtactcaaaacgatacggcgcaacaggaataaacagcaaagcaagaatccgtttgtcaatactttttacaaaagcatttcaaaagccgcttatcctcggtagcattaaactacatatttgcaaaatgcgtggcgaacctggaatgctttccgcagaactcatgctcccgctgatagaaacaaaaaaaaacaaatagataataattatttactattacaatcactactcaatagcctaaacaagatatactggaactaaaacaagcataaaaaaaaacaatagatgcaacaatttaaatctaactcacccatactttcacatagccgtt

SEQ ID NO: 531 - DNA, 373 bp, Aedes aegypti
atgaagacaattttgtgcataattgggctgatggtagtggtttgtgacctggcccaagctgaaccggaaccagttgctccggatacacggaaagcaagacatccgtctagtggacccacgagctacaactcaatccctggtcctgacagtgaaaccttgagtaagctgcagaatcaggttgctccttcggtacaaatcccgctcaagcctattggacctcctggaaaaacttctgaagcacctcaagcttataccgtaacgtctaaccaacccacaaatcctcacccgtcaacattcactgctcagaacatcgccgggcagtactatgttgcgatgacacctcaagccacaggaaaccaagtattgtctccag

SEQ ID NO: 532 - DNA, 7845 bp, Aedes aegypti; identical to SEQ ID NO: 201

SEQ ID NO: 533 - DNA, 4555 bp, Aedes aegypti
cttcagctagtttgtggcagacgtggtttggattcgggtgagatagttttgtctgtttcgtcaagccagtgaagaatgtactgagaagaaatcgttttatcagtgccccaagtagcaaaacttctatttttcgcttgttaatcggtcctgaaagtagtatttccgatcgacgtgttgcattttatggaaaaagtggatttttcatcgcggtaaagctaagtgctgatgaggtggacccggattgtgaagtcacttctcgggtgtgtacaaagataggcgtcatcgattgtattttccggttgtggttttactagatactggacgcactgccacatgtgagcgaacaatcccgaccaactcgaaaggtgttcatttctgcgagagtgaactgagtgaccagactaaacgcagtactagcccagacaaacagattccgtgtgcagttcgcctttactgctgctggtgtgacagacagaagctaacggagtgttggtggactcacaacgtaaaagtgtcaaaaacggccagaacacgagtcgctcggatttggatttgggttggctgcatcatcatcagcagcagagcagtgtgtgttgtccaattcgataacctgtgttggaagtgtgatagaaaagtccaattactacaggttttaaaacagtgccagtgaatgttcaaggtcttctgtggttgacacatcttcggtgctattccctgggggaaggtgtacaagtgtgagattcattgctttgcttgacctaaaaaagattaacttgtgaagccagcaagtgcaacaacaacaacagtagaaaacccgaagaaaatggcagatgtagatgatgtgataagtgaccaggagaagattcggatcgtgaatgacttcattctgcacgctcctccgggcgagttcaacgaggtgttcaacgatgtccgggagttgctgaacgacgaccggctgctgaaggagggggccagtgcggcctgtgcccagtacaacaaggatcagctaacgccggtcatcctcgagggctccgggctggccgtgctcgtcacagagttcaacgatctgggtggcggccgattcttcgacccccggaccaaacagagcttcaaattcgaccacctgcgcaaagaggccctcgacctgcagaaccacgagtgcgaccacatctcggaaccgtggcgctccatgctggacatcgaaacgctaacgtactgtgcgaaccactaccggaacggatcctgctcggtgtacgggcgcagtaacaacggacagatccagctgagcatctgcatcgaagatcaccagttccagccgaaaaacttctggaacggccggtggcgttcggtgtggtccatcagcttccccgcgtccggtggtggcacggccgagctcaagggcatgctgaagctgcaggtgcactactacgaggacggtaacgtgcagctggtgtcgtcgaaggagttccgcgaatcggtggtcatcacgaacgaagccgccactgccaaggagatcctgcgactggtcgaggagagcgaacacgactaccagacggcaatatcggagaactaccagacgatgtccgatacgacattcaaggcgctccgaaggcagctgcccgtgaccaggacgaaaatcgactggagtaagatagtgtcgtatagtatcggtaaggaactgaaaacgcagtagatttattaaggactttattactattattattattattttctatgcgagaatgggggatcgtgatgtatgcagggggatagaagaacaaagtctaggaaaacatacacaaacagacacgagcctgctcgcgccggtgggatatgtgcattcgggcacgaagagggggtcgcactcgtgtcctccagtaggtatcgcttgtcatagtctcgtcgtcccacgccaagcagacaggggttaatctagctaggagagaggttatgtgcaagctaacgaaacgacgcggaaggctaaacacaattattaataaatttaacaaattacttccgattggacggaagatcgcacgcaatcaagccaatattcgacgcagtaatatagagggaaaaaatgttgtatgttttatgattggatgcaagcgacatgaaattaaggtaaaatcggaggatttttgatcattcagagggttaacgtcacgttggttttaaataaaattcattcattatttatttcgctgtttcagaagtatgtttcactggacagtataagaatcggagtaatctttatacttgactgttggtttccgtttgattacaatctgttttcctgtcggctgaagatatcattggattggcattttagaattttcttaggtattactgaatatcttcaatgaggagagctcttggcgaaaccaaaataatctgaataagattcttcagacatagcaatatggaatggctgctctgatcttctgtgcctatgttttcaatacaattcaggtgtttgtcgttgtactgctcccacatttcaaccaaggtcgggatttattcaggtggcgcagatctttttccactgtcctgcaatgaatctgtaatgataggagcttttggcgaattctaagcaatctttatacagttagtcagccagaacagtgttggatggctgcccagatcttcgttacctatgttttcagtgcatttcaggtgtttgcccaagtactgcttccaccgttcaaccacctagcctagtcgttgagacattcttgttcttactctttaacatttcggcttgttaaaagacctacgttttcggcggttgtgttgtggcggaatccatagtcaaatcctttttcagtgtacaggaaatttgactcaattttgagtttgtgacacatacccaattatacacagaaatcaagttcctgaagtggaaatatgcaatccacgttactttcagtagttcaccactgtaattggtgactgtaaccatcttccaatgtgacgtccatcttttcaaaatgctcaaaaagcacaaaactaaaccataggataaacggattcggtccgcctaacaaacagattcaaaccagcgtaattcggtaatattttgttgaacgttgtcgtcatcaaaagatatacttttgtctataatagaactactgcgctgtaaatgcattgccgtaagctgtaaggatagtaaaagtaaaacatattgaaaattataaaagaacggaatataaagtaaaatcaattatagcatacatcaaaaactcgaattcaccgacgtttggcctgcaacatagaatcctagttaaagaaaaaaaaaaacactgaaaaacctccttttctattaggtagttaacgattctacacgaacactgacactcacacatacagctaaatcggtatccttgtagaaacatagaaattgaaccatttggtatcgtagagacgatacagtgatgatacttctatgcccattgatttatgattatagtccaggtaacaccaagcacttaacgcttcaaactatcgatgtagtgcttgtacagtgctaataagtaatttatcagttctatatgagtactatatgtccgatttagcgaaacttagcactccacttgaattgaaatcatgatggcaagatgatttgattgcagacagtgggactcagaactcacttgcgaggttcttgaaagtacgaaaatttttcgattaacttatgtatcacttctagacaatgtttgaagattctttgcgcttatagactggtaaatataaatgtctgaagcattcacgtgtataatactgcaaggtcccataatttcacattctagggtcaaatagaaatacacccctttcctcagtagtagaaagtggatgcccaatccaatcattaggctttttagaaccaccccgacatctagtattacattgaaaacttaaatactaatgcaaaagtaggagaatcactaaattagctaaacaagatatcggaaaaaataaggagaagcgaacaaaacacggcattgcaccgtttcgtcaggacgtagaagcgtaattttgaaaattctttcgagtagaaaaaatattcatcaaaatgaggaagaatcgcaatttaaacacatacacattttcacacacatatacacacacatgctgcatacaataacgataaatgtgtcgacgaaagagataaaatcagtgcgttaaccccgaacggtgatcagagtcagattaagcagacgaagaaaaagaacaagctgaagacgacagaatgaaactttaagtggcaagctaccaattacagtcacaacaatgacaacaaatacttcaacacagtaaataagacagatataaaaaagcaaaaattgcacgcgcagtaaaccgttgagtaattatgaaataaacgaaaattaagcgaacaattgaggaaaagaagaaaatgcgatagcagacagacgacaaggcgaaaataaaaataaactatataaaattgaaaaaaaaaaagtaataaaaaataatgtatatttaattattattacatatatatgaaaattaaataaaaattcatataaaataa

SEQ ID NO: 534 - DNA, 4448 bp, Aedes aegypti
atgattcctatttccgttcgcataacagtcccatatattgagcagattgagggttatctggagaatgcccacatgactgtgatagaagcgctgatggtgttgtacgctaaagaagtggcttccagtggacgaatttccagtgcattagaaagaatatctggccgcagtgtgtcgcaaggcgctcagcatcacgaagctgccttactgagctggatttcgcacgtttgcagtgcgctgaaaaggcgcatcgactacgagctgactaatggcgtcggaggtggcaatggaggaggtggcggtaccaaccctgcagtcgatgaatacggtcaacgattgcagagtccgacgatagccccggtacgagacttccgcgagctgtgcgacggagtctgtttagcctacctaatatcgtactactgtcccaaactagttccttggcatagtgtcaaattcaatcacgtaccaacgatcgaggactccattcacaacatcctcatagttagtaatttctccgagcggagtttgccatactcagtgttccacatgacgccagaggacataacctacatgcgaggagccatgaagcaaaatctggtggtattactggccgatctgttcaatctgttcgagatccatccggccaagtgtgtatgctatcccggcatggaacagcagcaggtagccgagtttgatttggtcacaacaactaatccgacaatgatttattttcttccctccttcaatttacctcttacagtgacccgttcaccttctgcgagtaccctacggaagcatgtctccactcgggatatgcacgatcaacagcagccacagtattcacagcatcctcagcagtctcatcagccgtaccatcaggatcaggatgaaggagtgccaacactgtcctcgatgcaggaaccgctggttcctgcacggataagacaagccaaggaaaaaaccaacaacgactccaaagcggaagagcgaggcgatagtattccagcaggtcggcccagcaattgggaggaaaaccggaagcaaagcttttcaggtcgccgatcgcgacgcaactcgctcagcgaagactctcagctgacgatcgagaactttggtggttcgcaagaccagctcaacacgatcggacggttcgatcgggagcgcaagacctctagcgccagtctcacctcagtggaacccgttacgccggcgcggtcatccatagccgatgcacgcggctcgatccagttcgggtacgacacggattcctccggcaacgagaaacaggaccgggacaccgagaagccaactccggccctgcggcggcacaacagcaccaatctacattccagcagcgtcgagcgcgacatcatcgatggtgatatgagcgctactcatggcttcggcggcggaagtggtccggcgggtcccgtcagtgtggccgatgtggaaacgacaccacgcaggaaaacgtcgtttgcgacgctgccgaacaacaccacaacgtggcagcagcaggccatcagcgtgcagaagatggaagatgttgatgacagccagtcgggcttcgaagacgccaccaagatatccaccatcaagctgaagctggaggagaagcgccggttgatcgagcaggagaagcgacgcatggagaccgcctggtccaagcagctgcaaacggttggaaaacaagcctttttacaagctattaacaagtggaatgcacaaatcatcgaaccgaagaaaacgccagatttggagaacatggatttggaacagtatcaacaaagtatatcaaaaatgaactccaacctgcacgacattcaggccgacattcagcgtctcacccagcagcagacgcaaatccaagcgcaaaccctccaggcccagcagctgttgcatgcccaacagatcgccaacctgctgaatcaggacccccagcaggacgaggtgaacgagaagggtttctacatctcgttcgacaacgagcagccaaagcgaccgaagcctcccctccgtaccaaacggtcaccaaagaaggacaaacttggcgacgggatggaacacaacaaagaatccgaaaaacccagccatagagaaaacaatcaaaacaatttcggcacctttagcgtgaagaccgcgaacagtttttcggccaatttcaacgaggagcaagtggtgagccgcaagagcataatcgatagtgcgagttccccgttcgaaacggcggccaccggaagcagtcgggctagcaacaacaacatggcggccacgatggatcgagacattggcgagcggaggcacctggaggatgtaacgaatcacaccagcaccggcagcaatgcgatgaacaacaacaatatccatcattacaataataacaatggagatgggtatggcagcgagaatgagaaccaacggaaggccaaactagtgatagggaacgatgaaggcaatctggatccgaattccgtcgacgagatggaacggaagaaggagaaaattatgcttctttcgttacaacggcggcagcaagccgaggaagccaaagctcgcaaggagatcgaagccatgcagcggagggagaaggagcgggaaaaagaggaggaacgggcacgcaagaaggaggaacagtttgctaggcggcaggccatcctcgaagcgcacaaactcaaaaaggccatcgaagaagcggagagagaaggtaagaccatcgatcgggaactcctgatcaaacatcagcagagccaagctcagctgcaccagtccagccggggcggagacggcggaatgcaccaccaaacctcatcgacaccggcggccaagatgcgaccgcagaaactcagccgacctcggcccaagacgatacacgtcgagacgggctcggtggatctgagcgaaacctccagcctcagtagtcggggtaagaagggatccaactcgaatctgaccggaatcggcctgcacagctcaaactccatgcgacgagattactaccgaggatcgcaggactcattagcgataagagaatcaccggatgaataccccagtagcagctcaacgccgataggccgacgaggctcttacaaaactggaagagaaccggcgacgatcgaacgaggtcgtaccttatcacgtatctcgctagcgaaaggtgccaatttccggggacgtaaatccaactccctgatgaatctatgcggaactaaaactagtccgaagctgtacaaacaaccggcaacgaagtcgaaccggggcatcatcctgaatgccgtcgagtactgtgtcttccccggcgcggtgaaccgcgaggccaagcagaaggtgctggagaagatcgcccgttcggaggcgaaacacttcctggtgttgttccgcgatgcgggctgccagttccgggcgctgtacggctactggccggagaacgagcagatcatcaaactgtacggaacgggaccgagccaggtcgacgatgtgatgtttgataagttcttcaaatacaactccggtggtaaatgtttctcgcaagtgcacaccaaacacctcaccgtgacgatcgacgcgttcacgatacataactcgctgtggcagggcaagaaggcgaacctcccgagcaaaaaggacatggccctggtgatttgaagcggccgctgatcggcggtcagttacacaaaagtgctataacatgtgctgtataggaattcctgcctcaggaatctcgtcgttccaaatccacaatcgttcgctctgctcctgctgagagagggaagtaggattctattctgtgtgtgtcaaaaccaacaactagtaaccaacaaaaaaaaacaggaaagggacagtatttttcttcctccgtgatattgtcgtcgtgcgcgtttgtacgtttgtctattgtttttctgagcctcattgtgttgtaatcatgaccttataacgcggattgagaacgccaggcgaatgtgcgtgcgaagccagaggaatgtactctagtgaatgtgattcaacttaaggattagggactgcgcgaaacgaattgattatgctttccaggagaaacttgattgaacaagttccgcttgaccttccgttgcctagaaagaacacaatctttaataatccataaccattaaagcatagagtcccgtttgctttcttgtgttttctctttgtaaaaaaaggtagcttttctcttgtaaaattctaaccactttccgctgcatgctgagtaagtagggaactcaaacattaacgactgttgtatataggctattatcgatagttagctagcgctctcttccttcttctaaagttacgcgataaaaaaaagttaagttcatgttcacgcggaaaggccacttttaggaaatcaaattatcattgaacaaaacaaagttctttttgttactaccaacactatcgattgcacccaaatcaataaacgtgtagcaagt

SEQ ID NO: 535 - DNA, 1671 bp, Aedes aegypti
cttaacaatttcgtatcatatttgtttgctctgaatagatcaccaacgccgtcttggaagtcaaacactcatagcgcacagactggatcgcccaatatggatagcctaggcagcacgttgtcgccaccttcccgcgcacgcagtcgcagccgcagtccaagtgctcagcgtaaaattaaccagaacaatgaatcgacggcggcggcaacccaaacaataattggaattaaatgccaaattacacacgagaagggctacctcgcttcaccaaatttgactcgccgttcgatgtcgcctagtcctcgtcgtttagatatgaagaaaaagcaaaactcgctggattcgagttcaacggtagcagcacaggcacaagcaactactgttaataatagcggaagcaatcaactgcaccaggcaacggtccactttgagtgcgatcgtgatggttctatcataactgatagcagcaagactgagtcctccggggaggacaaaaccagcaaatacgaaaacatcagtgacaatgggagcgaaatcagcgatgaaggctatcgcagtttgggaataatacaggccaacggaacagcgacaaatcaagcacagaagcgagcgtccctgtacagtcaagcctcaaacgaagatgctgaaattagcgtgcatctcgagcaaacaacctcagactcgcaggttacaccaaccgatgaaaacagttccaaggcaaatgatgaggatttaactacaatctcggatgaagtgacagccaaatccgacgaggttgacagggtttcagagcttccggacaccgtagattccgcaggcaccccagagtccaatttcgcaaaatccggcgtgttcattaccgatgatgagatcacgattgatatcgctagtagcactggtttaagaaagactggattttcagaaaatttgtacgattcaaatggccctgtaacgcctaagccaacgactacggcttctaaaattcccaagtcacccttgccatcgaggcgcaagagcgccgaaggttcgtcaacggccgccagtgacaaagcgtcgactttgagtaggaaaatccctacttatagatctgttcgtaaagtaaatccatcgcaggatcaaaaagacaatacttggagtggcaggaccaccaagcaacgaacacctctcgcagcagatacgtttgataccaaagcaagctctccacaagttccactatcccgtaattccccagtgaggacatcccagtacgacaagaatggcagaaagattaagcctgttagcaattctgtcaacacatctccgaacaaaacaggaccaacgtcgtctttggcacaacagctaatggaagctgcagccggagcccaaaatgatacgcaaatcattgagaaggtgaagcaactgctctctaaatattcctcgaatcaaccgcagcccatgacaccgggtggaaccgagtatgacgactttactaccgcttgggtgaacaataacggagtagtcgaccggaccattagcaattcgccgaaaacgcaatccaagcgaagctcaactgtgtccaccacgtccgaaggggcgaactgcaaggaaattccctcggtcatgtcaccgcgacgggacaagggtgcctcgaagattccagcaccggttcggtccaacaccggactgtactga

SEQ ID NO: 536 - DNA, 6808 bp, Aedes aegypti
tggaatgttttcgcccaccagctctcggtcttgcgtagtgtgatagaaaattttcccccgacaacaccgtggaaaaactttcgccagttgtctcgattttcccttctcgttcgcgcacacagttgagtgttagttcagtgttcagttcatcggaattttcagttttccatttcagtcagagatcagagccccaacggtagaggcagccatcagaacaagcagaaaaaagaaatcagtgtttcaccattccagagactcgcacttttttcatgatgcgttgtcattgtgagagaatccatcagaaaaagtgaaacactcctccgcctagaaggtgataaaatccaaaattttcggtgcaattcaatgattttctcgtgggtgaaaagtgaacattttcgccgttcggattggacgggcaattaaacttccaggaaattggcattttggtgaaaagttggcgaagaaaacgagcgccgcgagaaaaagtgacgagtagttatgtgaattttcatcttattttttttttctcgccttgtcttgttccgtgtccagtcaagtgcgacgccagagaaacgcgactctgtaccgagtgatgattttgaacggattgatgaaataattgtggtggccgagagctggaaatttttttctttcctacgttgatttctgttccccccaaagaagagtgttccgtgtcgctgtgtgaatccataaaaagtgtgcaaaaataacaagagcggtggggtgtaggaggaaagtggccgcaggagaggacgacgggaactagctaggtctggacaccgtaaagcgcgcatccagggggaaaagatggcagcactgaacgatttggacgtcctgcgggcggaaatcgagcgcctgaaccgggaactggaccaggccagcagcgaaaacatccagtcggccaaatacggcctcggtctgctggaggagaaacaatccctgcagtccaagtgcgaggaactggaagccctgtacgagaatgcacgccacgagctggaaatcacacaagaggcactgcaaaaatttcaaaagacacagcaagttaccaccaaaagtggcatcgagcaggaggatgccctgctcaacgaatccgccgcaatggaaacgtccctcaacctgcagatcctggagctggagaacgaaaccaaacagctgcggcacgaactggaacgggtcacgaacgagcgcgaccggatgctgcaggaaaattcggaaatcggccgagacaaatccggcgcggaagcggaacgagcccggctaaaggccgagcttaaggacatgaaatacagggaaacacgaatgctcagtgactacagtgaactggaggaggagaatatttccctacagaagcaggtgtccagcttgcggagttcacaggtcgaatttgaaggtgccaaacatgaaatcagaagactcgcagaggaaatagagttgctcaactcgcaagtggaggagttggccagtctgaaaaagatcgccgagaaacaaatggaagatgcattgactgcgctgcaaatcgagcgtgaacaaaaatatgcactgaagaaggaacttgatacacatatcaatcgggaatcgttgtacaaccttagcaatatggcaatcacggcaatacggaagggcatagacgaaagcacgctgaatagcagcgattgtgaagatgaacagcctgccttgaaagactcgacactcaaacggttggaaactctggaggcagagacggccgacctcaagtccccggacggcaccaaggtcgatctgttctccgagattcatctgaacgaactgaagaaactggaaaggcaattggagtctatcgacaacgagaagctcagcttgacggccaacctgcgagaggctcaacagaatctggacaagagccagaacgagatgcagaacttcatggccaagattatgctgctggctgctcacgtggatgcacttgcaaatctcaagaagcagatcgcgtcggaagacaaattcgcaaatgtgtcgaacaacaaggacaaggtaatgaacgacaagctgaacgaagctatcctgcaatactcaaattggtttacgctcagctcgaaggaaatcgacactttgaaggccgatctagtcgaactgcaaaagggtctgaactgttcagatgccatggctgtgctacgtaatgaaattaccaacctaaagaataagttactatcctcagagcagaaatccctggatctgcacagtgacgttcacgtgctgacgactctgtcacaaaccgctggccaaagtctcaattccacccgcagcaatttggtatctctcagcgacgatctcgcacagctttatcatctggtgtgtacggttaacggcgagacaccgaatcgtgtcctgctagatcacaagaatgacgatctaagcttcgacaacgattccctgtccgccatccagtcgcagctcaagtccgacatcctcacctcgaagccgcacgttttcgaggatctgcaggcgctcagcgatgctgtggagatcaagaagtacgtcgatacgatcagcgatcaaatcaagtaccttaagagcgcggttgaacacacgatcgagctgaacaaggacaaggtgtcggacgtggcagcaggcgacaaggatgccaaggaggagatcgccgatctgcatgaacagatcatcaagctcaagagtttgctctcgacgaagcgagaacagatcgccaccctgcgaacggtactcaaatcgaacaagaacacggccgaggttgcgttgacgaacctcaagtccaagtacgagaacgagaagctggtggtgagcgacaccatgtccaagctgcgaaacgaactgaggatcctcaaggaggatgccgccaccttctcgagtcttcgggcaatgtttgctgcccgttgcgaggagtacgttacgcaggtcgatgagctgacacaccagttgtcggcagccgaagaagagaagaagactctgaaccaactgttgcggttggccgtccagcagaagctgggtcttacccaaaaactggaagacctggaaatggaccgtgaaatgcgccacgtccggcgaccagcgatgccagctcgaggcggtggcaagtccgctttctctcgtggagttcccgcccgcagtagcaaccagaacccgaacaacagcagcaacaatccgaaccaggcattcttctaacataaggttagcgtacagcgtaagatcttagcctttctttacactctgttgaagatgtaaagagcccgaagccgatgaacgtcgtccaacatttttgagtttcatcactaagggacgttccttcgttgggttcccttttcctcttgtgtggaaattgggaataagcgaatccttccatccaatcaaaataggttttccccctagtttacctacaatcgtaagccgtaaattgtttaccagtgcatctgcatccacatcactgtccgttaggaagtagtggatgggctctgcgtctcacctgctctttttgtactatacaccggaggttgaatgaactaaattgtaagccagtactaaatgtgcgacgaatgtgtgaagaagcatatatttttaataatattataagacaacagacgcgcgttccgaggaacggatcgggatataacccggttgagaaatatgcatacatacgaagtaagacgaatgtgtgaaagtatatcgttaatttattttgataagattataatatattactacacaacaacagtggctaacaaaaccaatattcaaacagtttattattgctatatgtttagggatcaaaaaggggaagattgaatactgtcttgtctacacatgctgtacgcgaaacatagaacaaaaaatggaatttttaaattttcttgtgggctacctcgttgaaatttgcgaggtagatttagtcatcgaggaggtatatttacttacaagaaaatgagtaacaaattattattgtcaaacaataacgttatcgatgagattgaaaagttgtagatatttattttggttctcattttgcgattgacagtgcaataactttttttttaattatgtttttggttcgtttcatttcattacgtttgatggtaaaattatcgattgattagacttcaacactatatgcagaaaagagtgataactttctcagatcctattttcaaattggaccaaatctattttagggaactatttagaacaaaagcatggtatcgcttactataactaacataaatcgtatttgctccgtttgttatttttgaaaaatattcatatcttaattgtgattttacaaaaagaaggaacaccgcgttgctcacagtttttgtctagaattagtttttatcgcggtgttccggagcaatccgttttgtatctcccaagcgattgtacatttgatagctttttaacgcatcctggcagttgctaaaggtagctcatatgtgtaaaacttaatcaatctagcattagagcctaggttcgaactttagtgctgtagagtctaatccaatagcttattgaaggaagtgtcagtaaaacagcagcaagaattcaacatggactcttccttggaatcaaaatgcgtgctttttaggaaaatgatttgcaagcttgttcttagaagacattagagaaaggtgccatcaactctctaatcgcataattttaccaacttgttttggttcgaatcacaggacgaaacattttctagagtatgaccttatcgttgcatattttattgtattctatgaacaggtcatccgtcttgaagtatatttgacgtggatgttcaatcctacgaaatcggagctgcaacagattaaaacaatattttaggtcatgcaaacattgacacaaatcgaatgattaggtctttctagaatttggtcctgtactaccttttattatttccggttttaatcaaactgccgaaacaaatcttgaaactaggatcgtaccaaatgaaaaatatcacaaaaacttacactgtgacaaagcgataagcaaacatcacgattctgtcctcacgttttagaaaaaaagaacaagtttttctatcaaatgaagagcgtccaaaactaattgtcaaaagtttaataaattccaattagaagagttagaataacaaagcaaaacaaaaaacgaacaaatttatttgtgaacacaataagagaagcaaaggaagaacgaagaaaatcaccgagccatttatttatttaaacaattaagagaaatctgaatttaaatctaactgtgtgcgttgaaaaaccaagtgaacaatctcacggtcccatgagaagaaaaaaaatgtccaccttgactgagtcgattcgcatgggatactaagcgtaagatgccacactaataatgaataaattaatcaccgtccctttttacgagatcgaagtaaaagtaaaagcaaacaattcgtgtgtacgtgtatgtaagcagttagtaggaaaatcaataatctcatttaactgattgtttgataaaggtaactgttgatcgttaaacatattaagatatcgtgtgaatcatccaccaaagttttcagtttgttaattgtttagcttttttagaagatgcactctctggcaaaataccgcgttggctagatgcatagtgcttcagtttcgtttttgcttgatgatccgtttttattaccatcaaccaatggctttttcaaatggcttgttattgagtatcggtgaaaaaaatcatgttcaaacgaattgtaatgaagaatcgagaaaagcaatgttttctttccaaggaacacgtcgttgcttacaggcagacatagttgatatgatccgaacaacaaagaagtaaacttattccatcttacacaaatgaaacgaaaaaagtaaaagttactgtccaaaatagaaagattaaccacatactagagattttagtagccatagccaaacagatatgtagttaataagttcagtccagaagagtatctgtagcgaggccattgatcactgattcatttgtcgcgccagaatagaacataccctagcactttgggaactaatctaaacagcagagtttactgaaattcgttctgtagatagtaattaaaccataccgcaaacgtatccatacagtgattgcagctcgataactaaaacaactaggcattgatatttgatttttgaatcaatttgttgataactacttcattagtaccagttcgatcgttgtcagattaaagagtagaaatacctattagtagacgtttacatgttttccatacgcaacctaacagtcctgatagaccaggttctaaaatacagatacatacaaaataggttttaacctccctaaagaacaaaattggaaagagagcatcatgcaaaagatattctaaacaaactgatcctcaagcacgaattgttttaagtatctttttgagtttctactttgagtgcagagcagtaaaaataggatttccgtcacatcacagattgtgtgtttcgatgagcttgatagctagagcaataatcgtttgtaaccgattaatttatagaaatgcaaacgaaagtcattattatgtgttagattctctccccttgaaacccaacagagcaaagatacgaggtttgataattaacaacgcactaagaaagtccccagccattactgtgtttgcagctagaggcaggatagtaattatcatttgctaacttatattaatttattgtatctcattgaaaatgaccgtcaaatataaggaaacagtctatattgcaaaagtcttacactgaaacaagaccttaaataa

SEQ ID NO: 537 - DNA, 2316 bp, Aedes aegypti
cagcaaaacgtcgcgaatgcggtcgagtccggtaaacaggcaaagattcatctggcactgcagaaactggaacaggccaccgtgagacgattgttcgtgaaagcgttctctgctgatggtgcatccaagtccttgttggttgacgaaacgatgacctgcgggcacgtcacgcggctgctagccgacaaaaatcacgtccaaatggaaccaaattgggccattgtagagcatttgcccgaacaccagatggaacgattgtttgaagatcatgagctgctggtcgacaatttgatgctgtggagtagggattccaagaatcgagtaatgttccttaaacgaccagacaaaacgtcactttacaaaacacctgaattgtttcttccgggaactcagatggctcctggcagcgaccatgacgagcatacccgagcgatgctcctggacgagtttttctccgggaacaaccagatcccgctggagggtcccctatatctgaagagcgactccaagaagggctggaagaaatatcacttcgttttgagagcatcgggcctgcactattatcccaaggagcagaaaacgcgctccgtgaaggatttgctgtgtttggctctgtttgctggtcacgaagtctatcggggagttggatggaaaaagaagcataaagctccaacggatttcacgtttgcgttacgctgtcctaaggtgcccccaggcgccaagggtatccgttcagtgaagatgctgtgtgcagaagacgcagcaacgttggagacgtgggtgacggccattcgagtgacgaagtacggtaaaaagctcctagataaccatcgatcgttgacggaagatcttgctcgtgaagaactagacaagctgtcatcggctcgtagtggttccatgggtagcattgtatcttccgttccatcgcagtgtagtggaagtagcagtaacagcagtggaattcctgctcacaacaacggtcggttgtctcgtgcatccagttctagttcaagtggttgcctatctgatgaaaataacggttttgattcggagtttcccactggaacgatcaagcggaaaccatcaatgaagccaaatttacctttgacatccatgacgagacaattgaaagaagtcggagaaacaacacggttgaatgattcctcaccaacgtcaccggagcggggtggtaccttaacaagacgtcacagccggagaagaagtgaggaaagcaacaacagtggaactcttaagcgaagaccaatgaataaccgaggatcggagaatgtaagtcctccaacgccaacgaaaacgatcactccactggaagcgatgccttcgtgtatgacagactccacattttcgctgcctccaccgccagatgatcttggtacaaacttctcaggttctacattatcgctagattcgctccccccgccaccaccaccaaacgagttagataatagtttcagtggatctcagttgtcattagttagtgtccaaatgccgccaccaccaccaccaaacaatctcgaagttactaatagcattaaacaatcaattatgatgttcaacagtcaaacgctgccaactccggtaatcagcaacggcaataataacgttaaagtcgaaccaatatactcaaagactttgaaaccatccgttttgaaagctccaccgtataaagctcctccaccatacaacggagatgtttcaacggcacagactcctcctccaccgccagctaaaagtgtatcattcgccgaatcacctgtgctactgaggcggaaggtttgtttcgaggacgaagttcaagaggttccgatttcacctcgcagagcttcgcgcgatatatattccgctcctcctgcgcctcctcctagggccgaagctactcgcttatctacttcgtacacatctccaaagcgtttgagtgattcggcatcgaatcccccgcgggatttcctcaaagacttgcaaagggttatgaacaaaaaatggcagattgctcaaaaatgtaaactggaaccgtccacaactccgcacgaggtgctcggttttcgggatctgccagcagaacaatattcatcgcattactacagggaatcgtctaacgtaagccactgggttcaggaacactacggttccgattgcatgtatgaaaacctgggaagtaatatgggcgtcgaacctgcttacccgatttcggctccagtggttggtgctgggccaatcaagaagaggcctccaccacctccgccgaagcgaagtgaaaagacacagctcacgactacggcgccacatcaaaggttataa

SEQ ID NO: 538 - DNA, 9417 bp, Aedes aegypti
atgctgtcccgtgttcatgtttctcctccgcaggtctaccaagtggtgtttttcacgatgcgtgccgctatctcacctctgccggcggcgtgggctttggaaaaatctacagacggcaaggtttacagcgcatggcaatactttgcggcagacgacgacgagtgtcgggagcgtttcggtctggcagctcacagtgctaactacatcttcaagaacgactccgaagtgatatgctcgacgcaattttcctccgtagacccgctcgagagtggtgaaatcaacctttcgctcatcaccggtcgaccaagtgagaaaacgacttcacaagagctgctcaatttcaccttggctcgctacattcggattcgcctgctgcgtatgcataccgcagtgtttcgagatggcgtcagtgccgacagtggagtggacattcaggcgcaggcgaaacgaagcttctacaccattcgttcgctgcggatcggtgggcggtgtttctgctccggacatgctgcaaagtgcaaagccaacgataataacatagacaatcagccgcggtgcgaatgcatgcacaacacttgcgggacccactgcgatcggtgttgtccgttgtacaaccagagaccctaccgagttggaacgccgtttcaggctaacaagtgtgaaaagtgtgagtgtaacggccatgccaaggaatgttattacgatcgggacgtggacgaaaagggacttagcgtgaatgtccgcgggaagctcagtggtggaggcgtctgtatgaattgcaccaaatttaccactggcatcaactgcgaaaagtgcattcctttttattaccggccctcggagagaatgccaaacgcagaagaaccatgtgtgccgtgtaattgcagtgcaaaaggatctactggtgaatgtaatccgattggtggcgaatgcgtttgtaagaaaggattcacgggttccagatgtatggagtgtgctcccggttatcatggagaaaactgtacgaaatgcctatgtgacataaaaggaacaatgcctggaggtgaatgcgagtcacattgtcagtgcaagttgcacgtggaagggaaacggtgtgatcgatgcgtatcaggatacttttcactgagagccgataatcctgaaggttgttcgaaatgcttttgctcaggaataggacaaacttgttcgagtgcagatgtgaacagttctagctatggtacattggaaggctggagtgttacggatttggcaaggtcaagaatggtttatcccacgagagacaacgaaacgggattcatggttattggaatgtttgagttgtcagaaactgaagccgtgtattggtccacccctaaggggtatttggggaaccgattgcaaagttatggaaataagtttgttttcaaaacgtcttgggtgatagttcgtggtgatacaagtggcaagccaaccaccggtccaagtatcgttctttgtggtaaaaacggaatgaaaattgcatacggagatgaaacatttactggaccttcaaacgcaactttggagatagttctaaaagaagacaattggtatcatgtgccgaaaagtgtaagagacatagttacacgactgaaaagaactgaatatcacggtgatccagtgacaagggcacaattcctatcagttcttatggacgtcgaaaatatcttgctgagaggaaccttccacaccgatcaggtggaaagcgttttggaagctgccaccttacatgaaggaagcacagaaaccgaagtttccgttggtgaaagtttagtggaaaagtgcgattgccctccgggctacaccggcctgtcatgtgaacaatgcgcatttggacatgtgagaatctatgaaaacacaatcacccacgaaaatgtggccaagtgcatcccttgtacgatgtgcaatggacacgcggaaagttgcgatctggaaacgggtgaatgcggattgtgtcatcataatacattcggtgacacctgtgaacgatgtttgtcggggtattttggcaatgctttgcttggcaatccgaacgactgtaagaagtgcgcatgtccgttggaggcggaaaccaacaacttttcgccgagttgcctgctcaaaggaggaactgaattactaaacaatacggaatacatctgtacgcaatgccccgaaggttacacaggtgatcattgtgaaatatgtgacgacggttattacggaaatccgatggaagtgggtggtaaatgtctcccttgtccttgtcacggtggtccatgtaacgcaaggactggggagtgcatcgagtgcttgggtaacacggagggatggcgttgtgagcgctgtaaaagtggctactgggggcttcccgacgagggatgcgaaccatgcagttgttcagaaattggtgctttggagaatgtctgcgatgtcattacgggacagtgcatctgcaaagctcgctacggtggacgaaggtgtgacgagtgtgatagtggctacgggaatctggaccttgattgtccggcttgcgagtgtcatgcgaatgggtcggcaaatggggtttgccataagctcagtggtcagtgtgtgtgcaagttgggcgtcgaaggtatcaagtgcgaccagtgccaggaggagttctttggcctttcggaggagttcccggacggttgcgaaggaacagcagaatccaaatcgcgaaccggtaggttcttaagatgctcaaactcatcggctaattcacggatcttcattgtttgctcaggatgtcgttgccacgtggagggttcggcaaaccggttgtgtcaccggcaaagtggacagtgtgtctgcaaacccaacgtcatgggtcgtcagtgcaacaagtgcatggtcggctactggaatgtgcagtccggagtggggtgcattccgtgctcgtgcgatcccaacgggagcggcaaactcgagtgtgatacgaacagcggccagtgcttctgtaaggacggagtcgaaggcgtcaagtgcgaccgctgccagcagggctactacgggttctctagtcaagggtgtaagaggtgtgagcaatgtgcgagtgcagcgtacgtgtgtgatccggacaccggccgatgtgtgtgcccaccgaacagtcacggccacgagtgtcgtatctgcgctgttaacacctggggtaacgtgttccagaggggatgccggcactgtgagtgcgatattgcaggctctattgggcagacatgcaacagcggtaccggacagtgtaactgcaaggaaggctacacgggaaggcagtgcaacgaatgttccatcggttactacggttatccgaactgtcgccggtgtgactgtgatgagcggggatcgattcctaattctgacggtagtttggactgtgatgaacacggccagtgtcattgtaaagcgatgacctttggacgccagtgcgatcagtgtaaatcggctaccttcggtttggcctcggtgaaccccgacggatgcacgagatgcttctgctttggtagatctcaggattgtgaacagagtgagctttcatggggacagattcgcttacaaggctcgcggaatctgagcgttgagtatgtagtgaaagatgtggatgagtatgattttgattacgttgtagtaatccaactggagggcaccagaactaacagagagctgtctgaggttaaaaccatgaacaacttagacttgatccccagctcaacgggaaatgtttcgattggagcttacagcgcgtttcaatatccattgtactttcaacttccatcacagtttcttggcgatcgcaccacaagctatggagggttgctgaactttactttggttacggtaggggcgtatcaaaatataccggaaggatcgctgcgacaatttcccttagttcagttgcacacccatgacgaactagttttggattattatgaagatcagatagtgtacggagaggaagtaattcagcattcgacattactgcacgaaaggttctggaaaaatcattacgatggaaatgtaatcactcgagcaattctgatggttgcactacaagacgtaagacatattttcgttcgaggcaccatcagcacaaacttccgtcaagttttattgacgaatgttaccttggacatgggaatcttcgtggccggcgcagaaaacaatcatgctttcggaattgaacgatgcatttgccctgctcaatacagtggattatcgtgtcaaaacccaggacctggttactatcgatttaggccgcagattccgaataagctacccgagacgattgatgattacgtcgggaagagtcttccatgcgactgcagtggtcgcagtaacgagtgtcatcctgaaactggagtgtgtctgaactgtcgaaacaataccggtggagatcactgtgaagtatgcgccgatggattctatggcactccgagtcatggatcttgccatgcatgtccctgtccggaaacgaggaagaacttcgcaaaaggttgtatcgttcgaggtgacaaagtgagctgtatttgtaaaccaggctacactggacggctatgcgaggcctgtgaaaagggttactttggattcccacatctggaagatggtcgatgcgagtcttgtgggtgcaatcgtgagggtagcatatcagatgaatgtgattcctggactggacagtgccgttgtaaaccgggcatcaccgggatgaaatgcgatcgttgtgagcaaccgaaaaacattgtgcagaactacaagtgcaaaccatgtgataattgtactgtaactctaattgatgattttacttatctcactgatcatttggatcgagagacggctcacatcgacaagaacggaattccagctccttggatcgatttggagcactttgaacaagaatctgaaacgctgggagcttcagtaggaatgctgttggatgtcaaagatcgagtggtcaatttcgatcaatccatattggatagcatgaaacgcaatgcaacccgattgaacaaacatcacaccaaacttgccaatcgattggacgaattccgggatatttcagtgatcaaaacaatggaacgctctgccgcactggcaaacgatgtaaacgaaatgaaaaacgaaattgaagacacgattcggattctgaacaactatggaaccagtgacagccacatcaaactaccagcagcattgaaggaagcaaccgatcttctggaagatatcaaacagaaatacgcacagagcaaacgacgtccggagattctggaatgggcgcaacaacaatatgatttgttggggaacaaatcggaaatcttactacggcagaataaaagactggatgactacatgtatgaggttggagtgttcaacgatcggatgcaacactttgagaggttgaacaaggaggtcttcaataatgcaacgttgaccgagacgttttccagcaaaaacagaagaaagatggctgaagtggagcgaagttttcagcaggccgatgaaatggttgatgaagtggatgggttcttggatgaagatataatggcggaaagtgtagtgaaacatgagcagatcaaggacaatcaccaacagttacagcaaaacaaggaaaacttgaaatatttaaacgacgctttagagcaaacgattattgagtttgatcagaaattcgaaggtctaacgacgaatgagatacctgtggcaaaggaacatgcaaatcgattgaaaaaagaatcggacgaattccagcagttgtttaaggatacggagaaaggagctgcgaatgcaatgaaagccagtatggcttatgagaatatcgttgccgctattgtttctgcacaggaatccgcagacaacgcaaccgacagtggtagagtagcgaacaataaggtttatccgctgggaggtgtttcattggtagagcgtagcgaacatgcggcaaatgtttcgtccaatattgaaaagaaagcacataaagaactagagaaggcaaacgaattgaacgaagtgatggtgtcaaaggagaagcaagtcgaaagcctgcaatacaaaatgcgactggcgggagtggaaaacaacaagattgtagaggaagaaggattgatcacaagaggtgatgcgatgaagaagttacagggaacattggaccaagcgaacattgtctcggatcagatgaaatttgtacgggaagaagctggtatgttaaacagtgatgtgtacaagttgaaattgaagctagctaagttggaaccggaatgggacacaaagtttggaatggcagaggaaaacgtttcacagtcgttgagtaacattttgaaagccaaaaaggaactaagtagagtagagaagttggacaaaatccaaagtgagaaatttagaacatggaatgcgtctttttcggctcaacttcaagagttgaaggataagattgcccgggctaagcatgcagcagaagggatccgtgtatccctcgagtctcaaagtgattgcgtgcgatcatacgctccggtatcgtatggcccatctaccactaatcgcatcatgatgtctgtggccttaaactctgacatcaacgattcaccactgatctacatgcaaggagagaatcatcgatttgttgcgcttgaaatgcacaaaagaaaaatacgtttggtttggaatcttggagataaagcggtggtgatcactcatccaacggaaataaagcagcgtgatccaaagtatgacgacgcgtggtatttcatcgaagcaaatcgcactctcaacttggcttacctgaacgtccgacgaatgacgcatagtggtgtattagttcctacccattccgttgaaggagcgagtagcgcttcattttccacaatcaccatgggtccaagcagtaggatttggataggtggagtcccagaacatctacaaactcctgagctgctggctagagatggtcttggggtagttttgagtcaattgtacatagaccaacggcagcttggtttgtggcatttcatgtcttctaccggaaactgcgaaggggccatgctagggccgcaagaaagctccagcacaaccagcgagagacatttcaatggagaaggctacgctgtgctgcagaagtcatcaagccataggagcaagaatcaattcagtttgactttaagcttcaagacattggacgagaatgctttgattttcctagcgctggacgaagtcaataatcgttcaatttcactcaccctctaccaaggccgtttggtattccgcgtggactacggaggtgactcaaaactggagatcaataccacaaaccgttataataccggtcagtgggtggttgttgaagctgcccgatcattttccaaaggtagtacggagaatggaattcttaaggtggacaacaaagaagagttccgaggggcaccaacgaaaccgatcaactcaggaatgttacccaatttgagtgagaattattatctagggggagtgccccctggcttcaaatctggaacaaccaaagcacccggtgcggatcatgctttccttggctgtctgaaaggagtacaaataactggtgtttcttacgatccactggatagctcgaaacattttggtatagaaggctcttgtattgataccataagtagagcaggattctacggaaatggttttgtagagtttccctctcatagcctaaggaaacgagccaacttcgggttcgttttccgcacgctggaaccaaattgctctctattgttgtctggattcccgtctagtttgtccaacgaatacgattcgaaagacatgcgcggaaactattccgtattcctttacgaaggaaagctaaatctatgggtagactcaggagcaggtcgagttgaactagaatcgaacaataccttgaacgatggagaatatcacgttctcaaagtgataaagcgaggcagagcagtagaacttcgagttgacgacgagtttcagggagctaagtcattgcctaagcagcaagccttggtcaacatgccaggagaactaggaggtctatttctgggaggtgttccagatgatccagcatttgattccctctccaaatcattcaacggcttgaagggcgtcattgccaacgttgtgttcaacaatcgaacggtatcgttcgatgaggctctcaatttcaccaacgttcagatgggtcgatctggtccagaaatgggttccaacattctgcatacgacgctacagcagactcaacctttcagtcgaagcttcaaacctccaccagagggatgcaatagggttggaagctactcttatgaaccgaatgctttcaagtatggtgataaacctcagagtcactcgatagtcaatgttgcagctcgtcacctgtggcagcgaaatttcaacatccagttcgatttccgcaccttctaccctaatggagtgttattcgtagcattgggctctaaagacaaagcgaagcacttcataaccctggggctaaaggatggatccttggcattaacggtgcggggtcgcaaacgggatcagctggtgctgccggtgaagctcaacgacggccagtggcatcacgtatcactgaacagtatcaagaagaaagcaactctgagcgtgcaaactgagaacggcctcagctcggcgcaaatcaaactaccaaagaaactgaatgctgccaacaatctgtttattggaggcattccagacgaaacaccactgccgaaagagctgcaaccgaagccggaggagttcaagggatgtttgaagaagttttcggtgaacaacaatactcaagatctggcacggccagggcggcacatgaatgttggacagtgcttcccgcgaatcgagcaaggttcatatttcccgggtgacgcttatgccatatacaagcgtaacttcaacgttggaaagtttatggatgttgacctcgagctccgaacgtcggaagtgaacggaattttgatgagtgttgccgaacccatcaatgggttccctgccttctcgctggagatttccaatggaaatgttattctttccatcgacgttggtgatgggtatcccatccgagttcagagcacactgccttccaagtacactttgtgtgacaaccggtggcacaacgtatccgcactgtacgaagatcatcagatagtgcttcgggtggacgactatccgcccaacactctactggtacaatccaacgatgtcctacgaagggtggcgaccaaggcccccctctacattggagggcttcctgataccgcaccgagcgggacacttcttctgcgtgagaacttcaagggctgcatacgaaatgttgtgattcgaaacgaacgaaaagattggaccgatatggacaacctccacaatgtgttgctgagcgagtgtctggcagttaattga

SEQ ID NO: 539 - DNA, 1505 bp, Aedes aegypti
cgcttgacgggaaaaaaaaagtgtgtcatcggtccgtgtcgcgtgtgtattttgcaataaaccataaagcaaccccctccggagtgaaactaaggtgaggaaaggatactcgctctgccgtcaaaaagtgacccatccccgggattgggacgcgaatcatcatcactcgtttggaagtttttctccgcaaaagccgcccccggaaagcagtcagaagaagagatacctctcaagattgggctgagaagatagtgcacaagaaagagatagcctgtggctgtgtgtgaccgtatacgaaaaaaaagtgctgagtgttctggtgtgttacatgtttggccgaattttgctggcctttccggtgtgttcccttggtgtccctgagattgttggacccacgcctcggttcacgggttccggatagttccggtagttcggctcggatagttgcgctacacatagaacaagaacgcaaacgacgaccgaattgatgaggagaagctgaacgagattccaaaatgattctgctcgagatcaataaccggattgtggaggaaaccctgactgtcaagtacaagaatgctatcgctggcaacaaagcggaatccatcgatgtcactgtagcggactttgacggtgtgttatttcacatttccaacatcaacggcgacagaaccaaagtgagaacgagcatatcgctgaagttctacaaacagctacaagagcacggagcggacgaactgctgaagcgagagtatggagacctgctcatcacaccagaggacggctacaacgtttcggttctggtcgacctggagcagatccccgacaactgggaggaaattgtgcgaaagatcggtctactgaaacgaaactgcttcgcgtcggtgtttgaaaagtacttcgacttccagtcgcagggtgaaggagaaggcgaaggccagaagcgggcggtgatcaactaccgaaatgacgagacgatgtacgtggaagcaaagtctgaccgggtgacggttgtgttcagtacgatattccgcgacgaggacgacgtagtgttaggcaaggtattcatgcaagaactgcgcgaaggaaggcgggcatcacacacggcaccgcaggtgctcttttcccacagggaacctccactggagctggccaacaccggagcacgggtaggggaaaacatcggatacgttacgtttgtattatttccaaggcatacatcaaaagaaacacgtgataacacaattaatctaattcatatgttccgcgattacttgcattatcatattaagtgttcgaaagcgtacatccattcgcgaatgcgggcaaaaacgtcggaattcctgaaggtgctaaaccgtgctcgtcccgagccgaaaaatacagaaaagaagaccattaccgggcgaacattcatcagaaaggaatgattttggaactcatcggacatctagttgttaaatgtgtaagtaaatatttactaaaataaagcttcgtcggaagtg

SEQ ID NO: 540 - DNA, 5177 bp, Aedes aegypti
cgttccgctatcattgcgtttgggactttacgctcaaccggtaaaaacggtaccgtaaagcctaacggaaaagcttcatgtagtgatgtgacaaaatctgaatatacttgaccgatcgaaatagcaaacactgttctcccgtcccgacggctcttttcaaacaccgaataagactgctctctgattggaatcggtaatcgatgggaaagttttgggtcaacttttcatacgagaaagctttgctacttttcatgcataccaacgatgaaacgacgcaacactctcaaatcacactctctttctctcgctggggacatcgcattgatctcacgcgacgccatcttgctttttggtccgagtagcaaaagctcagccaagcccattcaagttgcggtgtagaagcacgaaaagttgtgcagtgatgcttcttgctggcggacatgttggattttgcgatcgagcgaacggcggaacagttttcgaattcgagtcgagctcctgcagtagggctaaaaaatcggtgatttaattcgcgtcctggtccaatttcgacggttaggatttcaggattcccggtgcggtcggaagttagtgcggaaataacggtggaacggatttatttacggcggaaaaaagtgtttcaatccggcttggttatttttcggtgtcgcgacgaggattcttcagtgttttcttgtttttctagaaagtttttttttttggtctgagcgaaactggaagaatgaaaatagtgaaagcttagtgaatttcaatattgattcgggaagacagtgattgtgtgaaagatttttaatgtgaacaaatatttgacagctgcattctaccacatctaaagtgacaaacctgtgaaacagaaatgacgcgcataacggaaaccaagtccgttaaggtggacaactggggtgtctttttcctgcagaagttgcaaaacttcttcaataagaccgatcactgcgacctgacgttgcagttcaatgacaactcgcagcttaaagtccaccggctggtactgagtgcttgcaccgactatttcaacatgctggagaacacgtgcgaaatgtacgacgatgtgctgatcatgccactggatctgcaggcggatgtgattgtgccaattgtgaacttcatgtacacagggacgctggagtttcagtacaacatgtacgaaaaactgctgaaaacagcacgagatatgaatatgaccgtgctattgaagctgttggaagcgcataagcagaccaccagaatggtacaaggtggaaggcaaccgatcgtgctgaacaagcaagctccaaatgcaagaccccgttctaccgcacaaagtggggtaacttatcaaatgccagcatccgtagcacgaagctatggatcggtaaaacaaactacacaaacgagaatggcccagcgacctatgcaaggcactaaagttaatactgcacttgccacaatagcttcaggctatactgcaaacaagagcatgagcgttcctgagcccagaactctggttcaaaagtatggagcagcaaaggaaagtcaaccgggcccctctagatttgacgaaactggtgtctcggaaacattggaaggagcatttgatgatatctcgtacgaaagcaaacctttggtgacggctgaccaaatcaaaaaggaagaagaaacatctcctttcgagaaactgcgaaaaggatacaccaatgtaagtgttacaaaacgaccagcgccagctagcttttctacgcctgttgcgaagaaacccaatcttgaagaggttaaagaattcacggaagccgctagactgcgaagccagattgcggccgaagatgatgattcgccaggttttgctgacgatactcactttgatgaagaagaagaagaagcgcagcaaccgcagcgaccccaacagcttccgacgaaggccagtccccacactccaaaacaaatcgtcatcaaacaagagcagaaaagttcaccaggctcttccgcaactgttaaacaaattaccgtcaaagatgaatccggaaatgtagatcatgcaaagatcataagtgaggtactgaaaaagtatccacatctagtgaagaaaaacaagaacatcaaattgaagatcatgcaaaaaacatctcctgcacagtcgtcctctgggcagcaaggtcatcatgcaggtccgatgaaaatggaagttcgtacggcaacacccttgaaggcagacatttcaatggttcgcaaagcaactgagcaagtggcccgtgctccggcacctgttgccacttccacgccgggtccgaaaaagattgatgctaaaaccatgcatgcattgatcgcaaagggagcggaaaacatgaccggcccttggctgtgtctacgttgcggcatcgatggacgacccatcagtattcccagttacaaagccttccgcaatcacttgatcgttaagcacaaagagaagatcgacgcacgcatttgcgaacattgtggctggaaggccgagcaacgcaatcccaatcttttctaccattggctgacggaacacaatatcaaatctactatgaaattccccacttgtgcggaatgtggccatgtagcaatgaatacagctgctctgcagaagcacgaggaagaaaaccatcagaggggcgatctacagcagtgcatttattgcaacaaagttttcgccaaggaaatggacctttacgaacacatgaagagcttgcacaaacaaagggcacgcgaagatggtgtcatcgatttctcggacgatgaataccacgttcaagaggatgaagaagtttctggcactccaaacacgagccaggaaaagcagattaaggttctctccaacataagtatcacgaacaatgccggaattccgtttgtcattgaccacaggcaggcgcaaacggtgtcccaaataggaggcaaaccgcagatccagttgcaacaaattacacttgaaccatcgtcggaagcggaagcactcagtaatgtggcatccggaattgctaccagcttaggattggtagacagtgccaacgtcgttatcgaagatcatcacttccagggccaatacatcgagcaccagatggcaacggttcatggcgaaacggggacgacaaacacggtgacggccaccgggccggatcagctgaccaagctgattaccgaagatggcacggagctgcagttgacacagagccagaaggaggaaattttctcgcagctgcagaacagcggaaacggtggcaatgtggtgatggtgctgaacgacgataacttcataggcggtgctggaatacagttggaggatggcactcatctaatttcaaccgctccatcgggcgcacaggatcagaacatcgttgtaatgtacacccaagcggagcaggaccaaggcacacacagtttaatcacaactacggcaccagtgacgacaaccgtagtcgaaaacgcccccagtgaacaaatggaacatcacgaagaagtgcaggaagcaacaaagtccgcagctgttaccgaccatgaagacgaaacttctcaagcatctacgcaaccctcggagaaagcatcggaaaaggacaccgagcacatggaggttgatcccgagagcagccagcatgagactgatttgagtgaatcagccgatgtcgacgactctaaacatgcagaatatgaagaggagcagaaggctgccaaggaacgtgagaaacaaaaattaatatctgagctcgaaggcgattggtctgaggatacggaggaacaaccaactgctgcagaacaaaaagaagaaacgaagaaatcatcgccaccaccagaaagcactgagacatcaacaaaaattacaggaaaggaagcagctagcaagaaagaaacagtcgctgaatcagaagcagtcacagaaaagccaagtgagaaggaaatcaatcaactgttggacgattggaacagtgaaagcaaactgaccggggcagaatcggacgttgatctggagaaaaaactggaaaaagtcgtcggcgaaaagggtgcgaaagatctgaaagagtcggaagaagagactcccatggagacttcagcgaccgaagacaaaacggctgacactgcagagagcagtatgaatgaaagcgaaacacaggtggtgatattggcagcggcagaaagcgaaactgatacctcgatgaaagaagatgcggataaaagtcaggagagccaagaggaggaataccctgcttccgagtccgaagaaaagtcgaaagtagagagtaaaaaggatgctactgaagaagaacaagaggaatcaaaagaagatgaagaagacaaaacgaaatcgaaggaagttgtcagttccttgcttggcgattgggacgaagatgatgatctgtagagagttgttatattctagtagaataacagaaatacaatataaagtgactttttagatgaaaaagtttaatgtgctaatattaactgtagcatacaaagtttaacacgaatcggtaatagcattacactgttactaattttatagatcaagttttatgtcatacaagcaatgtaaaacaatcttcttttcagaaccttttcaaatgacttttcactaaccagtgttctctccttagaaggcattttattagattcgatacttgaaataataaatagtgtttttgctaattttcattattttcaaattgtcgattcggttttatggcagggataaaagcctactgaggcaaacccatctgcataaaacatcgcactaaaatgccctctaccgacagaaccgattttattttctttggttggcgcccttgatgtgttacgcagccactttacatactcactaatcactatcaaattttggcttgaaggtacatttggggaccaatgttcccaagtgtttctttgattgcaaaaaaaaaaaacttcacaactttataattttaaatcaaatttgataagtttttttttagtttaagcgatcctggaagtactaaatatttacattttcgtgtcgttagggtgtaagatgaaaataataaaatggaccactttgtgaattggttgaaaacgtttcatttgtttaagagatgattctcgtaaaaatgtataatgtagaaatatgatgaagaaataaacatttactgactgtaaatatgttagccttg

SEQ ID NO: 541 - DNA, 9581 bp, Aedes aegypti
atgacgactgacatttcagtggtccggtgggaccccagccagggtccagggcaggagtacatcgacgaatacgaatacgacgggggcaactccagttcacgccttttcgagcgatcacgaatcaaagctttagccgaggaacgcgagagtgtccagaagaaaacattcacaaaatgggttaattcgcatttagtgagagtcaacagtcgaataggtgatttgtacgtcgacatgcgggacggcaaaaacctcatcaaactactggaagtattatctggcgagcgattgccccgccccacgaagggtaagatgcgaattcactgccttgaaaacgtagacaaagcattgcagttccttcgagatcagcgagttcatttggagaacatcggttctcacgatatcgttgacggaaacgccagcttaaatctgggtctaatatggactattatcctgcgattccagatccaagatattacaatcgaagaaaccgacaacaaggagacaaagtccgccaaggatgccctgcttctatggtgtcaaatgaagaccgccggttaccataacgtgaacgtgcgtaacttcactacctcttggcgagatgggcttgccttcaatgcaatcattcacaaacatcgaccggatcttatccagttcgataagctgacgaagaacaatcccatccagaacttgaataatgcgttcaacgtggctgaagagaagcttggtctgacgaagctgctggatgctgaagatgtgttcgttgaacatcccgatgaaaagtccattatcacctacgtggtaacctactatcactacttcagcaaactgaagcaagaaaccgtgcaaggcaaacgtatcggcaaagtcgtcggtattgccatggacaacgatcggatgatcaacgagtatgaatcgttgaccagcgaattgctgaagtggattgaagttactatcgtccagctcggcgatcgtcagtttgccaattctctggtcggagttcagcaacaattggcacagttctccaactaccgaacagttgaaaagcctcccaaatttgtggagaaaggtaacttggaagtgctgctgttcacattacaatcgaagatgagagcaaacaatcaaaaaccctacacacctaaagaaggcaaaatgatttctgatattaacaaggcatgggagcgcctcgagaaagcagaacacgaacgagaactggcccttcgcgaagagttgatccggcaagagaaactcgagcagctcgccgcacggttcaatcgaaaggcaaccatgagggagacatggctctcggagaatcaacgcctggttagtaccgacaactttgggtttgatctggctgccgtcgaagctgctgcgaagaagcatgaagccattgaaaccgatatctttgcttatgaagagcgtgtccaagccgttgtcgctgtctgcaatgaactcgaggcagagaaatatcatgatattgaaaggattgcagctcgtaaagagaacgtcttacgtctgtggaattatctactagaactgctcagagcaagaagaatgcgtctggagttctccattcaactacagcagaacttccaggagatgatctacatcttggattccatggaagaaatcaagcagcgtttgttaacagacgattttggcaagcacttgatgggtgtggaggatctcctgcagaaacattctcttgtggaagctgacatcaacgtacttggtgagcgcgtaaagcaagtagtgcagaattcccagaaattcttgggagacgaagagggcggatacaagccttgcgatccagctatcattgttgatcgcgtacagcgtctggaagatgcctatgccgagctgtgcaagctagcggttgatcgccgatgccgcttggaggagagccgtaagctgtggcagttctattgggatatggccgatgaggagaactggataaaggaaaaagagcaaatcgtttcagctgacgagattggtcacgatttgaccacagtcaacttactgttatccaaacacagagcattggaaaaggaaatcaattctcacgaacagcagttgatgtccgtcagtaccgttggtgatgagttggttcgaaacggacactttggagctgatcgtattgatgagcgtctaaaggagattttagctatgtggaacaaccttcgggatctcacggtatcacgacgccaacgcttggagaatgctgtcgattacttccaactgtttgctgatgccgatgatattgacaactggatgctcgacgctttacgcctcgtttcatcggaagacgtcggtcgtgacgaagcaaatgtgcaaagcttgcttaagaaacacaaggatgtagctgatgaactgaaaaattacgctgaaactattgaacagttacacgctcaggctaagaatctaacattgacagaaccagaacaacaaaaagtccaagaacgtcttgctgcaatcgacgcccgctacaaagaacttatggaactcacgaaattgcgcaaacaacgcctccttgatgctctcagtttgtacaaactcatttctgagagcgatggcgtagaacaatggattagcgaaaaggaacgtatgctgcagactatggtccctggcaaggacatagaagacgtagaaatcatgaagcaccgctatgatggattcgataaggaaatgaacgccaatgcatctcgggtggccgttgttaaccaattagctcgccagttgctccacgttgaacatcccaactcagaggaaattatcgagaagcagaatcatctgaaccaaagctggtcgaagttgcgtgaacaggcagagagtaagcgcgatgatctgaagtctgctcacggtgtacaaacattctacatcgagtgtcgtgagacaatctcctggatcgaagacaagaaacgtattctcactgatactgacagcctccaaatggatttgactggtgtgatgacgttacagcgtcgcctcagtggtatggagcgtgatttagccgctattcaagccaagctaacggctttggagagcgaagccgatgccattgagggtgaacatcctgaagaggctgctttgattcgtgagagaatttctcaaatccaagttatctgggagcagctcactcagatgctgaaagaacgtgattccaaacttgaagaggctggagatcttcaccggttccttcgtgatctggatcacttccaggcatggttgaccaagacgcaaactgatgttgcttccgaagatactcctacatcactgccagaagctgagaagctgctgaatcaacaccagagtatccgggaggaaattgacaattatactgaggattacactaagatgatggagtacggtgaaggattaacctcggaaccgactcagaccgaagatccacaatacatgttcttgcgtgaacgtctgaaggctctgaaggatggctgggaagaattacaccagatgtgggaaaatcgacaagttctgttgtctcagagcttggatcaacaattgttcaaccgagatgcacgtcaagctgaagttctcctcagccaacaagagcatgttctcagtaaagatgacactccagttaatttggaacaagctgaaaatcagttgaagcgtcatgaagcattcctcaccaccatggaagcaaacgatgaaaaaatcaatactattgttcaggttgctgatcagcttaccgaaaagcagcacttcgattcagaaaagatcggcaaacgagctgagagcattgcacaccgccgggacgataatcgcaaccgtgctattgagctccatgaaaaactgaagaaccaggtcaaactgcacgaattcttgcaagacattgaagaactgactgagtgggtacaagagaaatacattaccgctcaagatgatacataccgtagcgccaagactgttcacagcaagtggacccgtcatcaagctttcgaagcggaaattgctgccaacaaggaacgactccatgaagcccaaaaagccgcccaggagcttatggttgaaaaaccagagttcaaggaaattatcgaacctaaactgcaggatctggctaagaactttgatgaacttgagaccagcaccaaggagaagggagcccttctgttcgatgctaagcgtgaagttattgtccaacaaagtgttgatgatattgattcatggatggatgatttggagaaacaaatcatcaacactgatacgggtaatgatctgacctccgtcaacatattaatgcagaaacaacaggtcatccaaacccaaatggcagtcaaagctcgacaggtcgaagaacttgagaagcaaaccgaagttcttacgaagactgctcctctggacgttgtagaacctatcgtggagaagaagacagcagtcaatgaacgatttgaaaagattaagggaccccttttggaacgtcagcgtcagcttgaaaagaagaaggaggcctatcaattccgtcgcgatgttgaggatgaaaagctgtggattgacgagaagatgccactggcaaactcggaggaatatggaaattcgttgttcaatgtgcatgtgttgaaaaagaagcatcaatcgctaaataccgaaattgataatcatgagcctagaattatgaccatttgcaataacggacaaaagctgattgacgaaggacatgaagatgcatcccagtacgccgatctaatcagccagttgactcaaaaatggcaggaattgaaggatgccatcgacaaccgtcacaaacagcttgatcaatcggagaaggttcaacagtacttcttcgatgctgctgaggctgaatcgtggatgagcgaacaagagttgtacatgatggttgaagaccgaggaaaggacgaaatttctgcccaaaatctaatgaagaagcatgacactctggaacaatcagtggaggactacgccgatacgattagacagctgggagaaacagcaagacaattgaccgctgaacagcatgcatacagcgatcaggtatctgtcaagcaatctcaactggataaattgtatgccggattgaaggatttggctggagaacgtcgcgcccgtttggacgaagcattgcaacttttcatgttgaatcgagaagtcgatgaccttgaacagtggattgctgagcgcgaattggttgccggttcacatgaacttggccaagattacgatcacattacattgctgtgggagcgcttcaacgagtttgcccaagatacggctgccgtcggaagcgaacgtgttgcaaaggctaatggaatcgcagacgacttgattcatgccggacactcagacagtgcaacgatagctgaatggaaggacggacttaacgagtcttggcaagatctgctggagctgatagaaaccagaaaggcgatgttggctgcttcccgtgaactgcacaaattcttccacgactgtaaggatgttttgggacgaattattgaaaagcagcatggtgtatcagatgaattgggacgtgacgccggatctgtctcaacgttacagcgcaagcatcaaaacttcatccaagacttgatgacgcttcattctcaagtccaacagattcaggaagagtcttcgaaattgcaagcggcatatgcaggtgagaaggcacgcgaaatcacaaaccgtgagcatgaagttcttgcagcttgggcaaacctgcaaggaatgtgtgacgctcgtaagaataaacttgccgacacaggagatctgttcaaattcttcaatatggtccgaacgctaatgctgtggatggaagatgtagtaaggcagatgaatacctcagaaaagccccgcgatgtatcaggtgtggagctactgatgaacaaccatcaaagcctcaaggcagaaattgacacccgtgaagataacttctcagcttgtttggctcttggaaaggaactcttgggaagaaaccactatgcttcagcagacatcaaggagcgcctattgcagttgacgaacagcagaaatgctctgctgcatcgatgggaagaacgttgggagaacctacagctaatattggaggtatatcaatttgcccgtgatgctgctgttgccgaggcctggttgattgcacaagaaccgtatctgatgtcgacagaactgggacacactattgacgaagtcgagaacctgatcaagaagcacgaggcattcgaaaaatccgctgcagcacaagaagaacgtttcagcgctttggagcgattgaccacgtttgagctcaaagaaatgaaacgtcgccaggaagcagcagaagaagccgaacgacaacgtttgcaagcggaagcagaagctaaggcagcagcggaagctgaggctgaggcagcacgtcaagccgaagcagcagcacgtgatacagccgatgcaccaggctcgccacattccacgaaggagcaagaatcagatcgtccaagtcccggaggagccgatgaaggcgcacaagaaggtgttcttaccaggaaacatgaatgggaatctaccaccaagaaggcctctaatcgatcgtgggataagatttattgcgttgcccgaaatggccgtttgtcgttcttcaaggatcagaaaacatcgaagactgttcctgatcaaacgttccgtggtgaacccccactagagctgaagggagctcaaatagaaattgctaccgactatactaagaagaagcatgtgttcagaataaagttgtcgaatggtggcgaattcttgctgcagtgtcacgatgacgccgaaatgaatcaatgggtaactgctttgaaagcccaatgcgagcttgacgctagcggtgaaggccgttcgttaacgttgccagcttcatcacagaaggatgaacaaaagagacggtcattctttacactgaagaaaaattaaaatctttacaaaaacatacatgatccgatatcgacacatctatgcaaaaacgattgcgataaatcagcaaaatctgtactaaacccaattggacaaccttcttctgttttaattagttgttagtgattttaagtacgtactgttcacgacaccaacaggtgaataataataaagcaaagcatatgtaatgtaaaagtcaatgcaggaaacgtaaaaagccagcacttgtgtggttaatcattgttgactaacttctcagtttgaaaacttgtcaggaaccactaatacgtttagaacaacttataaaaatatttcagcttagtccagtgaataacaagagcaagcacttagcgaatagagtacacaaatacggagatatcgcaatgagtacaatccaggtgattctggttttcgggagcttcatctactacaacaattccatcaacaatcatcacatctcattatcgagagcaaacaacacaacttttatctgtaagattttcacatctcaaagcagcgtcttcgcaataacagctactgaaatttagaactttcaatgacgtaaaaagtgtatcgtttaaatagaaaatggacgttgtcgaattaagaacatttaaacaagacaaaacgcgctccgctaaagctgatttggaaccaaataaaaaaaaaaacctgacgaaaactaattttaaaaacaatgtatatctataaaataataaatatttattttatcctagccgaaggacaaagaactcagcagaagaaaaaagaaaatctttgaactcccacaacgtcttcgatttcgtttcgtgagaaaagaaattgtaagaataagaagagtgtgacccttgcaaaatgttgaaaggccagtagatgacacctattatagacgtacagtgtagaaaacctaatttctttattttcgcaaacaaagttcaagaaataaggatttaatgtagtaatccagtcagccatggccaataacacctaaaacatcgcagagttcggaatatttctatttcgtttgaagtggtgtatagcctaaaaccaagatgaaactttagggttgcgttcttatttatatacattataccttctatagcttcttttctattacgctttgtggaatacatttatcatagtgtgaatgagttcgctttattgtaagatctagctgtgtgctttccattgtaatattaatattgcagcacaaacgattagaactatgcgggaaaaaaaaggaataccacgacgcaaccggttagagcagattatttcaatccatctcgaaggagtttgattgggttttttaaagaaagaaaacactgcaaattgcgtataaaacatactgataactgaatacatcatataaagtgttggatattgggcgttccgcttctaggaacccgttcataaagcttccacttgatcatggcgtcgaaagtatgtgcttggaaacgttatcagtatgcttgatatgaaatttctgtatattcttggtttatatgaattttgcgaagctataaagctttcccaaaattattttatttcatttcgtcttaccaatcaacacaaatacaatagtttatagctgtttatagcgaaacggtataggctggccgatgcattctatatggaggcgcaaggcagctgattgacgacgtactgaagggtcatgttaaagcttcaatatcggccgtttattcgttaattaagtaagagcactattacctatatggaaaaatgtcattgcaataaaatacacacaatgaatacaatttcaatgtttcgacaaaacgataatgtaattctaatgaaaagcttagaataaatattatattatttctgtttattttaagccgtacattatttattttttcttttcttaagaatgtactaaataaatacgaaaaaaaatcgcaagagagaagcaaaaatatattagcgcgctatgtaaaagaacatttgtttatacaaaagtataaaaatcaatcaagtatatttttaaactgccagcttgtgagtataaaaacaaaaataaacgtatggaataataatgcttataatttgtttttcttctaacgtaaaagaaagcggactatataaaaatgctaattcagtgacatcttgtggatagtcttaatattctagaaatataatgcactcacgaagaaccgtcaacatcgtaacaagtcgaaagtgcacttggaatagaaaattggatgagctagagcatttcggagcaaaaattattacattcttcacttatgtaagtgagttgtgatgttcggtacaaatgcctaattccgatcggctagtacaaatgttttcttaaaatgatatcattcttttttagttatttgaacgatccgcgtggtgatccagcagtgaaaccgtttttgattttaattaaagcgctcgtagtacatccgattttctcgcaaattgcaattttccttggtgaaccttatataaaaacataaaagaaataaagatatatttacatctacgattgaatattattttctagaatcaagtaaggcgactaaacatgtaaaaatatctggaagtcaagaattccttgatataaaaatgaaaacatcaatatttaattgttatcaaaaataatcaaatcaagatcgctactctaaaatttccaaataaaatgagacaaattataa

SEQ ID NO: 542 - DNA, 2959 bp, Aedes aegypti
atgaatggctcaagctacgaaatcaacacaaatggtgatatcctatcacagaaccagcagaagggctggtggaccatcggtttaatcaatggccaatacaagtacatgacggctgaaactttcggctacaaactgaacgctaacggagctagtctaaagaagaaacaactatggaccctcgaaccatccaacactggagaaagtattatctatctgaagtctcacttgggccggtacctctcggtggactccttcggcaacgtgctctgcgaatcggaggaacgcgacgctggcagtcggttccaaatcagcattgccgacgacaactccgggcgatgggcgctgaaaaacgaacaacgtggctacttccttggaggcacacctgaaaagctaacttgcaccgccaaagcccctggcagggaggagttctggagtgtgcaccttgctgctaggccgcaggtaaatctgcgcgccgttggacgcaaacggttcgctcatctgtcggaatcgcaagacgaaattcatgttgacgccaacattccgtggggcgaagatacgcttttcacactggagttccgcaccgatgaagagggacgatacgcactgcacacatgcaacaacaagtacctcaactccaacggaaagcttgaaaccaaatgcacggacgattgcttgttcagcgctgagtaccacagtggccatttggctctgcgtgaccgccatgggctgtatttgtccccgatcgggtcgaaggccgtcctcaagtcacgctcgcagaccgtcactcgtgatgagctgttctcgttggaagattcacttccacaagcttccttcgtcgctgcgttgaacaacaagtacgtttcggtcaagcaaggcgtggatgtcactgccaaccaggacgagataggcgataacgaaactttccagctggagtacgattggtctgctcaccgttgggctctgagaaccactcaggatcgttactggtgtctctctactggcggaggtattcaggccactggaaaccgccgttcagccgatgccctgttcgagttggtttggcatggagagggttccgtatcgttccgtgccaacaacggtaaactgctggctacgaaacgatccggtcatttgtttgcaaccgctgaagcggtcgaggacacaaccaaattctacttttatctcattaaccgccccatcctggtgttaaagtgcgagcaaggctttgtcggttatcgtgccccgggaagcaataagctagagtgcaataaagctatttacgaaactattctggtcgaacgtgcgcctaagggagtggtctacttcaaaggacaaaatggcaaatactggagaatcgatggcgaaggcatcgcagccgactcagatactccagtagatggattctacattgagctgcgagaacccacgcgcatttgcttgcgatcgaaggacggccggtacctgggagcgaccaagaacggcacattcaagctggtcgacactgggttcgatacggccacacaatgggaatactaaaaaggaaacaacattcagcggtatctcatcggttcgggttcactcgcactcgaaattttagcatattaggttactcttcgtatatatctactactactgctactattagtaatattccatcgaaaagaagcaaaattcattggaaggaaaatcatggaacgatacacgacgcaatcaatctctctcactcttttatacccttctcttcaaattttatttgtaaatttattttactgtctttcgtattataaaatgtagaatattttagagcagtcaatacaaaacggaaaagaaaaaaggaagcgttagctagtgttggagcgtaaaaaatctgataaatcgcattgttatttcaaaccaaccatcttagttcgatgcatgcgagcgtatatttattgcaatattcatacataaaaaaagctaaattagttgtattaactagtgatcactaaaactaaaaactaaatatcataaacatgagaagaataaaataagtgtaaaacataacaacatcatgcttttcttaaatgaaaaaaaaaacattatcgtcccaattcaaaagctacgcaatcaatgatttaataacgaataataagaagcaaaaaatgcttaatattttgatcaaaaggcgcaaaagtgatacactgcaagacatagttctctttgtcaaacgctttaaagtaaacgtccatcatcaaattcgaacgatttctccacccgacaaacacaaaaaaaataccgcgtggcaaatatgtgattaatgaatccatctttattgcaatgactacagatatttaaacatattaatacttcaccgtgggtgctatctctcccgcaaagtaaattgatacttaaaaccaatccaacaactgccaaacagtctgaaacgtacatttgtatgcaaaaaaacgataaaatccaatcaacagaatcaaccgcttacttttacatgcatgggtccttgagacttatttgattttgtccattgaaccaaaattataactgggatgcaaaccccacaatcaataaagcgaaattattgcaccaactttgtaaagtatttatcattagatatgagttctcaactgtggagcaactccgttagcagttcatgtaaaaaaaatactaatttattatgtttaggttcgtcgaaaagtgttctcgtgttgtaacagaccgtacttcgatgaacaacaccattgagcagaaagacgcgatgaagagaaaaggagcctctcgatttggcagacagacagacggcggatgacgcgcaggaaatgattttttatcgaccgtgcggacacgctattttgagtattttacgaatttagagaagaaaaaatgatacaatatacagaaaaataatgtaaacgtatgtgtgtaatcaaatcgaattgaagtaaaatatatcaataaaaatatg

SEQ ID NO: 543 - DNA, 3269 bp, Aedes aegypti
gaccatttttttttgctaacacatattggtcattccatggaaacgggtttcccatatgattttggtttgaacgtacacaaagaagcacacgagcaaacgttgtttgtttactttgttctcacctctcctctcacgcgttcgcgtagattcgccatattcgcgtcatcgcatcgctcctcgcgacctgttcattgcttactagatcggtacgaaaaccgtgacttctcacgggttgcttattttctttctgctcgcgtacgaaacaagatgtgcacgcgatttagaagaaatctagcactcggaaaatcgctataaacagtgttccacgaaaggttactttgatggctttatcaacggtgtagtaggtatcgcgctttcctcaaaacacccacgcgtttcggtttaatagaaagaagagggaatcaccacattagtgttttcgaagtgttgaccttgcatcgcttcttgtgtgaataaggtatatctgtagatgtctgttgaaaagtgatcccttcggaaaagtacaagcgctttctgtttgaaattctctgagaagtttgccactgaaataaaaatatgcaaatcttgacctacagtaagtgagtttatgactgtggtatttctattttggtcggatgtaaacaaaaatatctgtgatgttacgaaacgagttagagtttcaatgttaagtgagaaacgacaacgagatataaatatatactgtgtatttgatggatagaatacctatgggaaacctataaccacttgtcgaagcgagagtaaatatcagtgtatgtcgtcgcaaataatgcgcaatttgagaaaaagtgaaatcaccccagtatattcaatattattcaaccgcttagttgatgaaactacaaacagtgccaagctagagtaataaagaataaagggagaaaacgtgcatcgcagtatcgttgtctgtggcctggacgagagcatcagatctgtacagtgacatacattcaggtgctgccttagttggagttagataatttgctcgataattcaaacataatcagtcatccttacgcagataaaataaagtcaaaatgccaactctactggaagccttggaggaaaaatacggtctcggaggtcagagagacaaattggacgaagcactggtatcgatatttgtgcccaaattgccgcctagattgagcgttccagagttgctgattctcaacgactgtaacatcgataaagcgggagaaccagaagacttgcgtcgtaaatgttgcaccgtaaaagagttggatcttgcccaaaataagctggaaaattgggaagaagttttcggaattttgtctcacatgccccgcgttgaattcgtcaacctgagcttgaaccgattgggaggaccaattgacatacctccaccatgtaaaatggatcgactccgcagtctggtgctaaacaacacaaaactagagtggtatggagtggaaacccttctgcggttgcttccggttctggaagagcttcatttgagccttaatgagtatacacatgtgctgattgataccatcgtggacgatggttatgaaacagagactactactgatgaatcatgctgtgatgatacaacctgccaacaatgccaagaagaagaagaagaacaaacccaatctagtcgtggtcagaaacgtagtgcttctgaaagttctatgtacaagaaaaccgaagcgcatcctggtgtcaagaaactgcatctcaccggtaaccacatcagtcaatggagcgaaatatgccgagttggacgattgtttccgaatttggaagccttggtgctagcgaattgtcccattaggtcactttgtccacctgacgagaacaacgaagaagagcaaagcagttcaacgtcttccccgccaacgaaaacggaaagccatgagcatttcaagaatttgacactgctgaatttgagcaatgctaaaatcgattcatgggacgacatcgatcgattagcacggtttcctgtgttgaagaacctccgcgtgcagtgctggccattgtgggataaatgtgattcgacagagcacgaacgacgccagctgttgattgcccgattgcccaagatcagcattctcaacggaggggacgtgattgggtcggtggagcgcgaggacgcggagcgatccttcattcggtattacctcgataaaccggaaagtgatcgacccgatagatactttgagctagtgtcggttcatggcaagttggatccactggtcaacatcgatttgagacccgagagacgcgttaagattacattcacttacggagactctagtgaggagcgatcggtagatgtgtatagaacggttgtggatctcaagtcacgtttggaaagaatcgttgggcttccagcatcgaagatgcgtctgttttacgtcgatcaagatttgcgtgacctccaaggccttgaagagatgaaatacccccacaagcgcttgtacagctacaatattcgctccggtgacgaaatcatcattgaccaaaagcattagcagctacactgccccacgtatctatagcagagtagattttttctggaacaaacaatacagtaagaatatgaaatacacaaaacgattggactgccattgttacttgtaacgacgcaatcaaatttatgacttatgggcagctactatatacgtctttctcgtaatttacaaaacgcttaaaatagctctagtgcgtaattattgaatcgtaatttaacgccctaattatttatgcgtatccccagtgcacaaatcaaacccgtactatattaacgtattagaacgatacataattaatcagataaatggactgttgagacaatattggcagttttgaaagtagtcttcggttagacaaagtaagaagcgtacacaaactgtgagtcaagattggtgagaatggaaacataactgatgtcatatctctacttaaaatgcgattgtgatgagtgatacttgtgaaatgcgaagaaggagaagaaaatagtaataatctacaaatgtaacgaataaaatagcaattgaagatgattttatcatttctttcaaataatatcacaaccgaagaacattctaacagagagatacgcattctaattattcagatctaaactacttcatatgccagtgattcagaactaattcacttcataatcacgtcgggttttttttcatcttcaagaaattcctaaattaaaattagagtaaagtggggcaaaagttcgagtgggg

SEQ ID NO: 544 - DNA, 9396 bp, Aedes aegypti; identical to SEQ ID NO: 203

SEQ ID NO: 545 - DNA, 2658 bp, Aedes aegypti
gtagaagatcgcgcaacaatagtgttcctctgccgtcgaagaagcgcaaaaagagaaaaaacggaattcattccacttagcatttagtgaatttagttcatatctacttaagcgaaaagcaaatacaaatagcgaagagtcatggctgcgaatttgcaacaaagtggcaccctgttggatgtgctgaaaaagaagatgcgacagaccaaggaggagatggaaaagtacaaggatgaatgcgaggaattccacaaaaagctgcaaggcgaagtcatgcgacgtgaggaagccgaatccgaagtcgctgccctgaaccgtcgtattcagctgttggaggaagatctggaacgttcggaagaacgtctggcttccgccacggctaaactgtcagaggcttcggcggctgctgatgagagcgaacggattagaaaagcccttgaaaaccgtacaaacatggaagacgatagagtagcgatactggaagcacaattatcccaggcaaaactaatagcagaagaagcagacaaaaaatacgaagaggtggcccggaagctagtactcatggaacaggacctggaacgttccgaagagaaggtcgaaatgaacgaaagcaagatcgtcgagcttgaggaggagctgcgcgttgtcggtaacaacctgaagtcgctggaagtctcagaagaaaaggccatggcatcacgtgattcagtcgaagataaaatccatcaattgaacgataaattgaccaatgctgaagctcgtgctgaattcgctgaacgttccgttcagaagttgcagaaggaagtcgacagactcgaggacgaactaatgcacgagcgtgccaagaacaaaatgctccaggaagagatggaagcaaccctgcacgacattcagaacatgtaacggtggtaactgatgtcaaccgtgttactattacgcctactacgactacaaacaaactaccaacagcaaacaacacatcaacccaatcgaagatggcggaaaagatgctgaaaactaaacaaaaatgttatgggcccactagtcctcgggtgccgtgaaacaattcttccgcagacagctcagttgttctacgttgcgcatcgctgctgttactcatcgcgttttattcgcagctgtcacatctactttttgtcttgctggaaaaggagacacacttaacatactactacacccacaagtataacgttaaggaaggatctgtcacaaaacaatacacacacacacaaaaacatttaccaacgcacatacaaacaaaacattctcacgcggacacagcaaaagtcagagatatgccactggagcgagtgccatctaccggacgtaaaaccggtagcgtgcgacttgccttcgattaggtctattgtacatttacatgccaagtggacgaacattccgcgcatacattcacattcgagtttttttttcgaggccaatcaaaaaagacatttttctcttgttaagtagcaagtaggctgaacagcttaaagtttagtaggattatgaataaaaaaaactgttactgccccataactttaacattagcaattgcgcctttcaatctttctcgcgattcattattgtttatccttcaagatgcctattttcccttatttttttaatttgtcttccggttgttttgtagaattaaaaagaagtcgcgcatttaatgtcaaccaaatgcatttatttgctatatatcattttgaaacgcgaaaaacgaccactccaagtttagcgtgtatgtgtcaccgcagaattaaagcgatttttgaaatgttttcaatgataataaattgcacaaaaatacattgcaaactaccccattaagattgcacccgtagagtatttaagtagttcgaagatgccgtggaatcgatgatacgtatttgtaaaagttaaatctggaattaaagttggaataacggttcggttaggaaacgtacatcctctctcgtctccctgcgttcgtttcgttaggattttacactcgagtcctcttcttaattttagcctatttttcgtttcattctgcaataagttatcactattttttagaaccgaaaggaacagattaaatgcagagtaatttatgaaagagcagttctttttataaatagttttaaggaacaacatgagatatttctgataatgaggaaaaactttgaaatcggcggaaaatcgatcggaagatccggattggaactctgtttagttaacattttgatgtgccttcaatccgtcagttctggcaagcgattgctttttccgattgatttttcgagccgaacagaagagaagaacgtggcaaagccatttcagcgagtatttttgtcttctcttgcgtcgtatacatatactaagcgcagttaaatggtaaggaccgtgtacattatattccgtcaagtccattccatagcgattacacaaaaacacagacaggaaaaagaccagaaagagatcgaaaaatgtacacgtcaacttcacgatcaatactgttagcatttagggaacaaaagcattcatttcaacattttgccaataaaccaacaaacccaacaacaacaaaacaacagcaactataaaatgatatcatatttgagtgtttataataatatattattttatttaaagccg

SEQ ID NO: 546 - DNA, 2843 bp, Aedes aegypti
ccctaataaattcactcagaagctgatgcatggattcatccgttactcgagactcgagagggccgttttcgttttttttataaaccgctgtcatcgagtttgctgattcagtcagtcttcagtgaatcattatggcggccgcagacgttgatgtgcaaaagcacgagcttccccgtaccttgaaactgtccggccatgtcgggttcgacagcatgccggaccagttggtcagcaagagcgtccagaatgggttcgtgttcaacatcctttgcatcggggaaactggtctcggtaagtccacgctgatggattcgttgttcaacacgaacttcgaatcccaaccgagtccgcactcgttgccgaacgtaaagttgaaggcccatacgtacgagctgcaggagagcatggttagattgaagttgacgatatgtgacactgtcggctacggagatcagatcaacaaggatgattcattcaaatccgttgttgattatatcgaccagcagttcgaaacgtttctacaggaggagcttaaaataaagcggtctttgtcttcgtaccatgacagccgtacgcacatttgtctgtatttcatctgtcctacgggacatggtttgaaatccttggatctggtttgcatgaaaaaattggattcgaaagtcaatatcattccgattattgctaaagctgacaccatctccaagacggagctgtcgaagttcaaagctaaaataaacgacgagttgaggaataatggagttcagatctaccatttccctacggacgatgaatcagttgcggaaatcaacgcaaccatgaactcgcacattccgttcgctgtggtgggcagtaccgactttgtccgtgttggcaacaaaacggtccgagctcggcagtatccttggggtacggttcaagtagagaacgaagctcattgtgactttgtcaagctgcgggaaatgctcatccgaaccaacatggaggatatgcgcgagaagacacacaccaagcactacgaactctatcgtcagaaacgtctcgagcaaatgggattcaccgatgtggacagcgacaacaaaccggtgtccttccaacagacattcgaagcgaagaggagcaaccatctcgccgaattacaggcaaaggaggatgaagttcgccaaatgttcgtcgtccgtgtgaaggagaaggaggcggagttgaaggaaagtgagaaagagctgcatgcaaagttcgacaaattaaagaaagaccatgccgaagaaaagcgcaaactggaagaatctcgcaagaagcttgaagaagagtttgttgaattcaatcggcgcaagtctcagatggcagcttcccaccacaccctcacattgggcaaaagcaaaaagaaatgaaatttgtagataaccggacgaacgacaccctagaatcacacacttgggaatacactgtcgtcattatgtttccttcgcaccgcatagctgctgaccccatcaaaattaagaatgcttaaggtaggttggaaaatccgtgcttctttctatgcattgtgaactcctgaacaaaaaggaagccttttgctaaactatagttttattttaacttgatcagttcaactgaaaaatgccaaaagaccaacgtagctgcaaatcgcctagaaatactattcattcatttcatcccacttgtaagtacaaagtgttgcaaagttttaaaaaatactgttcaaatttagcacagaaaccggtaatttcatttatgcgtcacaaaatttgttaccggctaagtaagccacactggaaaatttacaaaattcaacaaaggaaattcaatactaatcagggctaacttagcaattctcatttccatttatcatcattgggttggagtcaaatctaattcttacctataattgcttctattttcaattttacaatatcttgcacatgcactgtttgtccatctcatgatgtccgccatattgagctgtaaacctcctgtaacatctgtcgaaaacgatgaaaagggttagtagttctgtacacctagattataggcgtacccaatttccacgataaacattccttttgatttaaacattatgtagaattaggtattgagattgaagcttgtcagccctgattagtattccgtgccgcgtcaaatgcgctttgcttagaccgagcgccaaccgaatctggtatctacttatagcctaataatagtaatttttaaatagcaaaaattgcatatttcaaaatcgaaagctgagcttcactccgatcggatctacgcacagttcattctcaccaacagttttacacttcggtgttgctgggtgagattttgaaaacttgtgcggtaaaaaatgcttacaacagctgaaattatccaaatagatcacacatttacgaaattacaatagaagtcatgctgtctgactacaaaaatacaccagatatacctaatggcacttacaacaattgaactagcgctaggctacaaatcctacccaaattaccatactttcacgcctccgaacatttattttttttacaaaagttcaatgttttgtaactgtattgaatgttttcagaaatacgtgcatttatgtttaattacgatttcagtgtactcaaaatgttgtacatgaatgaccttaaattccacttcaccttgcattctaatttcgatgaaaaccttggatcaaataatttcatatttatatgcgatggaaaagctaagatatattttattttaaacgttctaggttaaagtaatttcaaatagagatgtctctcccaaatatatattatgtggtctacaaatatattctgatatctaataca

SEQ ID NO: 547 - DNA, 1889 bp, Aedes aegypti
tgtcgttgtcgtagcacacagaagggaaaaaatcgggctcgagcggcttagagtagaatgccgatcgaccaccccgtacaacccctttggagcgacccgagggtgagccacgcgttacaagtggtcgccgtataaaagcttttgagcggggtaaaaccctgctcagtaacgtataactcggagatcgttctgtgtgtgtcgtgtgttctcggtcgatgctagatgctatagaagagttagccgccggtaggacatctggatattctaggttccgtggacatatttacagttggcattgagggccaaggggaacgggacaaaagtggtgtcggaaagtgattgtgcccgggagtacaatagggtgtgtcgaaatcgaagctgacccagtggatactgatcggttcaattgaatcaaaggcactcgaggattagccagccgaagtgcggtcgtgtgttagaaaaaaagggagcaaacggagtgtgaagcaatcatgattggattcaaactgctgatggtaacatgcctggtgggagtcgcattggcacagcaggattaccaacaggaatatcgcccggcccccctccgcattggcacgagtgctgcagaaccaaaaccaacgccgattccgattctgaagcagattaacaggcacaatgaagatggatcctatacctatggctatgaaggcgcagatggatccttcaaaattgaaacaaaactggcaaccggcgaagttaagggtaaatatggatacgtcgatgaggccggcaaggtgaaagtcgttgagtacggtgcgaataagtacggtttccaaccttctggcgaaggtatcacggttccaccaccgaccctagttgacgaaacaaccggcaaggatgctctgttggattatgaagacaacgttcccgctcctcgtcctcagaaaattcgtccatcgaaaccacgagcccaagaattgccacagcccagtccgcaacctcaaccacagccacagtactacgattacgaagaagaacagcatcaaccgcaactccaacaccaccaacagccacaactgcacacacaagctcacttccagccccagcctcagcagcagcctagatacatcccgcagcctcaacaaccgcaggtccaatacgtccagaactcccacttcggaccgggtgcccttgctgctgggcctgctcctcaacgagctcatatagcaaatgctgctccaatcgatgtagtctactctcccaagcagcgtcctgctcgtccagaacaggactacgacacccgaccacagaccttcccgaatgctgcaccagcccctgagccaaaaatccgctactcggcaccagctttcgcagcggctgctccagccccgcttccaaaatccaatcctgcaccacaacccgtttttgctccacagccacgaccagctccagccgtataccaaccacgaccggctcaaggtcgtagcaccagtgtcctggaccagctggcgaaggattacgcactgccacagggtggagctgcacctctgcacgacatctccttcggttattactaagacgttcttagaacactgaagtgacgtagtatttgtgtaattgcacgctggtcgatttgctttgtctagttcccactaggagagcttgccaaaacatatgcataatgccatcaaatgagaaataatatgaaaaaatgagagatcttatagcgtttctgtgtttacttgaacacacagagcaattttcggactgtgaatgatatgatagaactgataattgtatgtaattgataataaaatgttgtgaaaatataaatgtttttacttcaatgatactatccttgtttgcaaaagacaatcaagtcattgtgtggccattagtattgcagtggg

SEQ ID NO: 548 - DNA, 754 bp, Aedes aegypti
ggacgggtcgtctccaagtagaatctctgccttacgggtcgcagtacatcagctggactataaaaacgaatcgatcatcttgagttagtgccacagttcaatcagcttccgtgttcaaatagtcacagccattcctaccaaccaactaccaaagatgaagtgcttcgtcgtgtttgtcgtcgctgccatttcactgagcgtagaaggatccgtgatcccgtggtactggcccggaccagtggccatcccagctccagtgggactagcggttcctggagccacggtgatccaatcaaatccaccagcagttgtggttccagcacttccctctccagtagctgcagtgacggttgatgcctccggagttcccacggtagtcgttgctccagctcctgtaccagctgttgtggtagctgctccggctccggctgcgacatccgtttcggccacccgaggatccgttcatgttgcccctctgccaggacattccgtttcgcagcagcagttgaacctggctccggctccaggttcggaataagacaaacagcaaattagcaggggcaatgtgcaaccaaatactccaaacggactctcgcatggttttgttcaatccttcttggtgagggagcttgttccgataggtggttcggagctcttgaaccgttttggatattttttttttttgtaaatttgtttccaattgtttccacaagtactctccaataaatggcaagctaagaacacgacgacgacg

SEQ ID NO: 549 - DNA, 930 bp, Aedes aegypti
atggttttacgcaaagtgtggagtgcggttgccttcataatatgtttccaaagtgcaattgatgcagctgggatatgtggaaatgccacaattcggaagcattggtccgattgtaataagtttgtagaatgtggcgaatccagtacagtgatctttgagtgtcctgaacgcagtttcttcaactcggaaacgttggtgtgcgactttgctatgtatgcagaatgtgtcgtggacctagaggctgaagtgcagttttttggacagcagagaatgttggaatccgcaccaggagttttagttactatcgatacatgtaaccagaatcctttgggagcaaaactaccgcatccagacttttgcaatatgttctatcactgttctccttccggtccaattctgttcgagtgcccagcaaacctcttgttctgcccgaagcgaaatgtttgcaattggccccagtttgttgaatgtggcatcacagaaggggaagtgaatggggaatgtccggaaaattgcttcccagataaacgctgcccgttgaattgctatcctgatttgaatacaactgtgctgccacatccgagcatgtgcactgcatatctgcgttgcatagatggttgtgcttgtttccaaaactgcgcagctggtctctactggagtacgaatctggggcgctgtgtagaacgcgttcgatctgagtgtgtggaaatcgagagaccaggctgtccagaatgcataatgcacgaaaactgccctccggtagatgatcccaacaatcccattcgcttcccgtatcctggaagatgtgatgcttacatgaagtgtcaccaaggtcaagcttgcagagtggaatgcccggaaggccttgagtttgatccggaaacggaagtttgcgatatcccgtgggggcacaactgctgtaaccactga

SEQ ID NO: 550 - DNA, 1803 bp, Aedes aegypti
atggaagactcggtaaaaaatttggatattttgagacgggtcagcggagtcgaagtcggaagtctctggctgctgcatgatgagtccttcaaagagttcttcgactggttcggtaaatccgtaacggaggacaacctggcatcggacagtttgttgcgagagtattcagatctggaacgtaacgatcttgtgctatcggaagaggaagtacaggtcgaactagaattgctgtgcaaagatttccctaacatccttgaatataatgatgacgatgtagaaatttacgaggaacaactcgaagagctggtagccattgaagagcaatacgagaaattgttggccgatgccaagcagactgaaaagggtttaacaaaagaactgtccgaactggatatgcagcttatggatgccgaatttaaccaagggaagatggctacagaatgcatggaaaaggccagatttgttgaagagatacagtccaattcccagcagcagattttcgacatgcaccagtgttacgttcaagctcaaaatcctccgctgttcgtctaccaaatgccgatcgagcagttcaacatgaagtgcgaccagtttcttaagtatctggaaatgtacataaggaagcatttttcggtgcgcaatttagacgactcggagcacgaaccggatcagagtcaaagggacataattattcagctggaaagtatcaaatcccggctggatgtggaggaaggaaagctaacggatgccagtaaagaatttcaaggcttgaaacggatgatggagcggtttcaggacctcagttggcagcccatgaagattgaagtgatgaggagacattgttcggagttaaaatcggtaaatgagcaagacacgctccggatagatgtcctaaagcaagaactggaaatgtacattcggcagatgaatgaacatcgaatcgagtatatcctatacgaaaacagcaaactgaaactcgaccgggccatcagtcgactggagtacatcaagaagctggccgagatagtctcgagtgcgttgatgaacgccgaaatgctctggatcttgatgcagctagatctagagaagatgaagaacaagttcgacaacagtgacgacatgaatgcggaaacgcagttgtgtttaaaacgaatcgaagcgatgaaatctctggaacggaacaatgccgaagaggaagctcttgaggaactttccagccaaattgcgtcagtcatgggagcattgaatgtgagtcactcaacgtctcactcgtcgtcctcgctgacagtggcggatcgatcgttgagtttgaaaaactacttgcaagactttgtggatttcaagaagcgagcgttcaaaacgttgtcgtcgattgtgaatggaaaattctacaagaacatggatgaactgatcaaggagttgaatgcaaatgaaaaggcactgcacaaatacgtatttgatggtccggttaatagaccacagttcttcgatcagcagtatcaagagcgtatgcagcggctatcgttcgaaatggaccagatcgagaaagatctgagggcactcaagactgattatcaacagaatgtaaatgaatcgaagatgcagttgcaaaagcgatattattgtaataaatttggaagacgaaggaatcccttaggaaattgctgcaagaatcttggaaaaaatctgaaggacattaggatgaactccctcaataactcatagtaaaattcgtcaaaattacgtggagaaatttcttctgaaaaaaaataaatgttttataacaaattttacagaacaacc

SEQ ID NO: 551 - DNA, 3865 bp, Aedes aegypti
caaatcctcaaaaaccgttgctattttcgtttagttttctagttttgatctaaaaagtccctaaaaatgtgtacatttctgataaatggttagctaacagtgcttatacattcgcgcattgaaaatggacatcgatgccctgcattcggatttgcgcaaacggctcgacgtgctcggcttcaatcatccgcttccgttgggtgcaatcggaatcgtgtctgccatactggacgacctgatcaaaacgtccgaaaaactgaaggcctcgaagcagcaaatcagccaactgcaacaggaaaaagctgcctgggacctgggcgtagaaccgtacaagtgtgacaattcccgactgctggccgagtgtaacgagctgcatctggagctggttaagcagcgggacaaatttgtcctggccaacaccgagctcaagtgtcgggtgcgtaatttacaaacggacaagaaacagctggaggaacgatgcctgcaggcggaagctaaaatacgccagcttcagtgcggcgacagcaagtccaaaaaggatggtgccaatatgcaacgaaaaccatttgtttctaccgtgagaccgggccagtatcaaccgtcgacctgttgtggcgtcgagaaacgtgaaagtaaatgttgctgcccgtgcaatcaggctcgcaagacggaaatattgcacgaaatagagcgcctgcaggtcgagaccaagaaccaggaggaagtcatcgaggcgtacaaaaaacaaattgattaccgtgaccgtgaaattcaacggttgggagcattgttttccggtggtcggccggctgctgccctcgctaaggactgttgctatcgtaatgtgaacacattggcagaagatgtcaaatgcctccaggaagagaaagcctcaatgcaaaacaaattgaccgaagctttggagagccaacaaagtgctagtaaaaagattcaaaaactatccgagcgcaataaacagttagaacaagaacttaaggaaatagagaatgtcgctctgagtgtggaatccgaagctaatttgaacattttggataaggatagagaaaattccgatctacagattaggttacagcgttccaacatgaaagtcaaagagttggaaacattgttgaccgcgagaacatcaggatccactcctgtaagctcatcctcgtcggcatgctcgatagactcaactttacaaaacgcgctaaagcaagcaaatgaggaaaagcgtgctctttacaaacaactaaatgaattgaagcaacgtgagcaaacttttctaacagattatgaaaaaatcaaatcgaaatattcaaagttaaagttaaagttgtcaaaccaaattgcattcagtaccaccgactgtaatcgagacaatgccgaaatcgatgaactgaaccaaaaatgttcagctttggaaatgtccttgaaacaagcggaatccaaacgcgatcaacttacgaacgacattaaaaagctgcgagacaatttcacaaaactgaagggtgagggcatcgacaaagatcttcggatagctcagttggaaagcgaactatgtctgcaaaagaagtcgacaactagcagcattgtagttccgcctcgtttgcgtacagccgaatctgctatttccggtcaaacatcactgtcagttcaatctgcgtttcatcgtgtcgaacgtgaaagagatgctgctaagagtgaagtgcaacagctaaaaattgaaagggatgccctacgaaataaattaaaattggcaaccaaaagtcagatggacgcacaatctaaacacgaggaaacgatcatcagctacagcacacagatagcaaaattagaagccgaaaaacgagatctaatgtgtggtcaaagctcatcccagactacattgcatttactaaaagaagaaaaccgcgagttacaagagcgcttgaaggaagtggaaagcaattttagtaaactgaaagtcagccattcacaattgaaaattttgcaagaacaaaccgaaaggactatgttgcaacaccagaatagactgttctgttcggagaatcaactgggtaatgctgaagctaagctgaatcaggttgatggaaccattgaaagcgctcagaaagacattggtaaactgagaggcgacataagcgttttaaaagcgtcgaacgcttcattacaacgcgagaaggacaaactactgatggatctcgacaagaagacagagaaactttatacggtcgaagcagagttgaacactctgaaaacaaagaaagctgaaatgagggacacaatcgatcggcttgaaaggaaacttgagaacgccagtgtggataacttccagaaagacagcaacctgcgcagcgtggctacggaaaccgatacactgagaaaacaggtggcgacactgaagcgttcgcacgataacgctgttacagagaacggacgtctctcgaatgatctgagtgacaccgcttcagagctgacgctgacgaaacgtaaactagccgagtgccagaaggaagtggagcgcatgaagtcccaactacgcgaatatgttcaggagattcagcgtgccgaagagctgctgtgtatcaaggaacgtgaacgggaagagatgcttgagcactataaatctctttccgaaggagtgaatatgctcgaagtaagcaaccatacgttggaggctgagagtgccgaagccaaaaagcttcttcaggaagcggaaggacgcatcaacggattgcaagagcgagttggacttcgcgaagctgaaattaagacctatgaggagcagattaatggactgtcgagcaatattgttaagttggaaactgagatcgaatgccttaaggaggaaaatcacaatctccaggaagatttggatgcaacaaagaatctttgtaataaattggatttgcagaaggataagttgaatgccgagttggaagaacattctagcatccgcgaacagctgaataaagaaaatgcaactttgaagcgacaactctctttggctcagactggagataaagctgcagttgatggtttgcaggagctacttgctgctagtcgcgcagaagtcgagcaacagaggatcgttacgaatcaattgaaccaagaggtgaagacattgaaggcacagattgaagagttgaatctaaaattggatgaagagcaacgtaacgctgcgcgaaacgaagctctggctaatgagtatagtgttcagttacaggaactgagacgcatgattacagatgatcgatttgcacaagtccaatccagagaagaggaggattacaataggtatggtacattctgatccttataacagtcttattcacaactcgaaataatgagagacgaactgtcacgatttttgttacttgttactcatatgacaatttttcctagtgtccataattacaaaaaataattattggttcaagatattttaaaatgtttcacatttattaaatttcaaataatagttttgtcctttgttttctaattgcacacctgtgaacaatttttatgtttcaatgtgaagatgaatcgaagccaaacttaaagtttcaagagcacaaagctctataacctgacagtagttcaagctgaaactaaatcgattggtcgctcgtcattcgatcatgttttcaacttgaaccgctgtcttgtttcttgttttcggtcttcttaaaaaactacaaatatctttaattgtaatagctgtggaaaattgcatttctgatagttattgtattagccttaatactgacgtattataactgccatggatattattataattagatatgcttctttttcaatagaatcaagccctatttaaaatctgatgaatctcttcgga

SEQ ID NO: 552 - DNA, 1406 bp, Aedes aegypti
ataagtttatgtgtctgaacgtcaaacaaccgagtgttcaaattatgtttaaaaatagactactatcctcctcctattgtaagtgaatccgacgaaaaacttttgctccagacatgggttgatttgggtatcgttccgttccctgccgtgggagtaaaaatacgactgagccgaaaaaacgtatcgcatcggaaaactggtccgatattgaggacactcctatgcttgataacgtgcatgtacgtgcttctgggatggtgggggaaattggtgatggctcgtgtcgtgctgagaccccagcaaacctggggttatattgaatgaaatatgttggaatggttctcattgcgcatgaccagctgtaggaaaacctgtggccgaagaacgatcgtgcgcgctctcaaggtttcctgcgccaaattcgacttcgtacttgccaaatataactcgcacttgtttcactacgtcgtgaaccgtgattgagaatcgttcctcagttgagtctacggcgatccgcgagatatacaagacacaatggcagcagatctgaaagacgttgaaattgagaaggctcagtttgtcttttccgtttacgattgggatggcagcaacagcattgatgctttcgatatcggaaacgctctgcgtgccctcaacctgaacccaactctggaactcatcggcaaaatgggtggtacccagaaacgcggtgagaagcgaatcaagctcgaagaattcctccccatctatgcccaggtgaagaaagaaaaggacatgggatgctacgaggatttccttgaatgtttgaagctgtacgacaaggaagaaaacggcactatgctgttggctgaattgcagcacagtttactcgctctgggtgaaaagttgactgaagatgagcttgaaaatgtcttcaaggattgcatggaccccgaggacgatgacggtaacatcccatatgcccccttcctgaagaagatgatggataacatggtcgtcatcaacctcaagtaaacatttgaacgaacatcattcaataactaaatttaccaacatgtaatatgtaagagtattccatttcttcagagattgtgtgactatacaccaaaagcatattagatctattttgcaacctaaaaacatggttgcagaatgtgtttgattatgttgaaacaaaaccaaagaaacgttgaacaacatcaaccaacgtccagggaaaataacgaaacaacatcgacgaaataaataaacaatacagtaaacagcgttttatcaaacatcatcacgttaacaaaactgataatttataatgacatctagtatgggagcggttattattaatttctttttttttatgtttttaataaaagtatatgtataaagagattatataatccctggcagta

SEQ ID NO: 553 - DNA, 2711 bp, Aedes aegypti
gccatcatcatcagcatcatcatcctccgccttcagtcagttctgtccgaacagtcatacagccagggagagtaaacgcacggtggacggatcgggaaaactctgaaagatatttcgttaccatttggggcacttattagaatctaagtgctatatgggacattagtttgtgttgtgattagtcaaattatggtaaattcctgtcgaagtgcgtagtcgaccccaaagatcctagttcctagcgaagaaaaatcttgagtgctaccacactgaaccgatttcgagcgggtggtgaagaaaaccagccaagtgccacagcaggatgggtctgaaggactgtcaaatagagttggataatccctggaacacgtattatgccggccagacggtcaatgggaaggtcacgtttacattcgactcaccgaagaagattcgaggcatagtgatcaagttctcgggagaggcggaaaccaaatggagtcaaaccgaaacgaaaaccgaccaggaaggcaaacagtatgaatcgacaaccaaccttaccggtcaggaggagtacttccagatccagtactatctgctgggcggcaagaacagcaaggaaatcgatttggaggctggaactcacagctatccgttcacgtgtgcgttgccccccactcttccgtcatcgttcgaaggggaatggggcttcgtgcggtacacgatcaaggttacgctggatcggccgtggaagttcgatcaagatattaagatggccttcacagtcatctcgccggtagatctcaacgcgaatccccgagtcaaagacccattcaagttggagttggagaaaacgttctgctgtttctgctgcgcttccggacctcttagtatcatcgtgcacattcccgtgactgggtttgtgtccggacagacaattcctttgacgatcgaatgcgacaatgcaagtaacgtaggggtagaatccgttaaactggtactccgcaagttgctggctttccacgttcacactccccgtcgcgagacgaagaaaaagaaggaagtcgtgtcggaagtatccgtaggaccggtggaggccggaaacagccaaacgtggaatcagagcattcaaataccgccgctaccgccgtctaatctagtcaactgcgggatcatcgacgtcgattacgacatcaaggtggaggcagtcgtttccggtccccatgccaacctggacggaaacattccgatcgtgctgggaacggtgccgttgagcacgttccagccgccgccaccgtacacggacagtcctccggaggtggacccgtcgatggcgccaacccagccggttagcccagctagtccaccgaatggggccggaggggctctgggttggaacatcgccgatggaggcgaaagcctgtatcccaatattccgccacccacgtttgcggaagccacattcaaggcacccaacatctccaacaagaacgacagcgaatttactcgctttgtgggaccatctgagtacgctccacgctatccaacgtacgcattcacgccatcggccccaccagcggacttgtagacccttgagcacaaaaccattttgtgccggattttgctcgaacaaaaaggtgcagccaggaaaacaaatgtcaaacattttttgttacatattacgtagacatcatcactgaacaatatatatttttttcgaataatataccatattgcaacgatacgaaaggtcaaaacgcacataaagtttaaaacagtctaggaggaacaaattcaccaattcttaatattttagtactgtatcatccacttttgtgactgcaatttacttatttagagaccggagcgatacaaataaaataaattgagttaggtagtcgaacatgaaacagcagagggagtgagatagaagcaatctaactctcataaaaaacacatcacaaaatcattaaactgtctcattgttgactgcttttccctatcttatagaaaaccattatcctcatactattactactactaaccaacatataaaggtgcagcttaccgtctttaccactactaccttcctagccttaccaattttaaacagctagaagtagacaagcatagctcgaataatcaaattcagtaatttgattcggactcacatcacatcattagaaacaagcttgctaccatatatgtagcacgtagatgttatattttacgcagaaaaaaaaactaggaaactataacgacacaaatatttcactttgaacaatcgtcaatgccaaatccggtaaccagaacagaatataaactgtggataacgaaaagccgttctacatcagagtgcctaggtttcaaacgaaactagaacacaaatcagtggaaatgccaaaacatgtgaagtttgaaaataacaaataatcatcttcctaaagaagacagaaaaaaatgaatgagagttagtcaggagttgaacaaaagtgcatgataacaatgatatttttgaactttggtcaaaccacaaaatacgccacactacctgtatgtgaggacagcataccgtcgtactgtaggaaaaaaaaaatattttgctaaggaatcgaacgaacagtgagcataagcaactaagtaggagtccgttttaggtaggttgttagtagttgttgcgtatcataccaattagactggcccagtttagtatgggagaaaaataaagttgt

SEQ ID NO: 554 - DNA, 1299 bp, Aedes aegypti
atggattcaaggtttaacggcgagttggtccccgtccaaagtaagagtcgagcttttctgaagcacttcaagtatcccaaacgtgcaaccagggaaaactggatccatgacggatcgtttcacgatgcagtttctggactgctgattacggcccaactgttctcaataatgccagtttgtggaattggacagaaggatactactaagcttcatttctcttggaaaagtaagcgcatcttctactcatacgcggcatgtatgggaactgctttcctggcggtgactagtacgattcgattcgtggatagaaatttcaacttttctaggctgacgggagtctttttctatttctacaacctctacggaatgtactgtttcgtgagagttgcacagaaatggccggttctgatgcagaagtggtttaatgttgaacaactgctgccgcagagttccaacattatagaacgtggaaagcttgccaataagatcaagctgatatcgattcttgtgatcacgctctccctgatggaacatatgctgtcgattgtggcagccgtttactataccccgaattgcccaaacatcaaggatccggtcaaaatgttcttcaagtccaactttttgttcgtattctactactttgagtattcggagattcgaggattcgtggtcaaatttatcaacgtgatcagcacctttgtttggagttacatagatttgttcgtcattatcgtaagcattggactatctcacacgttccgcaggatcaacaaccatctgatgaatcataaacgagagaaaatgaccgaacagttttggggtgagcaacgtcaaaactatcgaaatatttgtgaccttgttcggttcgttgacgacgctatttcgatcattaccatgctatcgatttcaaacaacctgttcttcatctgcgcctcaattcttaacagtttgaacacccacccaaccttggtccatacagtgtacttctggttcgggctggccttcctgattggacgaactttggccgtgtccatgtgcaccgcagcagtcaacgatgaatcgcagcgtccgtttgaagttcttcgggctattccccgtgacggatggtgcgtggaagcgaaacgctttgccgaagaggtcatcaacgatacggtggccctcaccgggatgaagttcttcaacatgacgcgcaaactggtgctcaaagtcacgggttcgatcatcacctacgaactggtgctgatccagtttcaccaggacgagacggccgattacgatctgtgcacgtttaggcgtacg

SEQ ID NO: 555 - DNA, 760 bp, Aedes aegypti
acacatgtctctcaaaacaattccacttcgtataaatatcattggtaattaaatatcgtccgcagttctctcgattattcccgcagtcacaattaactcccgcaagaatgaaaagcgccatactgttgtgtctggtttcgatcagtgtcgtggttttggcaaaacccaatcccttttctaccgatagtgattttttgaaacaactggatgaagcaataactgaagtacatgctcaccaaaatgaaaccgttactgcgcaggttgaagttagcgatggtgtaaacctcacatcggaagaagttgattacgatcattcttttgaacacgatgatcaccatcatgatggagatgatttcagtcatgaagattgcgatcattctgatgaatcggtcgaatctgatgaacaccactctaccaagtcaccccaggatatccatttggcgataaatgatcattaagaattgcccccacctgaagcggatatagcacaaaatacttattgacattaacagtgattgatatctcacatgggttaaagtacctatgcagaattttcaggcatgaatttcaacaaattgaaaatgtattctcttcaatggtaattttagtaactgttagtgcattataataatcagatttatattatttccttaacagattaactgaagaaatatatttatgttgaaattttgtaatcaataacatctagagattgtgtacaataaatatataaacatattacagtgttactgttttgtca

SEQ ID NO: 556 - DNA, 1080 bp, Aedes aegypti
atgatcagtatcatacacaaacaagtatattttgcaaatccacttccaacgtatttgtttacaaaccgttccatagtgactttactcgcagtgttagatagttcaatttttcaattgtttcagaaaatgatttcattccaaactcccagtccacccaagaagaaaacaataattgttcaggaagtaaatgtgaaatttaaagccaagggcaaaggatgcacggcacacgaggctctggctcccattatattagttggccaactattttcgcttatgcccattagtggctactttcggacacccatatcaaagttaaagtttacgctaaagagcgtacattttgcgtacgggtgttttactgtatttatcatgggtgcaataatgttcatgttcttcgcattccgcattcaacgagggactttcggaattggagcaactacaacctgtatttactacgccgtgataatcacggctatgatagaattcattattctggcgcgcaattggcctttgatcatgcaacgttggacagctgacgagggtgttttcttatccaatccttacgaaacaggacagtaccttccgctggaatcacttgtgaaacgtgtggcatttacgataattttcttcgcattcgtcgaagatacgataaattttatttccgcctatttattaaatgtcgtgcacatgaaatactgcacgcatgccaccgatttttggcgaaatttctttcgtcgagagcatgcctacattgtgcggtttataccgtatcacccggcccttggggtggcgattgaggttgtgatgcgagtagctaagttcacatggcactacatagatgtgttcatcatttgcgtgtctctggtactgcagcggcgctttcaacagtataatgataggatacggactttcaatggaaaccaacagccggaggaagtgtggcgaactttgagacttgatttcctgcgactaagtgagctggtgacgtacctcgacacgaagctatccagaattatattactgtcgtgtgcgagtgacatgttcttcatatcagtgcaactgtataacatttttgagtaa

SEQ ID NO: 557 - DNA, 2517 bp, Aedes aegypti
atgaaagaaaagtttgaaatcatgacggatcaggagcattacagtcttcggtggaacaaccaccagaaccacattctacgggcgttcgacaccctactgcagaccaaaaccctcgttgatgtcacactggtctgtgccgagacgagtattcgggcgcataaggtcgtcctttcggcgtgttcgccgttctttcaacgggtgttctccgaaacgccctgcaagcaccctgtgatagtgttgaaagacttccgcggatgggttgtgcaagcgatcgttgactttatgtaccgcggtgagatcagtgttcctcaggaacggctctcagtgctgatccaagctggagaatctctacaggttcggggactagtagaccaccctgtagcaggaaacacaccaacgccagcgcagtcgccagaagacttcagtctactggactcctcactaatatcgccaacttctccgtcacttccgtcgccaaacttcagccaccaccatgcccgccatccgcatccaaattctacggcaacgagtatgttgggcgccagtactccgaagctcctgctgccaccacaggtgttcgccgatcctgccctgaatctgcccaaccctgatctctgcacatctccaatgccccgccggaaacaggctcgcccaagacgtcgatcaggtgactgtgccccacaggatctcagcagtaaacccaccagccccgttccccccagcatcgatgacaaagaagatgaagacaacgaacttgaccgcgaagacgatgaagaaccggaagaggaggatgacgacatcaaagaagtcattcggagaagtgacagcgaagacaaaaaggaccccagcccacacaaaacgccaagcaaagacgacgacaacgaaaaagaaagcaaaaataactcgactgcatcgacggctacgctctccggaatggatggacccgagaacctatgtatgaagaaatcctcatctctaagcagtagctctagcagcggaaacaactcctccaacaaagacagtagttctcggttatcggatcaatcgagtttaaaagacagccctccagaatcaacgatcggtcgactttcgctcaaggacatccgccacctgaatcgctcggcgttggtccgctcgatgagttccctgtcgcctccgccttcgtttcacttgaacaacaatcctccatccagtctatcccaccacgataagcgagtcaagctggaagatcgggacgatgatcggctcggcgacgacgacgggccccattttttagaccacatggatttagctctggccgcacatcaacaccctctggcacatctctcgcatcacagttcttcgccgcagcttcgacctccgggactaacgccagacggtgagaacaacaacagcagtagcagtaagaacaacaacaatgggaacgcctccggaatgggaaacggagccggccgcgacggaagcaccggtcccggttcgatgggtgccaaagaaggccgactgggtccgaaggatttcctgcacagtccgacgctgaattttccgccgttcttcaaccaatcggacggcggaggtcctccgaggcccccacactctccgctatcgttcccacatatgccgtcggtttcgtcgctgacgctgacgcctccgcacatgttcagtctggactccccgctgggcctcttcccgcccgggatggaccccggtaagatgtacagccccttgttggaaatgtccgacccacgcggaatgcatcacgatggcccaccgttccatttgaaaaagaaactgaaccgacccaaaggacagcattcggcgccccgcggaggaccaccccggtcctggaccaatgccgagctaaccgaggccctgcagcacgtgtggaacaagaagatgaccaccagccaggcgtcgcggatattcggcatcccgtacaactcgctgctcatgtacgtccggggaaagtacggcaagagtctcaagctggaacaactgcggaaggactgcatcagtgggcccccaattgagctgctccagatgggcatgaacaacaacaacaaggacaagaaggatggccaggacaaggatatgcctctgcaccatcccggtggaaatccgaacggaagcggtaacggttcatcagatcagcgaggacctcgctcggcgtcgtcggaaccggagatgctttcgagtccaaatccgctgttcaatccgttcccgcctgggttctatccggactttccgggcggattcccaggactaccgctgagtatgctgaatctcctgcctccggatcgacatcaccccggctcccatcagcttccgatgagcatcgacgaggactgtaaaagcgatcgatccaagcagtccatggacgacgacttcccgcaaccgttggcactgaatcgctccgggatgagtggaggaggagcaagcagtgcaaactcggatcgaggagtggacggtccgccaacggacagtcgacgggaaatctatcaacagaatggacaggactaa

SEQ ID NO: 558 - DNA, 1664 bp, Aedes aegypti
caattgttgcgccaagaacgcttaagagttattctacaaaaaaaagtgaaattcgttagttattgggcttcagtgagaatctatcgaaacatttattgagcaaatatggacactttatacatcggtaaccgaatatttgtcaattcggaacagtatccggatttttttgctggaggaattttggtgtccggcgttgatggaaaagtgacgttgattctggagtcgccaaaagacgtggatcaatatctggagtacaatgaagctgaggtatacgatttcggtgacctggtcgtgatgccgggcctgatcgactcgcacgttcacatcaacgaaccgggccggacggagtgggagggtttccacacggccaccaaggcggctgcggccggcggtttcaccacgatctgcgacatgccgctgaattcgatcccgccgacgaccaccatggccaatctgcgcaccaagatcaacgccgcccgtgggaagatctttgtggacgtggctttttggggaggtgttgttcctggtaatagccacgagctgtgcgatatgatacaggccggagtcgtcggattcaagtgttttttgtgtccgagtggggtggacgagttccagcacgttggggatgaggatctacacaaagctctgcagacgatggaaggatccggatcggtgctggcattccacgccgaggtcgagtgcaactcgcacaaccacagccactcccgcgaggacaacccaaaacagtaccagacattcctccaggctcgtccggatcagatggaagccgatgcaatcaaattggtttcacgcctgtcccagcagtatgacgtcccgtgtcacatcgtccacctctcttcggcacgagccctgcccacaatccgagaagcccgttccaacggagctcagttaacggtggaaacgtgccaccattatctgtcgatcgccgccgaagagattcccgatgcccacaccgagtacaagtgttgtccaccgattcgcgccaaaagcaaccaggaactcctgtggcaagcggtctgcgacggggacatcgacatggttgtgtccgaccattcgcccagcactcccggtatgaagctgctgacgtccggtaaggatcgtggcaacttcctcaaggcctggggcggcatttcatcggttcagtttgggctgccgctgttctggaccaactgccagcggtacggtttggaaattccagatgtggtgaggctactctgcacggaaccggccaagatgtgcgggctggatctggtcaagggacggctggagatcggatacgatggagatgtttgcgtgtgggatccggagggtacttttacggtgacaagcgatatcatcgagttccagaataaggccaatccgtacatggatcggaagttgcatggggtggttcacgcgagtttcatccgcggctcgccggtttacaggcaggaggagaagttcggacagccgctgggcaatattctgatgaagaagggcagcaggagggcggggaaggttgagaagtgatcggttgatgggagctcgcgagtatgttgattgtaaattttgtacaaagtctgataggattaaaagtattttagattgtatgatagtagatttttaagagatttttcgatgaataaattcattgttttaataag

SEQ ID NO: 559 - DNA, 1302 bp, Aedes aegypti
gctggcgactgcgatggagtgtaaacccaagtactgtatcatcggagccggtgccggaggattggcttgtgcaagacatgcttccaacgcatcagcagaggtcaccgtatttgagcaaaccgatcggatcggaggtacctgggtttacacggacaccattggacaggaccagcatggggttccaatccacaccagtatgtacgaagggttgcgtaccaacctaccgcgacagattatggggtttccggattggccaatcgagtcggatgtgtcgtacgtcaaacaggaggaagttctccagtggttgcaggattacgtggatgaattcaaattgcggaagcttatcaggtttgaacaccaagtgataagagtgtcaccgacctacaacgatcggagcaagtgggaggtgattgtgaaaaatttacggaatgagcgatatgatatatatgtatttgactacataatggtttgcaatggtcactactcgcatccgatgtttccggaatattttggcagagatagtttcgaaggattacaaattcacagccatgattatcgcaaagcagaacagttcgcaggacaagacctactcttggttggtgcaggttacagtgcatctgacattgctattgcaacggttaaagtagccaaaagtgttactatcagtcatcataatccagataaagtcgattttgatatcgagggttccattaccgtgaaacctggaattttgaaactgacatcaacgggtgccgtatttgttgacggaaccgaaaagaacgcctcgacgattatctattgtaccaggtataaatacacttttccatttttaagtgtcgattgtggaattcgattggaagacaatcatgtggaacccttgtacaaacatgtcatcaatattaatcacccgacgatggcactgattggtgtaccattctattgtattcctactcagatgatggatcttcaagcacgattttgtatgaagttcttcacaggtgagctgaagttaccgccaaaagatgaaatgttacaagacatggaagccgacattgcctatcgaagaagcaaggatataccacggaagtggatgcataaactgcacggagatttccagtggaagtattatgaagaattggctaggactgcaaatattcaaccgatcagaccagttataatagcgctttttgaggagagtatgcgcaggagagcaaaaagtgtccagcattatcgtagagataagtttgaagtaataaatgatgaagagtttcgtgtgttatgataataaattatctgaatagc

SEQ ID NO: 560 - DNA, 3720 bp, Aedes aegypti
caaaagatgatatacatgaaatatatttaattgaaatacatggcaatcctgctgaactgtcacatttgcttttcgttttctcaatcattattacgtttgacatactatcttcggatttggttgtctccatgtattaagtgacgtatggtgtgccaatctatacatgtatactacgcaaaacagaggtagaacatacacactggcagtcttcgattctatgttcattaatgtgagtcagcagtcagcacgtggatgttcaatatggaaagaacaaaaatcaatgtagtggtcatgttctgatgagttcattcatattctacgtttactatatgaaactgtttcttacgtcttgcaagcagttcctataagatcaaattcgaagtgaaagacatttttgcgttcttcctctgttaatatcttcactgctggtgtgaaaggcgagataattacatcgtatttcgatatgcttaaacaatcttaacttatttccaaatcttattaatcacaaatctattgtgagctagcaccacaacatttgagctcatgtgtcctgcataaggaaagagccagagcgttgagcattaccacatcttcaatatgtttttccttttattacaatcggaggaggtatacaatgtttttctggtgtctacaggataaagaaaaactcatgagcagaaatcctggatggaatgtatgtttataccatcgtaatattattcctgcatctaacgaatcccgctgcgatgaggcccagtacactgaatttgcaacatcaacacaatcatgacgtatccaaaaacatattaagggaagcttacagctcttggaatcaacgatctgataattgtattgtaccagaacctaatattcaaccactttttcgtgattttaaactgtttccaacttctgaacaagtgcatgacatgttaagaactgctaggttcattgtgcgtggttgcaacaaatgtaataaggcgtccaaacataaaaatggattaacattcggagaattctcagtgctgttaacagatatacgtaaaataaggcatacatccatactaaatagtcatgacaatacacagtcatctgggtataatgttacagattcctcgcaatctgtcaaagcaagcaattcggagctcgatgaccaatctacagcaaacaatgaaaccacatcaggaccagaggtttttttaggaggctcgtgtaatccaacaacttggagagctgatgtggcaatacccactctgaagaaattaggaattactttctataatccgcaagtttcagaatggactccagatctgctagaattagagcatcgggcgaaagagaaggcaaaagtgttattttttgtcatggatccacaaacaagatcagccgctggtgcaattgaggtggctaatatagcaggacgtaattctaagcaccttgttctagttcttttaccatacgcacaacagcagaagatattaaatgaaacattgacattagacgaatacaaggatctttctcgaaatcagcaattattgaaacaacttgtgcgacgaagaggattgccagtactcgataaagtggctttggccttggaacacataaaaaatatactgtctggaggaccgtgtcgagatcaaccgcaaaacattgcaacaagattgatatctgttcgacgaacttttgatagagtggtgaataatagtagtgaagtaataaatttaatccaatgtcaaacagcattggccgcacttggctatccgtctggcatagtttcgatcagcgtaataaaacaaattttagcatattttgaagaaatacgacaacaacggcctgcaagtagtacacaacctggatcaaattcaacatcaactaaaactaccaatggttatgcggacgataatatctcgataacattcgatagcttctgtgtactagaatcatatctgtccgtcctccagcaggagattctagaaacaagttgtgtttcgcccattaaagggactaatttacagcagccaccaatatatctcacagactttcaaggttggagccgccgagctcttccttcgccgatcaatacaggaaaacagttcgcagcggaatcgaacattaccagaaaccattcagcacagctatcaatatctagtgattgcaatgacacttttgaaaatgtgcatagaactagtgaggctgacgtagacaaaatcaatgcgtcatcatcgaaacatactgacgacactttatctagcacactcgataaaggatatcttggtgtaataactcagaaacatattgaagaaaattgtaacactcagcttcagcagagccaaaattcttctaaatcagcatcagatcaaaataattcaaatcattcttcgagcaacagtgagaataatggaatgaaaacgcgtgatctgtatctcggaggcagttgctggatgctgacaaattggcgacaaaactatgcaataccttatctgaaagcgaaaaatattacctttttcacatccaccttgcatgaagggcccgaatgttctatcgatttcaatgaaacgggagaaattagcataaaaggaaatgatgagcttatctttgatccagcaattttggatgcaagtcgaatactgcttttcgtgatcaccgataagaccagatcgctgggtgcaatgacaatggcggcacattacatgggactcggctataacatagtactgtgcgtacaaatgctaccaaatgattgtaaaatcaatggattacagctttcaagttcggcaatcaaagattacaacagaggtcgtgcgtatttgattgatttggccaaacggcaaaacatccctgtgtacagcaacatagaagatgccctcaaatcagcagtggaaaaattaaactacaccagatgagctataatggaaatatctacaaaatggatatgcattcagttagtttttatggatataagttatgcctcagtagagcaattgtataacattttttcatatttgatctgaatggctcgtgtcgacaaagcagtacttagttgaagcatatgatcattaaaaaaaaagtaaatctatggaaattattgaatgcatcacaccagaaaacctagctttattgaacatgctgactaaccgtttagttatggtcacagagccaactatactcttacaaacatgacttacgcttgtacataaaattattcaataacatttaattgctaggaataatttactaatttaactattatttgctaaaactacacctaatgtcaatagcatttgggtctcgaaaaaacgtcctcactctttatttagttttaataatgtaggtactgcaatatttgaaaatacaacccattatggcacagaatatacatcaagggcatccaataaagcaaaatttaattattgcaaaccactcttatcgtacagtttcatttaaacagagtaagcgtatgtaaattggattcaacaaataatttacacttcttaaatgaagatttctacctttttttccttttttatttgggtttaaatgaacaagactacctatttagacctattcatattttcaaataggtctggaaatttccctgtcaaccaatattttgattattcatgtcaaaatgaacttctggtcaaaatttcagttattttggagaaaaattaggtgtgcttcgaattacacacgatgaacagcatgagaactcagaatactgct

SEQ ID NO: 561 - DNA, 2528 bp, Aedes aegypti
atgggttgcttcggatcggccggatcgaaacagtcggattcgaacagttccgaggacacaaaaagtcagaaacggaggagcgatgcgatcacgcggcagctacagaaagataaacaggtttacagagccacccatagactgttactattaggcgccggtgaatccggcaagtcaacaatcgtaaaacaaatgagaatattgcatgtcaatggattctccgacacagaaagaaagcagaaaatagaggatatcaaaaagaatatcagagatgccatattgacaattaccggtgcaatgagcacactaacacctcctattccattagaaaagccagacaaccaggcgagagtagactatattcaggattacgcttcaggtcctgatttcaactatccaccggagttctacgagaatacagaagaactgtggaaagatcgtggtgtacagcagacctacgaacggtcgaatgaataccaattaattgattgtgctaaatactttctggatcgtgttagtgaaatcaaacagcctaattatactccaaccgagcaggatatactgagatgtcgtgtcttaacgtcgggtatattcgaaactaggtttcaagttgacaaggttaattttcacatgttcgacgttggcggtcagcgcgacgaacgacgtaaatggatccagtgttttaacgatgtcactgcaatcatattcgtgacagcgtgttctagttataatatggtcctgcgggaggatccaacgcaaaatcggctgagagaatcgctggaactgttcaaaagtatttggaacaatagatggttacgaacaatatcggtcatattgtttctgaacaaacaagacttgctggcggagaaaatcaaagctggtaaaagtaaactttccgactactttagtgagttcaatcgttaccagacgccggccgacgccgtttgtgagatgggcgaagagccagaagtgataagggcaaaatatttcattcgagatgagtttttgcgtatatcgacagccagtggcgacggtaagcattactgctatccgcactttacctgtgcggtagacacagaaaacatcaaaagagttttcaacgattgtcgagacatcatccagcggatgcatctgcggcaatacgagctgttatagatatacttaacaattttgatgcaacctggtcgtctcattttagttgtgtctaccgtaaaaatatcaaatctagccaaactttactaattttataataaaaagaaatattgattaattaataatcaaaacaaaaaaaacagaaacctatacagactaaaataaaaaaacaccgcagaataaacaaaagaatcatgagacgtacacaaagtcagtgagtgatttgcgtttgaaaccacgcatacagacggatacacttgttcaaacaatcgcatcaaggatcgatacaaaatcgcgccgtatcgtattccctacgtcgcgtgttccactaaacaaccgatcttgctgaaaaaaaagtggatcgtgttggttaaaacagtcagcggcaaaggtgacaccggataaatgattgccgatactgaataataacctgtagtcaaaaaaatcaaattacaacctatatgcacacaaaagaaaagtaacgttgagatatcatcaatcaaaaaaaaaaaaagaatgagctagaaaattcgcagttcaaacgtaattgtgaaattaatggaaggaaattgatgataccagaaacaactgcataccacacagtagtcatcgtcgttactattaaattattaatgcaaagcaaatatgtgaacgaaaaaaaaaactttgatagaaagagaagagtaatgatcggtgtgttatataacgcagagtgtatgaaagagatagcaatgattcaccgccatataaaatttaaacagacaacaatgagaaaacacacacaaaaacacaaaaatgcttacggccctttcagcgagtaaaaaaacaaataatgatgatacaagaaacatatgtgtgtgttgtgtaaacataactagtgaaatacaaagaaaaggaagtcatgtcgtcgttgtcatgctatagagtgaagatcagaaactaagtcttagtaatctgtgagctgttttctattttttgatttattttagtttttgatggaagggtagtgaatattagaggtaaacttaacaaacatccgacacaaacaaaaaaccatgcatacatacacacattgtacgagagatcagctaggataaaatcacatcatataatagaacagaaaacgacattgcacgaaagcgaggtaagtcatcgtagaagaaagaagttattgttaatagagcagaatttttcttttttttttttgtttaggagaaatgcttctaaattcgtccaaaaatgattatatgcgctcttgttgtagaactattttccagtatttttaattatcgtaatctgtatacacattttattgaataacaatgtatcatatatatttttgttttagaaaattttatcatccttgttgaatccgcttt

SEQ ID NO: 562 - DNA, 318 bp, Aedes aegypti
atggagcacaggaagatgaggaagaggacgattccggctcggaacgaacgtcgccgtcgcgttcgtctaaccaataactaccaacgcccggcgaatgaccggatccactctcgttcgttcatttgtcgctttggagttaagatcttctctcgtcttcgaaggaagcgcagggagaagtggttagggaccggcagggtgcgtactttcggggttcggaggaggaagaagcatttggtaacgcgaataccaaacaacattgtcgaggttgcagacttctcacacagaacagaaaaaatagcagttaggaaatcactttaa

SEQ ID NO: 563 - DNA, 1982 bp, Aedes aegypti
gcatgaaactacgtgagccgaacggaatgctaccagaaggataagaactattttaccacttaaaacgctagtgacgaacgaacaaaccctactacaaacagtactcctactacataaaatacaagtacctagcccccaccagatcgattctgaaaaaactttcagaatgaagaccgtttggactgtgcaaaagaacgtacaaccacaagaacaacccaaaaatcaagactttgcttcaaactgcatcgatcgaaacgtaagaaaacgctatggacctgtctggacgtcaaattcaaaactgcactcaacaactgtagaagaaacaaaagaatagaagcaatgaacatcgcccgatgacctccagactttcaagttacaccactttccgggacgagttagtaacaaaaaaaaatccaagggaaagaagacactttcccgacgagactggaagatatggtacaaatgaacgagataactgatcatactaaagttcgggagtgaaaagacgaccaactggactggcacaactgagaacgttcagaacactcacagagaattacgctatacaacgtacgcaccctcagcaacaaggtgccgcattttctgttacttctttacgttttctccatacggcagtttactcgatttcgccgaaaatttccgttattttattcattaatttttgattgtgttcgtttcgtcccaaaatattctaaaaatcatgttaatgtaaatcacattataaaattcattttacactttctcaacttcaattaataatttacaaaattacgcgattcgaatattactcataagatgcactaatttgttttaaattgtaaattaattgtagtcacattttaatgctttttgaatcacaaaaaaatgagattatacactaactcttgaattattctggcgaagacatattaagaccttatgaactggaacgatggataaactcacaaaagtaggtatattaccagcaacactattcgacgctatcgttcgctctcactatcaaaagtaacattcacattcttcatataccacaaacacacattattcgtgacttttgttttactgcagataatagaatgtagcaaccaaacagagagtacattttaactttgcaaactatgtttttatttattcgcaagctaagaaagataactgattttatataccgagattggaacaacaaagatttcttttatttttgtacatttgtattgctaaagatcatatttttacggtatggttagagatattgatagaagttttaaatactaaaccccctccggagtttaaacaatcctttagctgttaagcattacagtatcactatcattctattccatctcctcactatctctattctcaatcaaacaatcaattcaacaatcctcttaaccatcgatactgctattctttaacacgcaagagcaaactgggtaagatacgctagctgcgaacgtggcatctaacgtcaaaaagttgcaatatataagcttatttttggttctgcaacttatcccaactaaacatttccttccacgacaaacgacacagtcgtacccaaaaaaatgtggtccaattgattaatacaaacataaagaaacaaaatctagaggttcaaccaaacaaatattcatatttaggagtaagattggccaacagccgccaattcaatcatcgtttttttttcattcatatgacagagtatgtagagcagtttggacttcgggcgacagctccgtcgaaccgtgctgaacatcaaactctactgtataataatcaatagcagtataatatagacttcttcctgggtattttatatcattttgaactatgcaaaaggtgtatttcagtataactacacataacatatactattattacttttaccgcttagtatgcgcatgagtgtatcggatgacagcaacatttcagattaaataaaggaattaccaacagttttt

SEQ ID NO: 564 - DNA, 5875 bp, Aedes aegypti
agtattataggaggaccttcctgtgtatgtttgttcatgtttcgttcgtagaataattttgactgcgaaaaagagggtacatgttgtgttttgggagtgttttcttcgaaggacgattttccacttttccaccatcgattgggtcccaaatatgtcgcaaagtgggcaagaactgtgccggagttatggtttggtgtcattagttgattgaagtgcgttcgaaaagtgcaatttgaatgtggaaaattttgggacctgaacagccaatttgtccacacaacatacagaagtcgcagaggaaaagtttcgttcatttttttgttctgcctatctcccgtttgaatgcagtgagctgagaagaatcgattgtgatggcgaggggggagtgtgaagcggtgtgggcaagagtgtgatggaaaaagggcaaatgttgttcggcagcagcagcagaagcatattgttggggtgtcttttcactagatagtttttccacatagttgtgtatcatttctaaattcggtttccgtgcggcggcgagagagagcgagaaaaaatggataaaagttagaaaagctgacgggcaaattttcctaatttccagcacgttgcacgtcgaggtggatgaaattttgtccacttttttggcagcccgtccagttgttggattttccaatgtgtctccactctgtgaatctttccttgaaccctttttccccgtttgtgatgtgtgtgactattttccgggtgtttcaatcgatacgactcttcacgtttctggctaataaggatcagtgatcgacaggaaaaatgttgaaaagctattgcttttgaatcaaaaagtgcacaaagtggaagtgaaaaatccaccaggaagaagaaaaagaggaaatcccattcacaccctattgttggcaaagaagctaaaaaaacgaatgaaaagtttacaaaaagaatccactatcctacatatctcaagtgaaaacaaattatagtgaaagcgataaaacaagaagaaaagtaggcgaaaccagtgcatttccacagcattctacgactgaaaaaaaataaaacacattcaaggagaaaaagccggagcagtacaataccatttagtacaacaaagagcaacaacaactgcaagggaaatatggatcaatgttcgagcctgctggtgtctgctctgttcagcacaattatcctcagcggtttatataatccagtcgaagcacaattgcggcctcggatacaggaacatccggcagatgcggtcgctgccaaggaggaaccgctgacactgaactgcaaagctgttgggcggccccctcccgacatcaactggtaccacaatggggtgccgctggggccttctgataggcgagtggtgttacccgagggttcgctgttctttttgaaggtgatgcagaacaagcgcgaacaagatgccggagtgtatcactgtgaagcgcacaactcggcaggtgttgcagtaagccggaatgctacactgcagatcgccatgctgaaggatgagttcagagcgatgcccaaagataccgtggcattggtaggcgggccagtgatattgaactgtacaccgccacgaggcattccggagccttcggtgctgtggatcaaagatggaaaactgctggatataagcgggaaacggttgagcatggtcgattccggaagtttgatgatatctgaaattcagccaaacgacactggcaagtacgaatgctcggcgcaaagcatggcgggaacgaaaaccacgcctcctgcgtacttgaaggttctggcgccgcctactatagttaaaagcccacacgatacagaagtgctagaaggggagggatttgatcttccatgtgaattggcgggagatccgaagccggtggttacctggcgaaaggaaagtggacgtcttccagagggaaggtcgaggaaattgttggacaatacactaaggatagaagacgctcggcaggatgacgagggaaagtacatctgcgagggtcataacgagggtgggaacgtaactatctccgtctatttgtacgtctacgaagcacctacctttatggaagctccggtagatgtcgtcatcagggagggtgaaggaatcaccttaccatgccgagccaagggacgtcccggagtgcgtatattttgggatcgtatcgataaaccacatgtaaatagcagcggcagtaaaccgcaaagccaagcgcagattgcccacaagccatctgagaagtccaagcggagcatttcgcttaagacgactgcaaatcacgtacgttcctttgcaccggaatcggtgggaaattggtcaattaagatagagccggtttctgagaagcagctgtttcagctaccgcatacctcacgaatgcattccatacgaaagaagcgtgatgtgaccgaaccgagtaatgagttggatgcaatttccagtacgactgcatcattgttaatcagtagtagtgtggtacactttgaagataacggaggacttacgctgaaggcggtcagcaaggcagatgaaggttggtatgcatgtgctgccatcaacgaggccggcagtatcgtgaagaagatcttcattaaagttctggacaaggatgaatcattggaagctcgaaaggaacaaatccacacttacgaccaaagccgatgggtcagtgagcagttcatagtcctgaacaacgtgttcaccatttcggctagctccatcggaatttcatgggacgtcacggacagcgcaacaaagatgcccctgcggatgtattaccgcgtagcaagcgaaccaatggataatttcatctacaactctacgttcgaaagccaagttaccacgagcaatctgaaggaactgacgttgaacgatctgcggccattcacggagtacgaaatcttcgccagtataccggaggggttgtcagggtcggtgtccaacatccgaaggggcaaaacgctggacggaccaccatcggcgcccccaacggatgtaagagtcggagttatcaatacgacagcggctttcgtacggtggtcaccgccaccggttcacatgctgaatggagagctcactggttacaagatccaaatcaaatcaaatgccacgaacaaggtgcttggccagatgattttaaactcgacgacacaatccgtggtcatcaacagtttgactccgggagctatgtacattgccaaggttgctagcttgacatctggaggaataggaccttacagtctaccgacttctctacacatggatccccagaacattgtcaggaccgaccccactccgagctactggatgtcttcgtggatgtccggaacggctctcgtgattctttgcgtatgtctaataggtggtgcgatatttgctattttctggaccgttcgtaagaaacaatctgtgaaggcttcctatcctggtccttcggtgactacgatcattccagacaaacagcataccttatggctgcatggaaacacattggtaaagccatcacattccttggatcctccgagtacttcggaatacgccgagctaactaacaatactcacagcctcaagccaaataattgtgttccaccgccggagccatacgccactgtaacactccagcggggtggaaccatcgcagaagaatcatgcatgaaatgtgcaaacagtccagtatccagcgagtacaatgctccacttagggaaccaatcaacatatcagacgtgctgccaccaccgccagatcatccatacggtacatatcgcccaccgactagcatgacaatccggaccaatccggctgctctgtcaccgcaaatgatgcgcaagaatcacggtcctcccccaatgccgaaccgatgggacactatgccacctcccattccaagtttcccacaaaactggattcgaccacatcacatgaatccagccctaacgatgaacaaccccgagatgtattcggagaatgactacgaaagcggatccgtgttgtacgagcagtgctaccgaccggatcagatgcccccagttcctccacccaacaatggcaatcatttcttcagccacgctggcgaaccgacggaggagttctaccgtcacatgaacatggagttcgcccaggacatgggcttcgaacctgccagccctccagctccatgcccggagacgcccttcaacagtaagtatctcagtgggcccggagctgccgacagtcccatgatatctcgtaaggtaggagtcaatacgacgactcgggcacatttgcccaacagtgcgtccaataatagtaacaattacaacagccagcacagcactggccagagctccgaaagcgacagtgacaaccggtgggcacctgcccgaacgaaacgcagtagaagtagatcgaaaagtagtgatagaaaatacaatcggactctcattcgataaagttttgcccgacgctatccatacctacgctattaaacaaaaaaaaacacaaaacaagctaatcttaagctctattatacacaaaattaattaaaaacaaagtaggcagttcatgcaaaggaaaatccctatctttcttagtaggctcattaacttttacctttaaagacaaaagtatgaaagcaaagcaacattaaaaagggagctctgtaatcagtctctttctctcaatcattctcttactcactcactcttagcgctcttatctccccccaaaacagccgcggtgcgtatttagatatatggggagacacgtaggtatgagggaatcgtttaaccgcaagtaatttatttcctaacaagcgacggatgttgataaggtcggtggacggaggtacaatgcgtaatttgtgtttcggcgagggaacgatgatttgctctggattgagccgtaataaagcgtcaagaggctcagattattaataggtttagtttagttaatttaaaacgtgattcgcacaactgtaaaccgtcgaaacatattgttagtggatagtttttgtaaggtttgccaccgcatagatcgtattagtttactgaaatgggatatttgcacgtcggtcgataagccctagggtgggaaaaatgtgtatttgcatatagttttggtccagctggattttgcatatacgcctcctaataacatttttgtatatgtaacctaccgggtatcctcgtgggtttgaccgcatttaatctgaacactttgtaatttgtaccccgctaatttgcacatcgttcaacataaagatgtttcaaacgtcatacagctcatggaacggagttagggtatctcggtgttacacgccccatccgggcaatacgcccctcttcaatatttaacaaaccagattcaatatgaaattgaaaatgacaggaaatccatactattcatgagactgtctcacaatggaaatctgacagttgtaacgcgcagtaaaacagagataatgcaaaaagtatcaaaagtcgaatttcgatataatttttaccgcagtttgtttaagccagtggtcttcagcctaactgaatggacgggccagttgaatggttccaaaacatgacgcgggccgcaagttatataaggattcatgtaaacgactatttttgggatctcaaaatttattttttataaacacgaagatgagaggaagcgttgatgacgtgaaacatttgtatgcacatgaatttgaatgattccttgaacttggtaaatcttgaaaactatttgatgtagtttaaagaaattcctgatgtctccagtctttctttaaagactaggacatatttaaaccactgaaagttgaagtaacggggaagtgaagtaattttgaagcctttaccgaaccaggctttggaaaatttaacgat

SEQ ID NO: 565 - DNA, 903 bp, Aedes aegypti
ggcaaatcggacacggacataggggcggcggaatgcagtgcggcgttgaaaccatgaatgactgcgaacgatcgccgggtcgcaccggcctaagggtcaacttcaccgagaagggcgaagtgaaggagcgtcgggagaaattcctgaccgccaagtacggatcacaccagatgagcctgatccggaagcggctggccgtggaaatgtggctgtacgacgagctgcagaagctgttcgatccaccgacggaagcgatagatgtcgatattgacgaaattctcgacatggataccgatgacatcagaagatctcacctgtttagcttactgtcgacgtgcaaacgaccaccacaagatatatcgaaattcatcagcgacctgctggaccgggcgaagaccctttgagctggactggtcatttcagtttaaatttaattttaattaacaaaaaaaatattcacaagtaaggacacattacacatataaaagtaagaataataaagattattattaatggaaagtttgctaagctgcatggcgcgcattgattataaaaaaaaagaaaggaagcatagcaaagtgtgtacgcgtgctttacactgaaaataaagacaaaacgcaaacgattgtggtagaattaagcgacatctctcttattgaaaacaacaatggacttgtagtatcaattacagtgaagccgaagaacagaatacagacatgaataatttggacatttcatccgagtcatcacagttgggcaaaatttattacacatctataaaacttaagtgaatgttttaggtttagcagtagttaagcatttgattgacttccaacaggcgatcaatcggaggtgaaaatggtttgaagaaccgcttctttctaaatctcgccaccggatggc

SEQ ID NO: 566 - DNA, 3882 bp, Aedes aegypti
caatcccactcttgcgcaaagattgtctcatttcgttccagtaaatcagaaagtgtagttgacgccgcggggaaaaaacgttgaaaaagtgttaattgctatctcgaacaagacacaaaatggcggaaaccgaaacagcaccacatacaaacggcattgatactatagcggaagaggacgaatgcaacaaaacgaggccagcagatatcgaagcagatatgcgcgaaatggaacgccgcaaacgggttgaggtcatgatgagctcccgtctcttccgtgaggagcttgagcggatcgttgacagtcagatgcgtgatggaggatcgcacaacatccttcagcaactgtctgacatcatgggaatgcctgcagcacgcgtcggcagtgtattcaagagctccaactgtgttgtccccattaatgatattcgtggcatggaagccatgggatatgagaagggtgaaaaaattcttcgctgcaagctagccgccgccttcaggctggttgacttgtacggttgggcacagggtatcaacagtctgataacggctcgtctgaatgccgaccaagaactcttcttggttaatccgttcggtgttctcaaccatgaaatcacagcgtcttcactgaacaaagtgaacatgcaaggacaaattgtcgagcaggggacgaccaacttcggcgtgaacactagtcaatttacactgcactccgtgattcatgctgcaaggcccgatattagatgtgcaatatacgtcggttgcaacgcagtagttgcaatttctgctttgaagcaaggactgcttccgttaaccaaggatagtgctttgctcggagaaatttctgtacatacgtacaccggagctcttaatgaaccagaggaaaaggacaagctgctgcgaagtcttgggccagtgtcgaaggttctattgctgtcgaatcatggcgccatctgctgtggcgaaactgttgaagaagctttctacgctgttactcacattgtggcagcgtgcgaagcgcagctaaaactactgccagtggggttggataatctggttgtaatcccagaagaaacgcgcaaagcaatttatgacgcttcgcgaaaacctccggagggtgttgcatccaatgctgcatctgcagataataaggagcgttcacaggctccgaaatggcgagtgggcggtgcagaatttgaagcattaatgcgaatgttggacaatgccggtttcaggaccggatacatttacagaaatccgttggtgaagaatgatcttcctaaaccgaagaacgatgtagaggttccaccagcagtctcctcgttgggttatttgatcgaagaggaggagctattcaaacaaggcatctggaagaaaggagacttccgcaaaggtggtgaccgctctaggtggttgaattcgccgaatgtctaccagaaggtagaagtactggaaaccggcacaccagacccgaagaaaatcacaaagtgggttgcggaagcttcgccaacacattcttcgacgccggttaagatcgatagcgcaatgcaattcgtccctcctaataccaatccgaaagagtttaagcgaatccaacaacagatcaaggactaccgacgagcagacaagatttctgcaggcccacaatcgcacattctggaaggtgtctcctgggatgaagcaaaccgactgaaagatgcaaacgtttctgcaactggtgatcacgttgtcctcatgggtgcggcctccaagggcattattcagcggggctaccaacataacgcaacagtatataaagcaccgtatgctaagaatccgttcgattccgttaccgatgatgagctgaatgaatacaagaaaaccgtcgagaagaagcgacatggcgattacaccgatacagatttctccgaatccgaagcactgagctctctccaaatttcggaaaagactaagaaccagaccatgagtcctccaagccagtcagagcctgaagacactgccgcagaacaccaggtgcttagaatagaaaccaagcaagctcccaagcctagtcagcccgaagttgtactaagtgatggtgaacatgtacaaaatggcgaccactcggatactcacatgagcacgttttcacacagcagcaaagaggacgtgtcaactgaaggttctccgaagaaggataaaaagaaaaagaagggcttgaggacaccttcatttttgaaaaagaagaaggacaagaagcgaatcgaggcctaaatcacaacatgaacagcactcagcgacgatttttttataaaaagaaaaacaaccttgattatactatattatgtctttttcctgaatcataaagaaaagaacgaaacaatacggtagaaatatccgcatgtaaaggaaaactttattataaaaatatgtcactttgagataaggcgatattcctattagtagcggtaatcactctaataaggcacgcgggcacaataaaagcatttgcagatgcagtcatgtcacgtcgtatgataaaacaaaaaaaaaaatgaataaaatcggatcacgaaaaagatgtactcccctcaatagatgtagaagatgaattttattgtaaaactgttgccacaaacatcaatcaagtgcattttgttggtaggtatgcgacactacgcaagttagaacaaagttagagaacccggcttgaatatatactgacgaaggagggatattacatggcgaacgatgttaaaccgactaatagaaatacattgtgaaagtgaatctaaattacgcatgtatttgggttatctatttgaaaattattgtttatttattatctttacacataaaaacgagaaaaatacgtcactttgcagttgcagctgatgttggacgacgttgaatataattaagggtacttgtcgctgtttgtcactcgctcatgaaaaaaaaacatacaagagttgttctcgccttaatcaaaccgctatttgaatgtaagttgagaagtttgctataactgataaagaaagataaccgaaaaattatcactaaaatgggtccattcgtatgagaagaatatacagtgcatttttttctatcagacaccatatttgaccatcattttcatttttgcattttacggttattaaaaaaaagtgaataattttgcttttgtagcgataattccagttgttcattcaatcactgcagaatattttagcattatcgcatcattattatttgtttttattacagtggattttcgtccttggcgaacttcccacttatgaattattgcagtaagcattgaaaataatatatcagatatatttatagtgtaatatgtttttattatttgtttgtttggatatttttgggttttaatattgattaaatatgagacaaatgtatcaaatcctttaacatgcaaatagcggcattgatatgtgcggaagactcacatacaaatcgcacgcatcacggctttttacagcgcttgtttttttaagcggctcattaggttgctttatgtacgcagagatgctcatgtcccacaatctaccagtgttcattaacaaaaaaaaatcgaaacaaacatacattttagtagagatatgctgcccccatctaagtggctaaatatacagaaacaaaaaaaaaatgaagtgacatggcatttgaaaatagtgtgagatttgtgacgacaggtagaggacagcatcagtttccatccaacaagaggcagtttttagatttttatcagcgtaaacctggataaaacgtttgcctctctgcaacgagtaaaacaacttcgattatatgcttcaaagtgttcaagtaattaaaaaaaatcaatgatatgaaataaagcgataacatgctgattgactct

SEQ ID NO: 567 - DNA, 4869 bp, Aedes aegypti
atgagttcaaaaaatgttggcaatatgttaccgccgcagtgtgattccactaacgaaaacaacgatgtgatagacgcggatgttgctaacactaacgccactactactaacaccagcagcgccagctgcagcactagtgccgctactaccaccaatagtagccccagtacaggcacggcgagccgcggcggcgatcatacggctgcgacaatgtgcaaaataccatcggtgatcgcttctgtagagggcgctctgactaccacgaccgtgatggcatctgctggcagtgccaacaatatgacgaatagcagcaaaggcaacggtagcatcatcagcaacaacaacaacaaccacaccaacgagttcgacatgatcaatagcaacgacccgtacgccgaactcgaacgatatctggaaaaggtcaaggtaagagagaaagagtatgatatgtgtcgcattgctgaaatctccgaggtatttgcgcagctggaagcttccaaacgggcggacggcggcaacaacggttctgccacggtcaatatcgggaatggtgacttctccgttacccccgctgctgttcctgagcatggcggaaatagaaccaaccggaggacaacggtcaacagtggcagcgcccgggatagcaattacaacaccaaagccagccgttgccaaaatgtggcctgcatcggtgacacggtggacagcgtcggattggaaaccaccgagcggttgctgagggagattgtggccacgcttcctcggcagcaacagcagctgcagcaacagtctgtctcatcgccgcagcagcaaaaccatctcggctcgcgagagcggaacaacaatggtgcttttgaatcatcgccggcagtggcggcaactcgactcggctgcggagatcccacgttcatcatcaacgctggcagcgatcctccccatcatcatcatcatcatgagcatcaacggcatcatgaattggtgttgaagatcgacgaagatcacgaccacgataagccgccagagtcggagaaacggtcccagcgattcaaccataactcatcctccaacagtcgactgctcacggttggtgctcccgacaatagtcaatcgtcggattatgaaaataacacctgtagcagtagtcgggagctgcaggacagcttgtccgacgacatgagcctgctggaggaactcagcgtctacgatagtcacgagcacgacgaggattgctccgacagcaaggaagcggaaacgtcctccccgaggcaccaattccaccacccgacgtcactccaacagccgaaccttcatcatccccacagaagatccccccagtcctcgtcgtcgtttccgaacgcagacaagctgaaaaccagtacaaatagtctaccttccactagccgcaaccatagtctacaccataagtttaggaaccaccagaacgtaatcgatgccaaaagacgacagtttttcctgcccctggagcaggaaccattccagccggtcaagtccaacatcaccgatttaccgtcaccgagtagcacctcgctgcacagcgggtacaaccacctgatactggaggacctgggcaccaagagcagctcggcgccgctgctgatgaagaacgaggaaccggagattggcgagcggaggaaaatgcaccgcaggatgtccagctttcgcgagtacaagtttttccgtagcttctcagcaaaaatagaaaattggcacatccgcaaggcagaatccctctggaagcgtatgcgggaacggaaactggcagaaattgaggccattgaagcgtgtcgatggcttcgagctgccggatttccacagtatgctcaaatgtacgaagatcaccagtttccgatcgaaatcaatgacgtagccaaggaccacccgtttctggagaacgacccgctgcagtccctgtaccgacggctacaaacgctcaaccgctgtgcaaacatgcacatcgatacgcaccagcattcacatccgccgaagccgagcgaagactcggatgacgacagctgtgccctgtcggaagcttggacctttgcccacaacagccggaggtggtcccgattggaagacgctgccgggttggtcagtgtgatcaagcagaaacaatccaagcagagcgacgtcagcacggtcaacgaaaccgattcggcggacgagtcgtccaagagcggttccaagactacgactacggacgacaaggaaaactggggcgacgatggagtgacgttgagcattctgtccgacagcgatcaacaggacggtcccgtcagactacggaggacaggcagcgaaagactcaaagatggcgccaaggcactgcttcggcgggtcgaatctatcaagtcccgtcgacggaagcgacagaatcgcgatggactcatcctctgtggcccgcattcttccagcttatcacctagtcatcacaatgttgaagacttgaagcatatcgatgtgatgtctttctccaatccctcatctcctagaccttcggcggcactgggtgaccatcgaagggacaatacccttggaacgaacgagatcgtgtcgaacctactgtcaccctatactcttagtccttttgggcacatggttgaagataacaataaaaaggagcacaaacgtagcaccaatagatctagtccgttgcactttttcattcagctgcaggaagccaagtcgggtgacgactcgtcctccatctgcagcgaagacagccaggatttgaacaccggctacttcgctggaagggttgtgaagactcctagcaagaagtatcctaaggctaaaaaactgctgcgcaataaagtgaccgctgatgactccggagcgctttcggattcggagtatcagtctaagttaaggcgagctaaagtatctagtgatttgaaggagaaaagtaataatacacttcaggtttcaaagctgaaccgtggaggttcgctgaacttggggaagaactccaagcgttaccgtgatgcattccataatcgttcgatgagagtggcaaagaccagcgacgagaaggatggggacgaccggaagcgtactattgttgctagatggcatagctttcagcaacccaagacctcggaagggcgccgaatgggcattgtagacttgaaggatgacggagctagagacaaaggaaagtactcgggaggaaccagcatcgtggagatgtcctgtggacaattgctggtggtacggaaactggctttggtcactctaacaggatacatggaacgctactgcccaacgcaccgttccggctggaattgggatctgccaaagttcatcaaacgaatcaaaacaccagactataaagataagaaagtattcggaataccactagtccacaacctgcaaagatacggcaatactctaccggagataatccagatggcgctgacttggttggagctgaacgctttggaccaggtcggattattccgaaaacccggcgtcaagtcacggatagcgaaactgaagtccaccatcgagtcgggcaataatgtctccaaccggatggacgtcttcgacgatcaccacgcctatgacgtcgcggacatgatgaagcaatattttagagagttaccagacccactattgacggcgaaactgtccgagaccttcgtcgcaatattccagtatcttccaattgaagttcgagcggaggcagtgcaatcggcaattctgctactaccagacgagcatcgggaggcgttgtacaccctactaactttcctggaaaaggtcaccacaaacgcgtgtcaaaaccaaatgacggcaaacaatctcgccgtctgcttggcaccttctctattctactcaatttccgggaataggtcatctacggcgtcgccccgacggaagaagggtgctactggtcaaccggacgaaaaggaactctcggagacgcgggcatcgcacgattgtctggcttttctgatccaaaactaccggacgctgtggaccatttcgagcgatcggatgcgcaagtgtagcttcaactacatggaagagtcgaaaccggtgccgttggaatcgcttggggcggaactgcacgtgcaaaactggcgtggctatctgaccgagtgcatcaaggagtgcgtccgggaaggaaaggaaaggccacgtggttgggtatcgctcaatacctcggacccaaccgtcacggtgtacttcaagaaggtcggcgatggacatccgctgcggctgtggaaggctgtgaccgaggtggaggcccctcctaccgaagtgatcaaccacatcctgaatgaacggaacctctgggatgaccatctgctcaagtcgaggatagtggaacggctcgagagcgacacggacgtgttccagtacgtgtgtgggcaacccattaccgactattgcgtgttaagacagtggaacaaacagcaatcacgaggcgcttgcgtcatcgtcgaggtttctatcacgcataatggtgctcaactgctgctgggaggagttcgaggcgtcgtactggcttcccgctacctcatagaaccctgcggtagtggcaaatgcaaactgatgcatctatcccgtgtggacatgaagggtcgcacgccggattggtacaacaaaaactacggtcacatctgtcagcaatatctttcgagaatcaaaaagtttttcgaacactacaccgagggacctgagagcaaagtataaacacgtagttatgcaccgtcaaagcaacaaagaatcaataacatatgaagataaaaactaaacaaaaagcattataagtaattaacacagtcaaacccacacaccactaagcaaagcaacatgagaaaataagaaaagaagcaaaataag

SEQ ID NO: 568 - DNA, 2686 bp, Aedes aegypti
ctggtgttcgaacgattgaacgagaaaaaaggaaggctgcgaagttttcctcatccgtctaaattttcatttttattttggaaaggttttctcgcgagttagtgcgctttcgtggggtttcaaatcgaagattccggattcgggcatccgtcggtggtgaaattccagtccgaaatttcgtgttctggtgacgagtggaaattttatcactgtgaagcactttcgtgaggggaaagaaaaagaaggccaaattttcctgcacgacgatcatcagtcttctttgacgttgttgtttttttctgtgctagtttagtgctcccgaatccaagtagccacatccgatattcgatccgaggaggaacagaaaaacagtgaaaacaatttttcaaacagaggtttatcgaaactgcggaacagattttaaagttggggaccagggaaggaattcagtggaaataaccccaaaacaaaacagagtgtgtacaaaggccaaggcaacaaaagagtgaatattaaagatggattccgacgacgagagcttcgatgagcacgattccggaaatgtttccagtggcgacgatgactttgcaatggatgtggacattaacaatccccgggaccgtggccagcaggaggaggactacccgtttgaggtgctgacgacggaggaaattgtacagcatatggtcgattgcatcaaggaagtcaacaccgttgtcgagatccccgccactacaacacgaattctattaaatcatttcaaatgggacaaggaaaaactaatggaacgattctacgatggagatcaggaaaaactcttcaaagatgcccacgttatcaacccatttcggaaacccagcacaataaataagccaaagatcaaaaaatctggaacggaagattgcgagatttgctattcatcatttcctcccagtatgatgactgggttggaatgtggtcaccgtttctgtacgcaatgctggcaagagtacctgaccaccaaaatcgtagaggaaggcctgggccagtcgattgcttgtgccgctcatggatgtgacatactggtggacgacgtgaccgttatgcgattagttcaagatccacgagtgaagctgaagtatcaacatctaataaccaacagtttcgttgaatgtaaccgattgcttcgctggtgtacttcggcggattgtacctacgccatcaaagtacagtacgtagatgcccgtccggtcatctgcaaatgtaaccacgttttctgcttcgagtgtggtgaaaactggcacgatccggtacagtgtcggctactgaggaagtggatcaaaaagtgtgacgacgattccgaaacatccaactggattgcggccaacaccaaggagtgtccgaagtgtaacgtaacgatcgaaaaggatggtggttgtaaccatatggtttgtaaaaatcaaaactgcaagtacgatttctgctgggtgtgcttgggatcttgggaaccgcatggttcttcctggtacaactgtaatcgatacgatgaagatgaggctcgtgctgctcgtgatgctcaggaaaaattcagatcatcattggccaggtaaatattatagtagtaagttttatatggtataacctgtatcgctgtccaaacactagaaagtttccagaaaccaagagtaattgaggggcctgattgacattttggtcggattcgagttaggtatattaaaaaactactcgttttatgcttttcaactttttttatgtaactatttttttcttcaaagtttgagcaaatttatagctgttgatgaaaagctaagcttgaagcacagacaaacttaaagatttttgggaaatttattcggagatcaaaatgctgtcccaataaacttctggacacaattactaagaattgctatttaacggattcgtggaggaactaatacagatccttggagatttttttttgatttctaatttgactaatctttgatttatgacaaagtctccacgagattcacgagactttgtataaacttatggagatttacagtgaatttgtcctggcattctcagtgtgagatccttagtaaatttatggagaattttgatggatgaatatatggcaaggtccttttggtattctcgagccgagttttatttatctcttgacgacattcttgtcaaaaactttgatggattcctgggaagatacttgtttgaagttgtcattatttttttggttggatacaatcaatttttgcgagagatcgtttctatcataaagatctctccttggatccaacgagatatgtaccagatctcgaatttccacaggagccagccatgtctaacgtataattttgaaggcattcttagtagaggataggtatcttacactttgtcgatttgtgtaaaagcgatctgaatttaaaaaaattaagaagaatcacaacttatcttttaaaactgttttaaaacgtttttttcgccgtgtgaattttggctgcaataaactcgcgctcaaaaacggagtttcatgacaaaataatacaccgttttattaaattacttatgacatttttgtaccagtgtaaaatcgacttaagtagtgttttgtgttgattcgtggttgagtcattttgtctctctgtataacaatgtggtgataatagtggtttgggcgcgaaagttg

SEQ ID NO: 569 - DNA, 3908 bp, Aedes aegypti
atgcaaagtccaattaactctaagtacgcctccaaaagggactacgaacgagaggctagccgatcaggtggctatggacgcgatcgggataattctccggctggaagttcgctaaacaatggcaactacaagtcaatctcaccagacatggactcaccgcgggatcgtgatcgcgacaggaaccgcgatcacgatcgggacagagaccgtgatcggggcggtgatcggtatctgtacggaatgagcaaactgcgagacaaggaccgagatcgagattataaaaaggacaaatattccgattctctacgatcacctaaagaaaaacgaagtcgcagcgatcgggacacggaccatcggtcgaatcacgaccggcggttaaagctttccgtgtcggagaaacgcggtggatcaagttcaaattctgacgatcgcgagcgtgatcgggaacgggaacgtagtgagcgcgagcgagagcgggaacgtgatcgcgaccggttacgagaccgcgatcgggatcgtggcggaggtggaggcggcggcggaggaggtggtggtggaggtagcggaagtggcgggagtggcggaggtggaagcggtggaggtgtaggtggcgatcgggtaaaccgcgttggtgactggagtgaacatgtcagttcatctggcaaaaagtattactacaattgtaaaacggaggtgtcacagtgggagaaaccacgagaatggatggacaaggaaagttacggtttcgacaggatcatgcccaaggaccagcaccgagagtatcgagacaaagaacgcgatcgcgagcgggatcgaaatgatcgggatcgtgaggatcggtattcgtcctctgccggcagccggtccacatcgtatggcaagcattccagcagtaaaagcagtaattcgaggatacggtggccgcaacatgagtcgcacaggaggaggcatgatgaaaaccaagacatggacataagccccggcgattcaacgccaacctcggaggccaattattctcactctagcactccgaccaatcagcaggggcacagtaataacgcggccaacaacgagggtagcacagccgggacgggactgatggcaaatcagttgcctcgattactgtcgaacccgatggcgacacagagtggcattgcgatgccaccccattcgcaatcacaatcctcatcgagctacccggcatcggtgtccacgtcgtctccttccgtactgcaacaacagcaacagcaacctcacatggttgtcgggtccagtggcgacctgatgctaagctcgaatactcccggtccaccaggttcgcaacagcaccaccaccatctacaacagcaacagcaacagtgtcaacagcagcagcaatcgcagcagcaacaacagcagcagcagttaggccagtcaccacattcgtccgcgaatgcaaccgctgccagcacgaatgtgtcctcttcgtcgtcgttagccggtttgccgaaaatactttcacaaatcaccggcaacaagacgatagaacacaacgaactaaacccccagaaggcgctgcaaaccatcaacaatgcactgatgatgcaatcgaggcaacagcagaacccgaacggttccgtgtccggagctacgctggtggacggcaacgccgcggcgaacagtttaagggaacacgcgttgaactcgccgctgtacaatgtttccaacttgtcgcacccctcgacgccgatgtcgtccggtggctgtggcctcctgaaccacagcaatcaccaatccaacaatctgaactcgtccacttcgggggcaaacctgagcggtggcagcaatagcagccaactgctcagtggggatggtccgcccacgcccacccaagaaatggacctggtgttaccggaccatcggaagatggaaggtacgagcacgaccacgacaagtgccgtgagcagtctgcagggagtgatgacctcgtcccaaagtggccgatctcaaggaccgaatctgacgcccagtttagcgaagtacttccgtgccgatttgatatcccatgtgacgggatggccgtcggaaatactggaaaagacggttcagaaaatgtcggaggaggcccacattctcggtgatctacagtgcagcaaagtatcggcagatttaaaatgtgctaggagtgtagttagaataacggaaatcacggcgaccctgcaagaacagaaaattatgtatctacgacaacaaattcgtagactagaagagctaaaatcggaaaactcttttatgtctgatgatctatagcgctattaaatacaaagttaaatttatataaaaaatacagaaagccctacaaaaaaaatgactaaaactagaaatcatcctttctttttaaaggaggaaaattacactagctaactgggatgcatgttatacactgcaatataaaaccgatcgatacaaagtttaaaacatcaacaaatacagaaacaaatttaaacacaaaacaaaagaaaagtcaaagtcaagctaaaccacacatcaatgtataaagctagaggaaaatttttagaaacaatcctgctctgaaatccacggagtcgacagaatgcgaggagacgttgaaagctgaatcatggaaacacaaaaactaactaaaaacacacatacacacctacatcatagccccttccgcatactctcagacacactctcattgataattgcgcagagattcactcgaacacttacaacatagccgttggtaatttctaggatgactgaacataggaagcaaatcgtacgaatcatcaaaggatatgattttaaactgttattattattatatttatatgaaagataatgaagaataaagtttttgttctttatccgtttcaaaaatgcaactaatcagataaaaatgcatcagaacttgtttaatgttttctaaaaatgttgtaatggaaaaatattgtgcatccgagtaaacaaaaaaatacaaatcattcattcagtagcgtagagtgattgaaaggcaaaaatcataataataatcagccccgcatctccctgtctttacaacataaaacaaaacaaaagaactgcattcatgccgggaagaggacgtcggcaatatctctactacactctactagggcctcacggatgacgatgatgaatgttggaaagtcgcccttccgcgaactgtttaggtaaaaaaaggagaaataaaaaatacgatgaagaatacatacaacaaactgaaggaaactgattcacattagaagcactttctagagaaaacaagtaaaaatacaaaaaatgctaaaaagtagtctaaatattcatgtatatttcattaaactataagttatgataagaacaaaaaagtaaaagcgtaaaatcaattaaataaaaaacgttgacaaatgaaacaagagaaaaaaaagaacatcagaacaaaacgtgtatgaaggcagatgaacacatccgtttttaagcagcgcttgacgtgcgttcaatccgtcgtcgttggagcagatgcaatttttttctttctacgaataaacttattgaggaagctcttgcatgcagaataattcaaacaaacacacaaaacagaactaaaccaaccaacctatcgggaattcaaagtacatacaaagtaatctaacttaacggaatgtactaaaaaccataaaataaaagaaatttacaactcgaaacggaaagtggactgatgagataccgactgacggaccggacatacaccagacgaacggacaggaagcagcaaaattttacatctggatccatctctttgatataaccacaagaaaacatggaaacataagtcatagggaaaaaatagtaaagtttagtaatatgaaataatacaacaaagtatatttaaatcaaagtgg

SEQ ID NO: 570 - DNA, 3948 bp, Aedes aegypti
atggccacactaattcccacgtctcaacccaccggggttgaggcgtacgaggacatgttcaaggagatcacccgtaagctgtacggggacgaatccggccatggcctctacccacacaacacccaagtagcccaagtggctcaactagcttcgggtgcccctgcggcccccgaaggaggcgaacggtccttcaccacactggtatcggaccgcaacattgcgcaaatcgattacgaaaccaccacggtccagatccagcaacaacaacagcagcagcagcaacaaggcggtggaactcaacagcagcaatccggagggaccttcaaatccgaagagcatcttacgacggctttcggcttggcggcgctcatgcagaacggattcccgccaccgggtgccatcctgaatccggtgaactttccggtcggcaccacgctgaaaccaagcacaaacattgccattgctacggcggacgatcgctggcagcaacaaacccagcagacccaacctcaagaccaacaacagcaatctgtcggacaggatcacacgtggacgcccaacggcaaacaatcctcgtcgtcctcctactcacagaaagcattcaagaaacccaagatcgagccccaagatggttccccaacgggaaccattggcaccgtcagtacccttaacattccccaaaccggaagcgacaagaacaaggccaactttggctcggccgctgtcggtgcggccaccggaaaacgctacagctgcacctcctgtccgtacacgacggaccggcgagatctgttcacccgccacgaaaacatccacaaggaggaaaagccattccactgctatgcttgcctgaagcagttcaatcgggcagaccacgtcaagaagcatttcctccggatgcaccgggacatggaatacgaaatcgccaaaacccggaaatcggtcaacgccaagaacaactactacaacaacaacacttcggtcagcagttctggcaataacgctacggtgtccacgaccgttacccaatccttggcgccccagcccaccacaatcatccagaccagcaacaacacccttaacattcccacggcaacgttcccaacgcaaattaccattcctactcatcacggtaacaccatcgagcacaccgtaagccatgacattgccaccctcaacggcgttgtccaccatgtccagcaacagcagcaacaacagcaccaacaccaacaacagcagcaatcggcaccgccccctcaccagccgacgcagatcgtcctcggccccccgattgtgaccatcaagcaggagaagggaggggccatcactaccacgacgacaaccgccacggctgcggccgttgccgcagctaccgccatcgtcaacaatagtgctcaacaacagcggggggatatcgtcgccaccgttgggcccgaggagctgctccccaacgacgacaaatcgctcgtcaagaagctgaagggcgagaaacggttcacctgttgctactgtccgtggtccggtgccgacaactggggtctcaagcgccacctgaacacccatacgaaaccgttcgtctgcatgctgtgcgactacaaggcggcccgctccgaacggttggccacgcacgtcttcaaggtgcacaacaaaaaggcctgcaacaagtgcaactactttgccgacgacgaaacccagctcaacacccatctgctggaggcgcatcctcacgatgccaacaagccgcaaccgaaaacgacgacggttgtgatccaggccagtggcggcaatgggggtgtcgttgttacgcaaaatcccccgactgtgttgacggcggtcgcaaccacatccatccccaccagcaccgggacgggaaatgtgctacggaatctagggaacaccttcgttaccaataacgtccccggaagcgtcagtgggaattccttcggaacgaccaccaataccaacatctaccacacgatcacgacctcggcgacgacggggaatatccttaccaacagcaacgcatcgaacctgatcgacacgatcaacgcccatctcgctcagcagacagtggcgaacagcgctgctgctggtggtggtgcaggcgtcagtaccgttatcaatccgggaaacggaataggtggaggggtagcgcaggtagtcatcacaaatggccagcagcaccacctccaccaacaacagcagcaacaaccacaacagcaacaacagcagcagcagcagcagcaacagccgcagcaatcaacgctccatcaatcatcacaatctcaatcacaacctcagcagcaacagcaaactacccaccactggatagcaaaggtcaaccgaaagcgaggagctgagctcctctacagctatctggaggcggacggaagcgactcggaagattatgcccgcttactcaacatgcaagcgatagggcgcaacaaagcttccgtcacgcaggattttcataatgcgggaggcggaaaccagcaccaccatttcagcaacagccacagcagtactaacggaacgaacaagctatcgctcctggtagcggcgtcctcgtcggcatcctgctcaccatcgggatcaccttcgccaccgttgtcccgtttatcaccgccgacgatggttccgctctctaccactactaccactactcaagctggtggcggtggcgccaaaattcccatcgccaatgggatggccatggccaacctgactgaggagcatctctcgttgctccaactgttggccacggccgccgttgctcaacagcatcttcagcaacagcagcagcaactgcaacagaagaacgcgacatcgacatcgattagcacttcgcctcccgcgaatcatcctcaccaacaaccgaacaactataaccaccaccagaatagtacaaacagcaacgtgaccagcgatccggcgaacaataacggttccaagcagcgccgtcgcaaaagtagttcccgaaacgacaaggagaacctggtccagcgtcatccgaccgccaccgtcgtcccaggcggcaaggtcatcgatctgaccaccagcagcaccacccacggaaccaccaacgggcccgcggaaaacggaattgaacggaacaacaacggtagcagcaacaataacaatagtagcgttaacaataagaatataaacgaagctatttttgatagagtgtataagaaaccgtacaatatgtttttatcgagtgcgttctgcaagccttcgccgatcgagaaggacagagcggcgcccaaggacgaaaacttctccctatcggagttcctccgcaatcacaaggaagtctcgatcagcacgctgtccgatgtgcgccccgttaaaccacgtggcgtcgctttggacggtggccctgtcgacgaagacgacgtgatcttcatcaaggaggagaaacgactcggccgcaaacagcagcaaccccggcgtaatctagcgctggacacggaactgaatgccacgccgctgaatatcagttacaagccaccatccggcacgacccctgatcgaccgcaaatcggcgacattcgggacaagcacatgatccgtttgatctcgcggaagctctgctgtcgcatctgccagaaccagcagcgtttggagcacatggacaactgccactaccacagcaagacttcgttgatcctgcacaaccgctggcgccatggctcgtggcctcgaacggaacagtgcaaactgtgtcgcgccagtttcgaccggaagtacaagcttatcttgcatctgcggttgcagcacaccaggcgccggttgtcccagttggccatgaagtccaaatccaagtccaagaaggcgtcatccgggcataaacgaaaggctacatccggcaagaagcaacaacggaagcggaaatcgaagagccgatccggttccaaacatggcaccgtcaagcgacgcaagtag

SEQ ID NO: 571 - DNA, 690 bp, Aedes aegypti
atgcttcttctacactgttgtacacaatacgaatgcgtatgcaagcccaattattgcgaccaggaatgtccagcaaacaaaatacctgcaaatacaaccaatcccaccgagcaatttggagtccctggtaaatgttgcgttccctgcaaggatagctattgcatacatgataggaagtatcacaagcatggcgattggtggcttgctgatgagtgtaccaactgtaaatgtgaatacggaaaagtaagttgtcagatgtcatcgtgtaagacgccaaattgtcttaaatacaagctaattcccggagaatgctgtcctgtttgcgatgaagatggcatgaacttttgtgcagacgtccagttctgcaatatccactgtaaatacggttatcaacgacagggcaattgtgatctctgccaatgcgctagaccaccaacgaacgaatcagtacacacaacagtggcatatcctgaagtcaaatcaactaccgtgaattctactgatagcattgaagacattgaggatatagttcgaaaaggtccacatcaaaacaactcatacgatgaaatgttaaatccattttggatttattttatggcgtgtatatgtcctctggtattcattgtaggaggaattattgtgtggtactatcgtcaaaataacgcaaagtacgacgctgtacaagtatag

SEQ ID NO: 572 - DNA, 3299 bp, Aedes aegypti
atggtagtggcctcgaccagccatggaagcagcagtacttcgagttcgaccatttcgagtcaatcgcggagttcgcagccgaagcttcatcaggtgggtgccgttggcaccgggatgaccccgaaagagctgtcggacaatgacgatctcgcgaccggcctggtgctggatccgatcctgggctttcagacgcacaagatgaacctcaagtaccggccgctgcgggtcaacaccgaccccatcaaggacatcctggaggagttcatccggtcgcagaactacgcccgctgctaccagcagctgatgaaagggaactggatcccgcgagcggtgctcaacaagagcaagctggcccagaagcgactggaagcgcacatataccgctaccttcgggtgttcgatcgcaacgcgggattcgtgatagaggcgtgctaccggtactcgctggaaggtcagaagggcgccaagatctgttccacgcgcaagtggctgaagaacgagaagatcgaatgcttggtgggatgcatcgccgagctgacggagaaggaggaagacgcgttgctgcagccgggcaagaacgacttctcggtgatgtacagctgtaggaagaactgtgcccagctttggttgggaccggccgcctacatcaaccacgactgccgagcgaactgcaagtttgtggcgacggggagagatacggcatgcgtcaaggtgttaagggacatcgaaatcggggaggagatcacgtgtttctacggggaggacttctttggggataacaatcggtactgcgagtgtgaaacatgcgaaagacgagggacgggcgcgtttgcgaaggacaagaacggcgaggagcagagtcctaatggagtgcgataccggttgagagaaacagacaatcgattgaaccggttaaagagcaagaacaacgctctggacctgtgtaaaaccagcatcggtaagagcgaacctccgtctgcgttggctgcccttagcatgaaggagctacgcgaaaagggaatgaccaagtacgacgcagagatgctactggcgcagcagaagccttcgttcgaagccgttcgaccggaccaatcgacacaggaaacggatctgagcagtagcacaactccagctgaaccttccgatgagaagaaagcgaaagcaaagcatacgccggatgttacatcggagaaaatggcaacacgctcttcccgtcgatttcaaaccccaaccgaagagaagaagtcccaacctgctgcagcagctacaacggccagccatccggaggcgaccacaacggaggaagcatccactcccgtcccgttgaaagccacccgaagcacgcgacccctacgagagaacggccgccgaaggtacagcagcaacagcagcctcaatacggacatctccagtgtcctgtcgtcgacgtcttcgttcgtaacggccaagacttcggtcccgacggctgccgaacggaagatgatgcctcgctcgatgaagctcccttccgtatcgcacgaagacgtcatcgtaatcgacgacgaccacaacagcaatcactctttcgcatccaagagcagctgcagtaccatctcggccctctcgtccaaggaacaccttcaaccgccaaagaacaaccacaacacctgcagcagtagcaacgacaacaacgtctatgtgttcaatgatctccttgaaagtaataatctaaacggttacacgctaagaaatcaccacacccaccagcaggagcagaagcagcatcatcatccgccacaggaggaacaacgacaggatccatgttccaccgaagcaccaccaccggaagttgtggaacgaccgccgtcggttaagagacgttccatcaccgcagcaaggcgttccatcacggagcacatcagtccccgcgtgacacggcggaagcagcgtttgctcggcatgcaactggtatccgtgaccgaagctacagcaactgcgaaaacctcatcactgccagacgaaacggaaaagccacaaaccccaacgaaaacgacgacgacgacgactaccgagagggcagagactgctacggatctcacatcgacaagcggtggcgacggcggtggaagtagcggtgccagcggaggactcagcgatagctccaaccggggcaaccggcggaagcagaaactgcagacccggattatgcaagcggacgagctggtggccctgcaaaggcaagcggccgaactggagcgaatcgcgcgggcatcgctagggcgtgtcccgcggcgactcgtactggacgacggcacaaacgaggccgaagatgaggacgatgtgatcctgtcgaaagtaaccaattgtgatgatactaatgataagttgttaagaagtagaaaccggcatgaagatgttatcgttctaagcagcggcagcagcagtagcagtagtagtagtgaaagtaatagtggtaaatctagtggtaggaacaatggtagcgctagtgttagtaatggaaacagtgatcgtgtggggaccgagccgctagcttcgaagacggtgatcgggtcgcgaaagcgaaaagtatccaaaagtgtcagcgaatcggagagcagttccagttgggagaataaggtacccttggagcagcgcctggtggaatcctgtctgagcaacataccgaaccaggaagcattgctcaagactccggagagacgtttgaagctgacgctccgcatgaaacggagtccggtgatcgacgaaattatcgaatcaggtatcgccaaacatcgaaactttctacgagttctgctcaactccagcaactgctagcgaaggctggcgtcaacgcaatcccaaaaaaaatccccatgcacgcgatcactgctttcgagttccagagttagtcgtcggtctcggacgatatttgcaaactaagctttcgatttcggaaaaaagttcccgttcgtttcattgtatggaaaaaaagttctctttattttcgaaacaaaattgttatggtttcgtttggaaactgaccccctcccaatttttccccatatatgtcgcaaagtgcgtccgtacacgcagtaactataaattattattcgctaatttccaactaaagagagagagagagaaagcgagatcgagaatccccctcccaagcatatagattaaagtgtatgtatatgtatgtgtattcggtacgcttgtgcgtacgaggttaggcttaattagttgtcatttacagttatagtttcaaaagcatacattcataagcccaaaaatggaaacaaacaaaacagtaaacaaac

SEQ ID NO: 573 - DNA, 1446 bp, Aedes aegypti
ttggtgacaaaccagtgtttcattgcgagctttgcccgacaacatgtgggcgcaagacagaccttcgaatccacgttcaaaagcttcacactcccgtcgaaaagcctctcaagtgtcggcgatgcaacaaaatctatcaggaccgttacacctacaaaatgcataccaaaactcacgaaggtgaaaaatgttacaaatgtgacctttgtccatatgcttcgatttcggcgcgccatctcgagtcacacattctggtgcatacggatcagaagccattccagtgtgaaatgtgcgaacaatccttccgacaaaagcaactgctccgtcgtcatattaacctatatcataatccggattacgtgcaaccgactcctaaagataaaacgcataagtgtcctaactgcccgcggtcgttccggcacaagggaaatcttattcgacatatggcgcttcacgatccggattcgtctgcacgcgaagaacagctcgctctcaaggaagggcgccaaaaacgagtgaatatcactttggaacaggtggatgaatacgaaggcgaagaagacgaagacgaggaggatgaggaagacgaggacgatgatcaggatgaagtgatgacggtcgagggcgaagatggtcagtatgttgttttggaagttatccaactgcaagacgaggaggaacaaaaaccgaaaataactacggacaaacaagtcgtttttgaagaagttaacattccggaggatcgagacactctagaagagtccaatgctgatttcattctaaacgaagatctatccgacgaaatgcttatgagtacgcttcaaccaccggcaaaaagggcccgttacggttcactccacagtacctcagtatcacacggtaacgatattgagaaagatatgagcaactgtttcggatttgatgacgatagtgatgatgaaggtaaacccaacatcacctgctcaactagtgacctagatgatagtcatcatcaatagggctttcaaacccaaaattcatcttccacacgcatcagacgcctgcaactgtttaccctcgaaaaatattggtgaataatcgtgtcagttctatagcatgaatgggaaatcaactgatctgaaataattcctaacaccaaatatgacaaacagtcatataggtagccagaataaacaaccagtctttagttcagattatttcgcccggattttgaacatgcctagtcagaatgattataatgggcacttcgtaaacgctttgtattttattttagattctactaaattgtaagaggattgtttgccatctgcggctagctaggtttgtataatagaagcagatagttgctgctcactcttaccgtaggctttacaacgttccaaatgcgaaccgttagaatacagtgtaaatttgttaaaattgaataaacctaagttttaatacatt

SEQ ID NO: 574 - DNA, 2290 bp, Aedes aegypti; identical to SEQ ID NO: 231

SEQ ID NO: 575 - DNA, 7683 bp, Aedes aegypti
attaataataaaggatcaccgatagactacaaaacgggttcggcctgttcaaccccaacgaaggacacgctcaagagctacgaccgcaactgcatgggtccggtacttccaccgaggagcgccatgtgtggtccaccgtcacatcactactcagccccgctgaacttccgcaaaggcttcaccttcaccaaatgtacatggaagtgtacggctatactagttgtattattatgtgttatactggttataacattactattaacagcatctaacgtattaagtatatcatatcctaccaacaatccctgtacagttctagtcgatgaaaaagcggaaatctctgcagccaaaagtacgatagcggacgcgaaccgggcgacggggcctggaagcatcggggcgttaccagggcggcctaacccgtccggcagtgcgggagattccgcatcgctaagttcagcttccgcatccgcgtcctcgtcttcatcagcggcatcaaccgcgtcggccaacagcaatagtaatgcgaacaacaataacaacaaccagaacaacggaggtacagtaatcaccaacagtaataatcctagttcccacaattctacctctactaccatcggtgatggttttacggataatggtgttagtgcacgaacatttccggcacggagtttccccccggatgggaccaccttctcgcagatctcgctcggccaacggctatccaaggaaatccccccgtacagctactggaacatgcagttctaccagtcggaaccggcgtacgtcaagttcgactacggtatcccgcggggcgcctcgatcggggtgtacgcccggcggaacgccctaccgacgcacacccagtaccattttaaggaggtcctgagcggattcaacgcccggcagacccgagccacccatccctcgatgcgccgtgaagtgactcgctacatggaacccggccactggttcctgtcgatctacaacgacgacggagacgcccaggagataacgttctacgccatcgttgcggaagacatgacccagaactgccctaacggatgctccggcaacggccaatgcctgctgggccactgccagtgcaatccaggctacggaggtgatgactgcagcgagagcgtatgtccggtgctctgttcgcaacgcggcgaatacatcaacggcgagtgtcagtgtaatcccggctggaagggcaaggagtgctcactgcggcatgacgagtgcgaggttccggactgcaatggccacgggcactgcgtcagtggaaagtgctcgtgcgtacgaggatacaagggaaaatactgcgaagaagtggactgtccccatccgacctgctcagggcatggcttctgtgccgagggaacatgcatctgcaagaaaggctggaagggaccggactgtgccaccatggaccaggatgcgttgcaatgtctgcccgattgttccggccacgggacgttcgatctggacagtcagacgtgcacttgcgagccgaagtggagcggcgaggactgttcgcaggaactgtgcgacctgaactgtggccagcatggacgttgcgtgggcgatagctgtagttgtgatgctggttggggtggcgaattctgcaacagcaaattgtgcgatccgcgctgtaacgagcatggccagtgtaagaacggaacgtgcctgtgcgtcaccggctggaatggcaagcactgcaccttggagggctgtcccaatggttgctctcaacatggtcagtgccacgtaagtggagaactgatgtgggaatgccgttgctacgaaggctgggatggtccggattgttcgatgccgttggaacagaactgtggcgacaacaaggacaatgacagagatggccttgtggactgcgaagacccggagtgctgcggaagccactcgtgcaaaacgagtcaactgtgcgtttccgccccgaagccgattgacgtgttgctccgcaagcaaccgcccgccatcacggcgtccttcttcgagcggatgaagttcctcatcgacgagggcagcctgcagaactacgccaagctggaaacgttcaacgaaagtcgatcagccgtcattcgaggccgtgtggtgacatcgctacagatgggactggttggagtacgtgtcagtacttctactcccctggagggcttcaccctaactcgtgacgatggatggttcgatttgatggtcaacggaggtggagctatcactctacagtttggaagatcgccattccgaccgcagacccgcattgtgcaagttccatggaacgaagttgtcattatcgaaaccgtcgtcatgtccaccatggacgacaaggagaaaaccggaccacctcatacctgcttctcgcatgactacgactcgatgaaacccgttgttctagccacgtggaagcatggtttccaaggagcttgcccggatcgcagcgccatcctggcggagtctcaagttgtccaagaatcgcttgctattcctggtactggactcaacttggtctaccacagtagcagagccgctggatacttgtcaacgatcaagttacaattaactcccgatgtaattccacccactctgaagctgatccacctacgcattaccatcgaaggcattctgttcgaacgagtcttcgaagctgaccctggaatcaaattcacctacccatggaacagactcaatatctatcgccaacgagtatacggcattaccacggcagtcgtcaaagtcggttatcaatacactgattgcaaagatatcatctgggacgttcaaactactaagctcagcggtcacgatatgagcatctccgaagtgggaggatggaacttggacattcaccatagatacaacttccacgaaggtattctgcagaaaggtgacggctccaacatctacctgaagcacaaacctcgcgttatcctaaccaccatgggcgatgggcaccaacgaccattggaatgcagcgactgcaacggaatcgcctctaagcaaagactactcgcaccggtagctctagctgcagctccagacggaagtctctacgtaggtgacttcaactacattcgccggatcatgatcgacggaaccgtgaagactgtagtaaaactcaacgcaactcgagtttcctaccgctatcacatggcccttagccccctggacggttcattgtacatttccgatccggaatcgcaccagatcatcaaggtcaagaacaaggacgactcgcacgatcccgaacacaattgggaaccagtcgtcggaagcggcgaacggtgtctacctggtgacgaagcacactgcggcgatggtggtttagcacgcgatgccaaactagcctatcccaaaggcgtcgccatttcctcggataacgttctttactttgccgacggtaccaacattcgtatggtagatcgcgatggcgtcatcactaccttgatcggtaatcacatgcataagtcacactggaaaccggtcccatgtgagggtaccctgaagatcgaagaaatgcaccttcgctggcccacagaactgactatcaacccactagatgacacacttcacatcatcgatgatcacatgatccttcgcatgacaccggacggacgcgtacgagtaatcgctggtcgtccactacactgtgcttcagcatcaccaaccacattcgattcagacctcgcagcgcacgctacgctcgtaatgccccaaagcatcgcttttgctccatccggtgatctctacgtggcggaaagcgactcccagagaataaaccgcatccgagtgattggaaccgatggtaaagtagcttcatacgccggagccgaatccaagtgcaactgcctggaacgtggatgcgactgctacgaagccgatcactacctagctatcagtgccaaattcaacacgatctcagccatcactgtaacaccggacggtcacgtccacatcgccgatcaagccaactaccgcatccgctccgtcatctcaagtcttccggaagccggtacttccaaggagtacgaaatctacgctccaaacgctcaagaaatttatgtattcaatcggtttggtcaacacattgccaccaagaacatcatgaccggggaaacgacctacagtttcttgtacaacgtcaacacatcaaatggaaaactcagcactgtaaccgacgcagccggcaacaaggtattcctcctacgagactacaccgcgcaagttaattccattgagaacaccaagggccaaaagtgtcgcctacgtatgacccgtatgaaaatgctgcatgaactcaacactccggacaactacaacgtcacattcgactatcacggtccaaccggtctgctgaagaccaaactcgactccactggacgatcgtatgtgtacaactacgacgaattcggcagactgacctcggccgtcactcccaccggaaaagtcattgacttatcgtttgacttaagcgtcaagggagcaaccgtcaaggtcaccgagaactcgcaacgggaggtttctatgctcattcaaggttcatcggttgtgtcacgagtcggcgaagctgccacgaagactacagtaatggttgacggaggtaccaccagtgtggcaccttggggtaatacagtttccgtcgaatcggtaccctacattctactagcggaaatcgatcctctgttgggtgaaagctacccggtgccgtcgaagcagcgaactgaaatcaatggagatttgtccaaccgattcgagtggagatacttcattcgacacgttccggtccgaggaaagaacgcccgaacacttacccaggtcggcaggaaactacgtgtgaatggagagaacttattgacatttgaatacgagaaggacagttcgtcgatcaccgtctccgtggacgacaaaactgacctgttgaacgtaacgtacgacaagtcgtcgcgaccaattgcgtatcgcccacagtcgggtgagtacgccgacgtagatttggagtatgatcgcttcggacgattgatctcgtggaagtggggtaatcttaaggaagaatacactttcgatcgcgctggtagactgaatgaaatcaagtacggcgatgacagctcgattgtgtacgccttcaaggatatgttcagcagtctaccgttgaaggtaacaacgcctcgtagatcggactacctgctgcaatacgatgatgctggtgcgctgcagtcattgacaactcccagaggacacatccacgcgttctcacttcagacatcgctgggtttcttcaagtaccaatacttctcgccgatcaatcgtcatccatttgaaattctgtacaatgacgatggacagatcttggctaaaattcatccgcatcagtctggaaaggtggcgttcgtgtacgacagcgctggacggttggagaccattttggctggattgtcttcgacgcagtacatctaccaagagagcacgagtttggtgaagatggttgaagttcttgagccaggattcgaactgagaagagagttcaaatatcacgccggtgtaatgaaagacgaaaagctgaagttcggttcaaagagtgctttggcatcggcacatttcaagtatcagtatgacggtaatgcccggatgagcggaatcgagatggatatcgatggcaaggatttaccgatattgcggttcaagtacggccagagtcttggaacactggatgcgataagtgatttacggataacaaggaatgcatttaatagaaccgtagttcaggatacctccaagcagtttttcacgatcacagattttgatgaacatggaagagtgaagagtgttctgatcaatatcaagtcgttcgatgtttatcgtctggaattggactacgaccttaggaataggatcaaaacgcataaggtaatggtaggtcgagtgacctcgctggacaaagtgaactacaatgccgatggacatgtgagtgaagtggttggaacaaacagctggaagtatctgtacgatgagaatggtaacataatcggcattttggagcatggtgataagacaaacttgggttatgacactggtgatcgtgtggtacaggttggagatgtggagttcaacagctacgatgcccgcggttatgttgtcaggcgtggagagcaaaagtatcggtataacaacagaggccagctgattcatgctttggagcgcgatcgcttccaaacctggtacttctacgacgatatgggtcgattggtggccagtcacgatgaaaagggaaatgtaacgcagtacttctacgctaatatcaacgcacctgagctgattacacacatccactatccgaaggtgtcgagaacgttccgtttcttgtacgacgatcgtgacatgttggtggctgtggaaacgggcgaacagcgatactacgtagcaaccgatcaaaacggatctccgatcgcgttcttcgatgtgaacggaaatatcgtgaaggagattcgacgaactcctttcggaaaggtcgttaaggattccaacccggacttcttcataccaatcgatttccacggaggactattggatccgaatactcgactggtatacctggagaagcgattatatgacacagcggttgggcagtggatgactccttcatgggaacaactggctacggagatgcgtctgccgacggatgtctttatttatcgattccacaataacgatccaatcaatcgcaaagaaccaatgaactacatgaacgatttgaagtcttggttgaagctgttcggatacgacgtgaccaagatgcaaggatccaagtacaccaaggatatgatctacagaccgaaggccatgatcaaatcgccgcaacttgcacccgactttggcgtaatgtccggactacaatgcatcgttgagaaggtcgatgaaaagttctcggactttggatttgtaccgaaaccattgctcaagatggaactgaagacaagcaatttgctaccccgagttgcctaccgacgtggagtcttcggcgaaggtgtgctgatctctcgtattgatggacgagcattggttagcgtagtcgacggatcgaacagtgttgttcaggatgtcgtatcgtcggtgttcaacagttcatatttcttggatctacactttagcattcacgatcaggacgtgttctacttcgtgaaagacaatattatgaaactccgagatgacactgaggagctgcgaaggttaggtggaatgttcaacatttcgactcatgagatcaacgatcatgcgggaacgaacggtaaagaactccggttgcatggaccagacgcggtcgtgatcatcaagtatggtgtcgatcccgaacaagagaggcatcgaattctgaagcatgcccacaaacgagcagtggaaagggcttgggaactggagaagcagctggtggctgcgggcttccaaggacgcggtgactggacggaggaggagaaagaagaactgatatcgcacggtgatgtcgatggatgggtcggtgtcgacattcatagcatacacaaatatcctcagctggcggatgatccaggcaatgtagccttccagcgagattcaaagcgaaaacgacggaagagtgggggatcgcacaaaacgctgacgctaaggcagcacaggcacgaaacctcgtga

SEQ ID NO: 576 - DNA, 5245 bp, Aedes aegypti
tcaaacaaacgccatgcaaataacataaatgaacaaggtaatatctgtgaacgagtgcctaatatgaaacgtttcgaaaacatgtgaatataattcgttgaacatgtacccatgttcgataacggagttgttttagtgattgctatgaaaataatatcaaaacatgtttcttaaataattcctagatctcatgatttcatttttgattcatggaaacccgaagtcactgttcaatgtcaacaaatttagccaatctgctgatttgccgttcttctaacatatatcactaaggggttctttgcatttgtgcattgtcgaaaatttacgattcccgcaatcctttcaagagctagaggaaaatagtcattttccgctccaagcgcaatgcactgatgcaccctcgaccatttgccacagtacggagggaaaaagggattcaattccaactgtttttgcaatgtatcaatgtcacctgttcacctgccgtcgacaacgtatttcatccctgtcgacgacatgcttggcatctaataccttcgctctcggtcatcgttctaatctcccgtgttaaagccctaaccgtgtagtgtgtaagacaacgtccgcgaaccgggaaatgccattgccaacgaagtgttaaattgttttaattgttgtttacaaacagtgtccgccaccagcaccggtccaaatccaaacgacaatcgctttggttgtttcgtcgcagaccgacaatcccagaaaattaatgtagcgacaggaaatcatgcggttttggctgccagattggtcgtcctgtctgcaatactcccctttcggtcgacagagaaactagttaatgggttaggcagccacatgaacaaccgtttaaagaaggggaacactccttaactgttttatccaaaagtagccaattgaataattagacaaaaacaatagctaagacaaaaaatcactaaaacttttttttttttttttgaaaaactgtagataatcaatataaatcaaaaatacgctcaaaaataaaaaaaaatcaatgaaaaatagaaactaagcacttaaaaattctaaaaacgtcaatggaaaaataaaaatgagaactaagaagcaaaaactagccaaaaaatcaaaattattttccagttttagaattcaagttctattattgatttttctttgtttttactctttagaattttgaatagctaattcatacttcatctattacttgtttcgaattatttggttggctgtttttggataaactagtgattgttatccttttcctagggcatgatattatttttccctatgggttatggtcaagtgtggacctagagcgcaatcaacgcatcatgctatcgacagaagcacctcgcacgtgtaggcgtataaagtgcacatccttaatgcgtgtacaaccgtattgacagtgtggaatatgtaggccatcgtatctgtcgggctagtgatacggcgtctctctatagagataactgccaggggaaggggttgtgacaccacaaaaaccgcacacacacacagacacacatcagtgtggctgcatttactgcctaataacttcgagcaagcatcagcagcatactcacctgttgcagtagagcatcagcgccatggattaccagtgtattgtgatctacaccatcgtcaggataacaccgtatcatccgtacaactcgctctcggagctggaagcagaccagcatggatgcgttgattggattaagttctacattaaaagagccgtcgcagcatacctccgggcgctgaacctgtccccgtacaatgcggtcgttcacggaaatttggcctgtgtctactacgagcagggcctcatcgatttggccatcgacacgtaccgccgggcgattgaactgcagccgaacttcccggacgcgtactgcaacctggcgaatgccctcaaggaaaagggccaggtccaggaggcggaagattgctacaataccgcgctgcgtctctgcccgaaccatgccgattcccttaacaatctggccaacatcaaacgcgaacagggctacatcgaagaagcgacccgactctatctgaaggcactggaagttttcccagaatttgctgccgcccattccaacctggcgtcggtgctgcaacagcagggcaaattgaatgaagccctcctgcactacaaggaagctatccgcattcagcctacgtttgccgatgcctattcaaatatgggaaacaccctgaaggagatgcaggacgtagctggagcgcttcaatgctacacccgagcgatccaaatcaatccggcctttgccgatgctcacagcaatctggccagcatccacaaggactccggaaacatcccggacgctatccagtcgtaccggacggccctgaagctgaaaccggacttcccagatgcatactgcaatttggcacactgcttgcagattgtttgcgactggaccgattacgaggcacgcatgaagaaactggttgcaatcgtagcggaccagctggaaaagaatcgactaccgtcagtgcatcctcaccactcgatgttgtacccactgtcgcacgatttccgcaaggctattgccgctcgccacgcaaacctatgcctggaaaagatccacattctgcacaagccaccgtacaaattctcccgggacatgagccagcgactgcgaatcggttacgttagcagtgatttcggaaaccaccccacttcccatctcatgcagtccatccccggtatgcatgatcggtcacgagtggaagttttctgctacgcactcagtcccgatgatggcaccacgttccgaagcaagatatcccgcgaagcggaacacttcattgagctgtcgcaaatcccatgcaacggcaaagcagcagatcggattcacgccgatggaatccacattttggtcaacatgaacggttacacaaaaggtgcccgcaacgaaatcttcgccctacgacctgcccccattcaggtaatgtggctggggtaccccggaacgagcggtgccagcttcatggactacatcatcaccgacactgtaacgtccccgatggaactggccgatcagtacagcgaaaaattagcctacatgccgcacacctacttcatcggtgaccaccggcaaatgttccctcatctgaaggaacgacttatcgtgagcggcaagcagcagaacaaccaactggtggacaacgtcgcagtcatcaatgcgactgatctgtcgccgctggtggaaaacaccgatgtgaaaacggtacgcgaagtgattctcgcacacaagcccgttgagattcagcacaaagtcgtagaacttccaaccacaaccccggtggaaacgatgatcgcctccggacagattcagacctccctcaacggagtggtggttcagaacggattggcaacaactcaaaccaacaacaaggcagcaaccggcgaggaagtcccccagaacatcgtcgtgaccactcggcagcagtatggcctaccggacgacgccgtcgtctactgcaacttcaaccaactgtacaaaatcgacccgcacacgttggcttcctgggtgaacatcctgaagcacgtgcccaactcggtgctgtggctgttgcgtttcccggcggtcggtgaaaccaacatccaggcagcagcccaacagctgggcctgtcgcccggtcggatcatcttctcgaacgttgccgccaaggaggaacacgtccgacgtgggcagctggccgatgtctgcctggatacgccgctgtgcaacgggcacaccacgtcgatggacgtcctgtggaccggtacgccggtggtgacgctccctgccgagaccctggcttcgagggtggccgcatcgcagctggcaacgctcggctgtccggagctgatcgcacgaagccgccaggagtaccaggacatcgccatcaagctcggtaccgacaaggagtacctgaaggcgatccgggccaaggtgtggctggcccgctgcgagagtcccctgttcgactgcaagcagtacgcccagggaatggaagcgctgttctacaagatgtgggaacggttcgcccgtggcgaaaagcccgaccatatatcggccaaagagggccccaagtaagttgaggggacgctacgaatagagctattttataggagggaaaaaaacgtatgcttttataggtccacttttaatgttcgcagtttttttcagttgaatgaaacttttattatggcagcgatggctgtaatatggaaacttgacacttgtatctagagaaagcttacaaccctatttaaatcgtagttaaatataaacttaaggaattgtataaagttctatattttgaaggtagcatacgtttgatacccagcccccatcttagctataattaattgaaacggtagaatgataatcgattttcttttagaactgatttacgccatcacgagaaatagaaaatatcctacattgaattgaacttacttacgataaaacttttcagtacaatccgctgaattattaggtaactaataagagggaaatttagagaatatatatcttttttagcaacgcgcaacgaggcgattgttcatgaagacaaaccaaataataaccaatatatcatgtaaatgcattgctcttggcagatatttaaaacgttgcaatgctttcgttccctgagctactaactgtagatagcgccccatgctcagccacacagtaaatttcgcatttcttgtgcgtttcgtttcaaaagcgcatctagcaagagaagacagctgcagtacaagcatgaaaaaaaaaatacttaccccaagtcagcacagagagatagtttgagtcattagcatatcttgcaatttgatcaacctacaaaagtgcttattttgtggagtgattagtttattctccacaccaacctaaagtgttgcgagtcgatttgtgtgattgacacaaacttaaccgctacccaactaatgtgtgattgatgatgatgaagatgataatgatcgacgatgagtgaaatatgaatatgtctaacagtgtgtacccccgcaatgcgttggtgtgacactaatggcggcaaatactttgtaaatagattcgtttcccctaccctgaccctatctcagaagcgtttgaacatgccgcaaaaagcaaataacaattattttctgtgtagaaatgtaagtgatagtaaggaaataaattcatgttacttgatg

SEQ ID NO: 577 - DNA, 807 bp, Aedes aegypti
atgagaatagaagttaattcggctgcggattttctgatgaatttgctgcgagtaaaaaaagcaaatcagctatccgagagccagctacagcatttcaagggttcgttagagcagattttgacgcgtcatttcgcacgccattggtatcctgatgttcctaccaagggttccggtttccgctgtctacggatcaacggcaaaatggatccgattatcgagaaggctggtaacgctgcgggtttaaactcggtcgcacttcgaaagatgctacctctagagctaacaatctggatcgatccggatgaggtgtcgtaccgaattggcgagaacggtaccatctgtgtgctgtacgatcaacagctaagccgtgccagtccctcgtcggatcttgattcgacgggtagcagtagctgtgatgaattcattatggaacgagtcggccgactggatctgtcgacgtcgtcagatagtggtactagtgttatggtagattttatggatgccaatccatcgaattcgcttgtaacgcagagcaagcacaacaagtacaacaacaatcatcatcataataatcatcattacgtgaagcgtcataacaacagcgtcagctcgtcatccagtggacaaactagtccaccgcttagtccaccatacaacggctacaacaatagcaacaactttaacaacaacagatatcaacataataaccaacacaacaatttctactcgccatccgttcatcagcagcaaccatacttcccctgggacaaccagttcgttaacaacaaagttcgtacgcagtgttaa

SEQ ID NO: 578 - DNA, 4131 bp, Aedes aegypti
gccctttcattacagtttcagtgaacgaagtttaccattatggctacgtcgtcaggcaaaaaagggaagaagacttccaagaagaacaagctctcgctcggagagttcctcaccgatggtaacgcggcggcggtatcgcaggtgcaggtcgccgttccggtcaagttcagcaactgggccgacgagtgcgacgaggacgaggacgaccgtccggtccgcacccagctgattgctctgccaacagctccgcgggccacccgcctgctgaacgatgacaccgttccgcacaatccgcccttccaggcgtacatctccaatctgccgtacgatctgaccgacaacgatgtgtacgacttcttcgacggaatggagatcgcctcgttgcgtcttccgacgcgtgacgatggcgaacccggacgcctccgaggatacggatacgtcgagtttgtcaagcgccaggatctgattgatgcgctgtccatcactgaaccgatcatccacggtcgccgtattcgcattgatctgtccagcgaaagcgatcgcggaaggcagcagcgtaaccgcggctacgataactatggcggcgattcagatcgtcccatgggtaactggcgtgacggacctcgtgcgaatgctgatcgtgaccaaggtcagagaagaccctaccagaacaactacaaccgcgatcgtggagatcgcgaagatcgagaacgctaccctgcagacagtggcgccggcggaaactggcgccttggagatcgtccacagccaactccacagtcgccaccttccagccgaagaggctacgatcgtggagatcgcggtgatcgtggcttccggcgaggtggagacctttccggagatcgtggcggtcggagagatgccgaaccaccgatggagagaccgaaacttgtcctgcagccccgcacattgccacttccggagaggcccaagccagaaccggagccggaagagagagattccagccgggatcgtaagtacgactccgaggcttccgagaacaaagaaaacgaagagcagaaagacacccgccctaaacctaccccagtgcccgcggccaacattttcggagccgccaaaccagtggacactgcagcccggctgaaggaaatcgaggagcgaatgcaggagaaggcacgactggagaaagaggagcgtgctcgcaagaaggctgctgctgccgccgaagccgcggccgtggctggatcctcggccgacgaagacggcaaggagaaatccgatcccagtaaagacgaatccgccgaagaacattccgaggaacagcagcacccggagccgaaaaaaccggtggaaccggtcaactggcgggtgcgatccgatgacaacagagacagcgaacggcgccggcagtcaccccagcggaggtacagcccttcgcgcaactacaccaaacgatccgatgattactcagacaatcgggacaaccgggaccggggtatgaaccgggacaatcgcaacatgagagacaacagacgagattacaatcgaccaggcgatcgggatcgcgatcgcggctaccggggagaccgtgaccgggacatgacccgcggaggaggcggccgtgacatgcgtgacgatcgcgacaaccgtgaccggcgggacaacgtgcgacagtacgatcagccgcgcgatcgggaccaggtaccgatcgaggagcgtatgccaaaattccaggaatcgtctggacccaacctatcaatgaagaacacgttcgacggattgtcggcggatgaagtcgacgattagagcagttccaatctcaaatctagcaaaacaaaggaagcagacgagaagagcccttgagcccttgagggtagggggcgtaggttcacaaacatataaaagcaggaggagatcaactaactagtagtattctaatacaagaaacaagggcacctgtggtggggacaggaggagaaaccattttggattggaaccaatattctttgattcacagcggacacagaaaggaggacaggaggacaaggtactagagaagcgattaatataataatatcaaacagagagcacagcataaaaaaccgatagcgacggagcgtgagacgcatacacacatacaggcacacacatacacactcagagactagaacgaaccaccagtcggtcgatcggtcgctgactagaagggataggttacaaatagcgcttagagtgctagtgcatagattaagacaatgctgccgctggcaaggagctgacggggcgatggaaatgcagctctttccgtggctcgatgtgcggacttggggaagcgaagcattttcatcgcccggtcactttcagcagccaatcgtgcgtgtgcgaatgaacaaaggaggagaatgggaaccggggtagtagatcaaagtttgtaaaatattctattcactgtgtgtaatttatgtgtatgtgtacccaatggacccggcttcgaggtgttttaccgggaagttgcatgagatatgatgcgaagatgtatgtgtgaagtatgtgatgagcatgatgatgatgtgtgtgaatgcataccataaagatacttttgttttaaggaaattaagcagtcggaacacgttggatttccatttggtagaacagcaaatcgaaatcgtactcgacggtgatgatcccgagagaaagacagtcgaagatagcattcgcattttttgataagacaattttacaatcacaatctcacacattacacacattgattattgcagcagcagcatggtaattgaatactcgttcactatcgaagtatgattaatatatatgtatgtaaatcatgaataagagtaccctcatggaagtggcagtgtctgccttccctggtgggagttctgattccaatgtacaatgatctgaagcgacaatttagcaggaataagatctttttttctgtactcgtcgattttagacgtatgaagtctttagaaaagatctccagaaaacttgatctaactctttattcgagcttagtaaatcagttctgaatgtttaaacttgtggtggatccagtcaatttgtttgcttcgcggatgatatagacactgtaagccaaacatttgaaaagatggcagacctgtacacttgtacgttttatctttcgatcttttcattaattcattcgtctaaaatcaacgagcagacatcattcgtctaaaatcaacgagaacagagaaaaaagtttttgccttgccaaattgtcaattcggaccactgtgcaatgatcctctccaaaccttcgacttatcttttggaatataattttgttcgttggtttccttcgtcgtcgttgtcgtcgtcggtgtgtgcgtctcatcggtgtaaaagttagaatacgatgcgtgtgaccattaattcttagagaaaagagagtgtgttgccgaagaaatgattccaaaatgtgctgatagaatgtttaatttgttctggcaatgatttccccctgttcgtttcctccattttgttttttttacatatataaataggaatgtataacatttacaaatttctgttttattctatttaacctctgcgaaataaaaaaagctgctgcgaccccacaactattgcggggaggaaatcgcttaattgttatataacaatattcgctgaatttaggacgcgctatcgattaatatggttaggtagccgaaatctcagcaaaatattgtctaccttctttttgcgtatgatatacttacagacttacacagacaacacacacatacatacaaaccatatgaactggcaatgtttctttatattaaacagaagaaagctcgtgctcatagataatcaagaatgaagatataaacaaatagttaatttaattgtttaataaatgcatgggaactgtcaacaacaaaaaagtctaggaaagattgccacctttttgtcgcaaattagttatctattgaaactgattttttctgtatttttttgtcgggaggcgtatgatggaattatttagagttctactactattaattacccgtacccatatataggctaccatatacgggaagctaggaaaaaaccaacttgaaaaaaggcaatttcagaatacagcatatacatctaagg

SEQ ID NO: 579 - DNA, 4367 bp, Aedes aegypti
gggaagaaaaagaagaagaagctcgtcaagctgatttctctgtggttgctgtgttcgtgaagaaaaaataagttttgacaaaaaaggttcgacggaaaagagtaaaagagaaaattattttatagctgatgatttcaaaattgttactcgtgataagggaggaaaagtggaatgaaacgcaattgaattgcgcgattgaaaaagcaaaagtctacgaaaaaatggtgtaataggagagagtgaaaataaattgcgccaccgcctttttccgtaccgagaggaaggctattactttcggaaggtccatcatctgcagctgtccctttttgtaaagggttactgtgatactgtaacagtttgacgagctgatcctcctgggtggatttttgcaatcgtagcaggcatttacagcgccattaaaataggtgctgctgctgttggtgaacgcccataaaatcggatttctacgataacatgtcattgcgtcgtgacggcctttcgggcattcggtttagtgtatctagttatagataagaagattgcacaaagaggaaggaagtgcactattatttgcaaatcttgagcgaaaatctcagttcgtgaccaataattgatgtagtaagatattcaacacggggcctacttggtggtaaaagtgtataagttggttgccatagtgttgccgcttcgaatgtctgtcagtgtgttcgtggcctgctattaatatttgaaaaatagtcctcgagtagcgagaagtaaaaaaaaacaaaatcccagtttactaggattatacgacaactgccgctgctcaccatataaaaaatgaccgacaaaattaccaaattcgaaaggatggcgatgacgaagccggtgccgatgaaactatttgccgcatgggaggtggatcgtacgccatccaattgcattccaagattatgctccctgacaataacccgtctgtcgttgctcaccccactgccgcccgatctcacatctctgtcgctagcagtcaaaatgcagagttctaagcgtacgcttcgttcacacgagattccagtaccccaatcgttgagcaccggctatggcagtaccatcagtagcggaaatatgagtagtagtgcgccaggtgttgttggtcaaggaggtcagctcaattcacctcccttattggaaacagaacttgatctccatttcagtctacaatatcctcactttatcaaacgggatggcaatagactgttgattttgctacagcgacgaaagaagtataaaactcgtactatattgggttacaaaacactagctgaaggtgtgattcgcatggatgcagttttacagaaatctatggatatgacggtagaactcaacgggtctgggaaagcaggtcgtcaggggcttacgatagccactctacgtgccacacaggtctcttccattccagtggatcaagacaataaaaacaacaacagtctattagttacggatcgcgtcaatgagtattctgatgaggatgaagagcaggaatttagttcaggagacgataatgacgacggtttatccggatatgcagcgaaaaggaattatgctggaaagcgagatccatacaagaaatttgatcgtggtgacaacgatggcgacggagatgatgggaatttgctaccttcaaatcaagtggatagtgatagcgattttgaaaatttaggaaaagaaaaaggatctcgtgctaaaatgagtcggcaacgaaattttaaacaacgcatcatatcattattaaagcggttcaaagttcctgacgaactggaaggggatgtaccggaacgtgggcaatctttgcggggcaaacgagatttagacgcattgttccaagaattagaatccttatcttgtggagaaggtgatgattccggccaggacatggatagtgtatcaattggatcaacgccgaaaccatcattgagaccatttttcgaaaatccgaagccagcactacaacatcaacaatccgctgttcaactaagtacgctacagaaaagtaccagagattttatgcctgaaaagaaaaccattttagagaagcgtgactcactcgtcgaaaagaaaagcaatgcagtaataattgccaataatcttaataacagtatgaacaacaatatcagtaataacaaccatactagcaattacagtaacagtctaagtaacagccaagaccgttccggtgactggaaaaatgatagttccggcaatgagggtggtgctgggaatacggatcctgaagcattatcatcggatccccagaatactggcagtccaccaaaagaaaaagaacaagcggttgtggaaaagaaaaatcgcctatttcgtaccagtagtagcactcccaatagtgccaaaaagcaaaagcaatcccttagcttttcatccggcgatcaacctaaaacatcccttgagacttgtctttcgccaacaaatgtagagcctcgtaaatcacttctggaacaactgtcgcgcatattcaccactgaagaatcccagctaccggatgtagttacaattattggcccaccagaagccagcagtagttccactcttacacctcggctagtgtcactcatatcatcaacttttcggccaacattttcccccaacaacacagctgaagtgaaagcaatcacacaagcactcatgaacaaaatccaaaaatactgtaactcaacggccaagccgccgacgactgtaaaagttttgttggttggtggagattggctacagggggccgtgttacgccattatgttgagcttctcggaattcgtccacctgattgggtgaaccatatcagattctacattgttccaattggttcctgtggagtggcgcggtatctaagcttgattgattcgagctactcaagcatgtttggaactgagaactggcaacaaatctgtgatcgggctgctaacctcgaaagcgcacaaaccaaaattgaatcagcggaaatcatcagccgaatacaacgctatctgcattcttctgggccttgcactcaagttcctattgcggaagcaatggttaactatcgggatgaagattcttgccagatttttgtcccattcataagtgatgtcagaatagggtgtctagaaggaccgcagctttcgttagatttggaagaaaccatgacacaaagttcgcagcaaagctcggatagaattttatcaagttcgccaccacaaagtggaagagcgtcaccccctgctccaataacaccagctcccataatgcaacatcaatcgaacagtagcggaagtccccaggaatcagtagaactacaggtggattattggccgttggctcgacccattttagacgcaaaagaaaaatcccagagtaagggtcaagatcagtcaggcaaaaacagtattaaaagcaccttcagacatttgcaggtttggagactgccacttgcaccaaataatggcgaatacactaacggtttaactttaagttatgccactaaggagaagaaacagaagagcgttatgcggcttggcaagaagaaggaaaaagatcgcgacgctgaaaaagagcagtgtgtagaaggtgttgctaggctgatttgttccccgaaacaatcccatccagttcctttacgagtttatatcgacggtaccgagtggacgggggtgaaattctttcaactgtcatcccagtggcaaacacatatcaaaaattttccaatcgctttagttggagcaccactggctccggctgagatgctaacctagtcagtttcttcatccactgcattgggggctgttgttaggtccggcatgatgacgcagaaatccgccatcgtgttaggtcttccaccagcgccgcagcagggattgtcatcatcgtccaacattatcgcatcgcaatcttctactgctggtaagtcagataaaaatcgctgctcctctactacgtttgccatcacaggggcttctattattagtaataacgttagttctactaaaggtagcgtaagtggtagcaaaaatactatcactcctcgggcctcacttagcagttcatctcgaattctgagaccccgcagctgggctgctgctagtcgatccaactgcgactgaatagaacaacattaataaatacatgttttgtgtataacgctacactaccttgtaaggctgtttaatagaaaaatgttggaagtcaattttaaacggctacgctcaaaactatgcgattactttagaaacaggcgtccatctagcgggtaatgttatatacttgtgttatgtctgcaaacttgtttaagagacagtgtatctatttttgttaaaaaatgtaattgttggaaaatgat

SEQ ID NO: 580 - DNA, 2655 bp, Aedes aegypti
atggccggcaatggcgatacatcctggtgcttttcacagataaagggtgccctcgacgacgatgtcaccgacgcggacatcatctcgtgtgtggagttcaaccacgatggcgagctgctggccaccggcgacaaaggcggccgagttgttatattccagagagatcctgcctcgaaatcttcgaacccgcggcgcggcgaatacaacgtctattccaccttccagtcacacgagcccgagttcgactacctaaaatcactagaaatagaggaaaaaatcaacaagatccggtggctgaagcgcaagaaccagtcgcacttcctcctgtcgaccaacgacaagacgataaaactctggaaggtctcggaacgggacaaacgggtcgagggctacaacacgcgggaggacaatggcagcatacgtgatccgtcgtcgatcagcgcgctgcgggtgccatcgatcaagccgatggatctgatggtggaggcgtcgccccgtcggatcttcgccaacgctcacacctaccacatcaactcgatatcggtcaactcggaccaggagacgtacctgtcggcggacgacctgcggctcaacctgtggcacctggagattaccgaccagagcttcaacatcgtcgacatcaagccggccaacatggaggaactgacggaggtcatcacggcggccgagttccatccgaccgagtgcaacgtgttcgtgtactcgagcagtaagggtacaattaggttatgtgatatgcgctcgtccgcgctctgcgaccggcacgcaaaactgttcgaggaaccggaggacgtggacatcaccaacaagagctttttccgcgagattatcagctcgatcagcgacgtgaagctgagcaacaccggccggtacatgatttcccgagattatctgagtattaaggtgtgggatctgcacatggagacgaagccaatcgagacgtatccggtgcatgaatacctccgcacgaagctgtgctcactgtacgagaacgactgcatcttcgacaagttcgagtgctgctggaacggcaacgacagttcgatcatgaccggcagctataacaacttcttccgcgtgttcgaccgcaacagcaagaaggacgtcacgctggaggcgtcccgggacatcatcaagccgaagacggtgctcaagccgcgcaaggtctgtaccggtggcaagcggaaaaaggacgaaatcagcgtcgactgtttggactttaacaagaagatcctgcacaccgcttggcacccgctcgagaacatcatcgccgtcgccgctaccaataatctatttatatttcaggataagttttagctaatagtaagcgtagtagtaataatcaattataaatgtgtaggctgaaacagaaagaaacaaacaaggtgaaacagattaacagacattggtgagcaaaacaaaacgcggtgatcgagcgatagattgagtgtcgtcgtcgtaagggtatgctgaaaggccgaaagtggataagcgaaaacacactcagaaaaatgaaagatgagaaaacgagtgcggcagtaaaacaaacaaaatcgcagcagcagcgcatataaatcgtgtatggatgcttgaatggatggagacgatcagaaaagtgtatgttcgcgcgggagggatgtgcatggaaacgtgtatgtaaggtagttataaaaatgtttaaaaaacagaacaatatgagatagtaacaaagcagtcccttacaccgccaccgccgcagcaacaccagccgaaactgattacgattattgtcaatattaattgatagagtttagacttaactttgaatcatctttatcatcataatcatcatcatcaacgatacactcaatagagcgagataacaagaaaagcatccgcaacaaacacacacagctgacgaaggctccagagccgtgcactagaatattgcaaaaaattgccatcactccccctaatcaaaagcagcatcattcatcgtcagttttgttttatttttaacgttcagtagtccttatcggtggacattagaagacgactatgtgcgcgcgcgcgttgtaatcaaaaaacgaaaacggcaaatcaagaaaccccacacaacatataggtacagttaaacttacaaacaaacttaagccccgcgatggccagaaagccatcgttacttgttgcattctttataattatgaacatatagaatattgattgattgaaagtattttgctttaaatggccggagcgtcttcacacacactcctcagccgacggatccactcaaaacagaaacacaaactcttaagaacataaatttcgtttttaaattttattttttaaacataaaatggaagttccattagccagcaagcaaacaaaaaaaaaactacaaccaagtaaagcaagaacaacaactattgtacggaatgatgcgtgtaggtggaacagacaaaacattcggaaataagaaacggcatctggtttggattgattgatgtgagtgaaaacgagagaatgcaagcggcgaagcaagtttgagggaataatttagaggaaaaggggctaaacatgggagggatatgaagcgcttttctcgtcgtcgtcgtcatcatcatccgaccgaacgcttttgttggaacagat

SEQ ID NO: 581 - DNA, 6942 bp, Aedes aegypti
ccctgatagtcatttgttttgaaaaaacgttcgggaactatttggtcactattttctcaaatataatcactaaaattcacttctcgctaccagccctgctcagacaaaaaccgctcttcgccaaatcaatttctttcccttcttcatactacacctaacaagtccaccacacccaaccgcacagatcataatcactattatcaatttaaccgcgcaacttcgttttcgctttcctgagtggcacacttttcgagttttatcatctccgcacatatgattggtgccatgccagagtgaacgcttcttccaaccaacttcagttagaggggcgccacaacagaggcaaggcgccgccggcatcgggtttcactccgaagaaggatcccgttggaactgttagaccggaagccggaacccacatgcatactctcttggcacgatacggcacgcgcgcgttgctgaatgtctattgtgtcttccagaagaagaagaagtgtgatataggggaagggagtgtaagggttcaagcatccgtaactacacttaagcagaagaagaggagtgcagatcataatcccggtgtgttcaacctgacgtagaaacggttccgacagggccagacagctgatagacagtctcacccctatggtctgttcatcatccaagacataggccgcttaagttttggcgattgggtacaaagagtgaagaggacgaagcacaaacggcaagaagacaagtgcaacgggctaataaataagtgtaatcaagtgaattaatcaagcgtgttgccgggttttgctcgaccgattcgaagacggcgcggcacgcagcagggcacgcgtgaaggtggccaagtggaaaacgtgatccggtcggagaacatactcagtaatagccccacgtacattggtctcctaactcgatcgtcagaatccgcgacaatcccgcagtcaaagccgacaagcgcccgcaaacccacgaagcatggcatggcgatttaaggcctcgaaatacaaaaacgcagccccgatcgttcccaaaccggaggtatgcatccgggacatttgcgtaggatcctaccagacctatggtaacaacattgcagcctcggcggcgttcatcgccttcaactgggaacatgtgggctccagtgtggccgtgctgcccatcgacgactgtggccgaaagagcaaaaccatgcctctgttgcatgcacacaccgatacggtaacgtatctggacttttctccatttcacgatggcctactggcaaccggctcgcaggactgtctggtgaaggtgtggcacatcccggagaagggcctcgagaactcaatctccaatccggagtgttcgttttcgaccaaacagcggagagtggagacggtcgggttccatcctacggccgattgccttctgtactcgacagccgtgggatgcgtcagtctgtgggatttaacatgccagcaggagtcattctcgaacaatcaacatccggaggtgattcagtctctcagttggaaacaggacggcaaggtctgtgcgactagctgtaaagacaaaatggtacgaatcctggatccccgggcggagacgccaatatctatgatagccgagagtcaccaaagcatcaaggactcccgagtggtatggctgggtgatcaaaaccgaattctgactactgggttcgatgccgctcggttgcggcaggtcatcatcagggacttgaggaacttctcagtaccggagaagacgctggagttggactgctctacgggtatcctgatgccgctgttcgatccggatacgaacatgctgttcttggcgggcaagggcgatactacgatagcctacctggaggtgacggacaaggatccgtatctgatagagggcatacgacactcgggagagcagaccaagggtgcctgtttggtgccgaagagggcactgcgggtgatggagggcgaagtgaaccgaattatgcagttgacgtcgaattcagtgattccgatcatgtaccaagtgccgagaaagacttatcgagacttccacagtgatctgtatccagacacaaacgggttcaaaacagagctaacgggtacgcaatggctcaacggagtgaacatggccgttcaaaagatcagtctggatccagcgaagcgagaactcggcgaacagcctattatcgttctgagaggtaacctgaatgaagtagtcaagaacatcgcgaacaaatcgaaaaatgcatgcaccacgcccatcagtacggcggctaagatcgacaaggaagccacgatcgtgaagcccacttttgtcccaatcaaggacaagatcaaacagatggaacagcagtcacacagtgagaaaagcgagttcgaacagaagttcaaggaggtgacctcgctcaagcataccgagaatgccaacattgttatcgaaccgaagccttgttacaacgagaacgaaagtaacggcaaccatccggaacagctcggcagcttggacgaccaagatggcagcatggatgatccgattcagactggagaggtgacacctccgaagccactgccgaggacatcccgcaacaactcagtcaccgatccaccggtgggatccggtgaagaagttcccgtcgttccggcacctcgtccggtggccagaccaagaatgtccaccacaggatacaagccccgcctaggcccaaagccgttcagcagtacgggatcttcgggagagttctccttcgacaaggtgttcaacgtcccgcaggcccccggttccgaaaacggagattcgcagagggactcaaatgacaacactcaggaaaacagtctggtgtctaacggaagcgtggaggaaactcacgaaaatggtaactgcaaggaaccggaagcattcgcggagatgactacggaagaggtcgtcatgcgaccgaaggttacggaggaagacgacaaaccccggatcatctctaccgcggaacgaagaaagtctggagatcgagaaaagatttttgaatccaaggtctccacggaatcggaggaccagtttgacgccgccatggaggacaagccgagtcagttcgaacgattgagtggccaacgaacaagcatcgccgagcgaaggcgaatgtacgagaaccgatcgcagagcgtccaagaagaaaagccagcatcaccggttcctctcagacgccgagaatccctcaaagtccgcggcgaacaatctaagaccgacgaagaggtcatgcctccgccatccagcgtagagttcacgaggaatcgtagcgatctgtgcaaggaaaatcttcccgcggacatcaacaaacgcaacaacgccaactccgccaacaccacatccaagcgaacctcgacagttttcggaagagtgtctaagttccggcacctgaagggaacacccggtcacaagtccacacacattgagaacatccgtaacctcagccggcagatcccgggcgagtgtgacggcttccaggcgaactcggagcgagttgccgtaccgatttccggggccggaggcaagattgcaatatttgaactcagcaaacctggtcgcctgccggacggagtgattccatcgctggtcaacggaaacaacatcatggacttccaatgggatccgttcgataaccagagattggcggtggcgtgcgatgacggcagcgtgaaaatctgggctatcccggaaggaggcctcacggagccgaccaacgaaccggagaaagagttggttgcccattcggataagatctacatcgttaagtaccacccgctggccaaaaacgtgttcctcactgctagttatgacatgacgctgaagatctgggacttggatacactgaccgagaagtactgcctgaagggacacacggatcaaatcttcagcgcagcttggagtccttgcgggatgtacgtggctacggtgtccaaggacggtaaactgagagtgtacaacccgaggaaatcggaaactcctattcgagagggaaccggaccggtgggaactcgcggggcgcgcttggtgtgggccatcgagggagagtacattgtcgtaactggattcgataaagtttccgaacgacaaatctacgtctataaagcgacggacctgggtgcccctctcggaatggtgggcttggacgtgtcgccggccattctgataccgttctacgacgaggacagttcgacaatctttgccaccggcaaaggcgattccacgatctactgtttcgagattaccgaagagtctccgttcatctgtcccctatcgcaccatcgatgttcatcgttaacgcagggcttgagtttcctgccgaagaaccaatgcgacgtcgcatcggttgaatttgccaaagcacaaagacttaccaacggaacggtcgaaccgttgagcttcaccgtgccacgtatcaagagtgagctgttccaggatgacctgttccctccgaccaaggtcctgtgggaatcaacgctgtcggcggccgagtggttcaccggtcgtgacaaacccgcccagcggatcagtctacagcccgagggaatggattcattgtcttccattcaaccgacggtaacgacaccgacgccggcaaagaaaagtgataacatcaaccaaatcattgggcagcagacgcagttcaacaaggcctggagtgcggacctggtgcgatcgaaacaagatgagatcaaaaactcggtcagcgcccggatgcccatcaatcgcaagctcgaacaggatgacatggagggcgtcgatgagaaggagtgggaagagtaaaccgcaaaccataataacctatagtaacagctactgcaatgtaacataagtgcatgagtaacacgtttataccgatcaatagtttagcaaacccgcatcgtaccctttctaacgcattttataaaccttcttatacgaaaccagatagaccgcagttgtctctttaatttgtctagtactaaatagagaaaaaaaaactaggacaaagtagttgtgtatcttggaagtgcggaaacaacagagactgcaatatgtgacaaatccaacaaccaactgccaatctccttgaccaacatttgagcaaaatccattacgaacagcagaacactcccagtcacaaaaaaaaaacacgaaacacatctttaaccttaaacttcccttttgtcttcgattttgtgggcaacaattttagccacatctgggcgcagcatatctagcatatctggtgcaacaagccaagccagcagttactaaaatgatttgcatacgtattgatcaaactctactctatactttaggaaaaataaataaggataatcacgatatcgctttggtgaagctttgagattttgtgcatgttggcgcccaaccgcgcgagggcgccactataattggaagctagtcaagtgaacaatgctcaaaaccaatcttagtaggtgtagtaacgcgtatggatctgcttcagaaggaagccgaaagcttagagaatggtaagaaaatcgcaaagtccggtggtgcaaacgaattcggtgcacacaatcttcttattcgataggcgtgtagagggaacctatgtaaattataatcgtatcgtttgttttaaaatcgtgctacgtatttattactccgacaattcactctgcgaaacaattgtgatgatttcatatttaggaagatacgcacacacacacataaactcttacgtgcgtcttaattgtttatataaactttctttttttttaacgattacgaatagatttttaggtgtgccattgtccctttttgttttgtgcttacaattatatcgttataagatttcaatgcttacagtttcagtatataactattcgtcaactggcgtaatgcgttttctactgcactttgtattacacagcattaaaggtacataagcgaaataattatttacaaaattcggagctagcatacgggcagaacgccgagtcacaaatagattcatgaaacgtgattcctttcatcagactgttccaatcagagccaatctcttttgtttcagtgttttctacgaaagacattgatttttgaccttgaaaaaatcaattctcatctttttcagtcgcttgaaagaattcattggcattatagcaaattcgatttatttttaaattcaacttatttcattctcttggaagacggaaagtatttctgacaacactggtaatgaacctatcaccgctgttgattcatttgtagtgttgccagaggcactttttaattcatcataggaggctgtagtgattaaattgtggtcaaaatttcagtatatgatacgagtaaatcagaatcgtgtttttcgaaggaaacttttgaagagtagttctgattatcaggaatggtctgctcaagcataactatatttataatattaattactgtacgactattggactattattgataggctattgaaattttctgcataaaacgcaaaaaagactagataatattcagtttcaagtttttctatccgtcttgataaacaattctcaatattacaatatacaaaagagtaaaaaacagtaataagttacatactaataacagattgaaattgattgttcccttataatgaatattgaaacaccgtcaaacaatacaacatttgaacactgatgctatttgatggaaatgactttcacataactaaacacattacaatacacaaaccgacaaccgaaactgatgatgaagaaagtaacaaccagggttaaatcagataaatgggagagaaggaagacgcccaatggaaaatctctagcatttttacaccgaacctggaatacaacattgaaacaataagtatatatacagtacagtatcttacatataacaaaatgtaatgaatgaagaaaagcaaaatatacaattagtaaaaaaaatatc

SEQ ID NO: 582 - DNA, 2630 bp, Aedes aegypti
atgaggctgtacatctgtggagttcccggtaccggaacatcgacaacggccggtggcggcggaggaggaggtggtggaggcaccacccgcggaggcggcaccagcatgtactccgcccggcattcggtcagttcgtcgtccaacgtcctcatggttggaccgaacttccgggtcggcaagaaaatcggctgtggcaactttggcgaactgaggctggggaagaacctctacaacaatgaacacgtagcaataaaaatggagccaatgaaatcaaaagcaccacaactgcacttagagtataggttttacaaattattaggatcacatgaaggtataccggaggtatactactttggtccctgtggcaaatacaatgcactagttatggaattactcggtccttcgctcgaagatctgttcgatctgtgcggccggcgattctcgctgaagacagtactcatgatagcaatacaattactccacaggatcgagtatgtgcatagccgtcatttaatttatagagatgtaaaaccagaaaattttctaatcggtagaagttcaaataaacgtgataaaattatacatataatagattttggtctcgccaaagagtatattgactcagatacgaataaacacataccatatcgagagcataagtcgctgacgggcacggcgcggtacatgtcgatcaacacccacatgggcaaggagcagtcccggcgcgacgacctggaggccctcggtcacatgtttatgtatttcttaagaggttcactgccatggcaaggtctgaaagccgacacactcaaagagcgataccaaaaaattggtgacacgaagcgggcgacaccgatcgatgtgctgtgcgagggacacccggaggaatttgcgaaatacctgcgctacgtgcggcggctagacttttttgaaacacctgattacgatcacttacggagattatttcaagatttattctattttaagggttatgtagacgacggcgaattcgattggaccggcaaaacgatgtccacaccagttggatcgttacaaactggccacgaagtagttgtatcaccaaacagagaaagacacacacctgtaaataagcagcagacgaattcaaaaggaggtgtcgccgcttggccggatgtgcccaaacagactggaaccctgggcaacctaacgccggccgaccgacatggctcggttcaggtcgtaagttcaaccaacggagaattgaatgccgatgacccaaccgccgggcattcgaacacgcccatcacgcagcagccggaagtggaactggtcgacgaaacaaaatgttgttgtttctttaaacgaaagaagaagaaatcgacccgccagaaatgactagaagcagtgcaatgtagtccggaacgtgaggctgtcaagctgctacgtgcaacgtcacactccaactcgcgcgacagcgtgctgaatccaagccaggattacatccaggcctcgtcgcagcatacgatcagatatccatccacctctgtactggcatcgacaccgaccgcccaaacgccgacacttccattgtaatttattgctaactattattatgctaatccagattattaattaattaattattaaattatttattataattttttccgcgcggtgttacgtcccaacatcaaacaaaaaactacacacaaatcgcaaaaaaatacaacaatggtaccaccaccatttccattcacgaatcatggtcgtaaatacgctattttgtcgcgtaacccccggttctgcccgaataacgaaaaaaatcgcacacacacttcaatcaaacgcgtcctccaaaatcggaacaacccgccgtggcccattttctgtgaacacgtcgcgcgcgtatgtgtgtgtgcgtgcgtatgtgtcccatacatgtgtcgaaaccgatcatcccaataatcatcccacaatccaaacgatcaccgatgagtagtgactttgatgatgacattgatttcgaccccgacgaccttacgatcctgttacactttttccgtaagctttgatatcgacttccgggtgtcccggaagggatcctgcagacgaccactgctaccgttaccacaatatcggccatacctgtgtgtgtgtatgtgttgtctatccgactctcagtagctctagtactacatcaccatctcagccaccaccaattcttcttcttccaccactgctacaacaaagtacaacacaacaaatcaaccgatcaccagcaacctttcctttgtaccacacaaaccttctattactactttctcctctagtactacgacacacggcaaaacgatgttctcttttctagaaaaaaaaacttatgtcagaaactatatcaatcccctcccagtattggcagcttctttcatctccctctatctattcgctatcgaatcacaaaaccagttagcaaacttccaaagctcagaagcaatagaatcaaaataataatctactactacaaaaaaaaaacattccgacttcccccgcctcacgcgttgcacaccactaagcaacaatcgcgatcccaccctgcagcgagtgcctcctaagcaactaaactaacgttaggtatagatagaatcatg

SEQ ID NO: 583 - DNA, 3541 bp, Aedes aegypti
acaacctggcaacactgctgtcaacagatgcaaaaactcttcccgatcgcttttggttttacgttttcgtgttcgattgacgccatccttgacttttcgtgaatttgtttcgtgaaaatccagtgaaaaacagtgccagaaccgtttgattgatgcagaaatcggtctccctgttccattatcttcagttatttttgtttttgcttcaattggtgccgcactaagcgcaatgatgcaatcaattttgttagttggacatcgggatagaagcagccatctgcagcagcgcaatcaataattgcctcatttccgcacaggaactaaagttttttcattcattttatattcaaacaatggaacacagctattctcgagacttccttcgtcccccaatggagaacagccaaacggccacgacgagggccctgatggtgcatcggcctccgcagtgcccttcctgccacacccacagccatgacgagcgtatcgacctggaggaatcgtacaatccgccgattccgtcctataacgaggaaagcgccaagattgcgatgatggagagcgaaaatgtgaccaaacatgtgcgcaaccttaacttcgaggagctggattgggaggagaagatcaacaaacctggttggtccgtccagcagattcgattgttcagtaaaataaccaagttgttggacatggatagattggcccggttgaccatcgccgacaaacagcacgaaccggtccaccgtcgaatggtcatcgacaaatccgttgggcgtcttcgacaagctctggccagcgtgtcatgggagcctcggctgacccagtggattcacggattgctgatggagagcttacccccgagttatctggccgcctatctcgacattttgcagaccttgaaggcaaagctacccaatctggtggacaaaatgatctttggaagaacgctaaacatcagccaagaactgctcggaccggtactcaagaagccttgggagccaatagtggcgcacaagaacagaaaacttcctggtcaaccatatattgtggttgttccatccggaccgaacatgacttcacccagtacccggctgcaaaagtggttttcgctgttcgccacgatggcttccgtcattccgatcaccatgccttcacaagggaacgccgtgatgaaacagtcaatccagaacgtttcggagcaaatggtcgcagtgacgagggccaagatccaagaagtccgccaggaagcgcccaatcggccaatcattctggtgggtttcaatgcgggagcagcactagctgttcaaatcggtctggtcgaagcggtcagctgtattgtgtgcttgggattcgcctacaatacagtgaatgggcctagaggcgcaccggatgatcacatcacggacattacggcgcctgtgctgttcgttatcggtcagatgtcggcgagatcgagccaagaagaaatcgaactgcttcgtgaaaggatgatcgcacaaacttcgctggtggtggtcggttccgcagacgattgcttgcgagtgtgtaaatccaagcgtaagatcgagggtgtaacccaatccatggtggacaacatggtcatggatgaggtggccgaattcgccaccaactgtctgctaaaccccccgagacctaagcaaaccatcaaagaccccaacggacaaaaatccaacctattgttgtccaacaatagcagcaacttggcggccaccggaggaccccctccgattccggttggtacaactggcgcgactcctactcatccacctcctccaatgcccggtgcgtacaatcgtaaacgcaaaatgagcccatctgcagacgccaacgatccgtcgaaagcagcccgacccaacagaccgccgccgccaccaccacaggcggttcagagaaaacctaccaagtctcagaaacaatcgcgagcggagaagatgcttctgcaacagaatcaacaggcactggatgcggccattcagagcattcttccgtcaacgggcaagccatctcctgtgcccatcgtaagcaaaccacagccacagatgacaaactatcagattaccagtggcaataatctggaaattcgccattcgtctggatctcaagtggtatccggtgtgggcagctctcctattgtattgcccatgataaaacgagataccacaaaccaaccactatcgacaattcagtctgctacgccttcgacaccttctacccccgacattaaggtgataccggcgaatcagttcattcaactgaaaccttcgggatcgacgcagaagttcgtcactctcaaatcatcgccaaaaccagtcgtgtcggtaattccaaagcaacccatttcgtcaactcccagtcctttggcgaagcaaacgatggtacaatcaccaatccttccccaacatcagtccttcagtcctaccaaattcactattgttcgcacgtccactggtctttcaggacattctacaccctcatcaacttcccctataaaaaccatgaggtcccctccaactccagacctttcaaacacaagcatcttcgatatgcccatcgtatttgccgatagtgatggcaacatccctgagggttctccacaaaaacacatcgacataacttcaaaacctccccctaacattataaccatcggtcctgctgtaaccagccatcccatgctgaaaacggaacccatgaaccgcatcatcacgctccagccctcaatgaagcccaacaaagtggtcgtcatcaacaagagcaacatgaaacaagtcccacccaacgtcttgtcttcggtgaccctcaacaaatcgacctcgatcaccccgaccggcgtaaaatacgccaaagtggtcatctccaacccactgaacaaggcgactacttctacagcttccgctcccaccataatccccaagaacctcactcaagtcctttccaaccaaaaaatcgaaatcctcaacaacacggttgtgaagcaagcacccatgccctccacatcccaccagcagcagaaattccaacccgtcatcatcaacgtggaccccagcaaaacaaccacgatgaagaacttcgtgcgcgtaggggaaacccaaatccggccaataggcagcagcccatccaccatgaccatcccgacgaaggtggcctcgccggccacagtcgtagcttcgagtgggtccgggcaagccgcccaattggcccccggtatccctgggacgaacaccatcctgattaagacgaactccctgtcccagctggccagccggaagccggccattctgaaccgcaacatcacggttcgcaaggtgaacattgtgccacagtcgcaggccggtagcgttgcaagcaccgttgtgatgtcctcggtacccaacaagacgacgacgtcgaccatcaacgtgcaacagcaacagcagcgccaccagcagcagtaatcgaaggcaccgtagttttactgtatgaaattaatcgatttctattggaaataaatcacgtagtataactagttcggtaagtacacaaa

SEQ ID NO: 584 - DNA, 1225 bp, Aedes aegypti
acgttttacgagtatgctgaaatgtccaaagtgaatggaatgtactatttgcgaaaaaatgtaacttctggttttcctcgacttttgtgggtactgataatcggtagtctgtttagtttgggtgttgtgttggtgattcttctgtggagaaaatacgtcgattcaccaacgcgaatgacggttgcatcagaaatgagcatcctacaggtgccatacccggggatcaccatatgccatccgcaaagtgtgatggattacaaggctgaaaaacttgtggataaactaaaatttcctctcggagcaacaagagcaagcgtccttgagaatcttcctgctttgggatacttcaatgaacatcaatggacttttccacgtcagcaaaacgttaagatgatcgacgcccttctagcgatgaacaatctcagcattgtgaatgccatcgacgagctgggaactatctgccgggactttatcttggtttgctattgggcgggtagaaagttcccctgcttcgataaacatgagttcttcagctggattgactctactagtcattatggagcgtgctgctcgttcaactatcatcccagtgtgcaggaaaccattactccatttgctgtgaacacatttggagtccatgggggattaagtgttataggaactggataccctcaagcatcggacggtaaatcgggagccttgtactcggaaggattcatgctgatgattcatcatcctcatgacttcgcagtggaatccgcacctctgacacttttgaagcttggaacggaaaccttcatcagtgtatcgccaacagattctcgctgttcgtcacaggttctagtactgccgcagtcgcagcgatcctgcattattggcaatgatttccctgttccaatcgaaaattaccgtcagcctgcctgtactctggagtgcctacgaaacgaggttcaccggaagtgcggttgtcatccttatcatctacctcgtcagtcacagattccggagaacatcaaacctatacgaggatgcacagtctttgattcgctgtgcctgattgacaatttttatatgctcaaacgcctcaaatgccaatgtcttcccgcctgtagtgatgtaacatataaaacgtcgtcagtggttacggacttctcggcgcacaaatattctatgaacacattctagtgagataaatgcagcgaatactgctactgcattcatcatg

SEQ ID NO: 585 - DNA, 1501 bp, Aedes aegypti
cggaggcggtgcctgtggattgagcttgagcgatccggaacagcacgtggcaggcgacagcgataacgacggcgacaacgacagtatgaccaactcacagctatggttccgcggagtgcggccctccaagttccggcacgtgtacggtctgcccacgcggaaggagtgctgctacaccgatatcagtgtggtccgcagcggcaacgatggcaacttctgcgccatcaatcccacattcctggccatcgtggccgacacaacgtttgtggtcatcccgatcaaccaaaccggacgaatcgatttccagtgctgtaaggtgattggacacaccggtcaaatcttggacctgaagtggaatcctttcgatgacaatatgattgcgtccgcttcggatgattgcacaatcaaactatggaaaatcccggagggtggattaacgagcaatctgagcgaatgttccacagaactcgtcgggcataagcgtaaggtgctgcacatcgaatggcacccaacggcggccaatgtgctgattagcgctggtttcgatcacttgatttgcgtgtgggatgtgggcaactccgacaagcccctgctgaacgtgatcaattgtcacgttgacatgatctacagtttggcgatcaatcgtgacgggtcgttgatagcgaccacctccaaggacaagaagctgcgggtgattgaaccgcgcagtggaatcgttgtttcggagggcatctgtcatatgggaacaaaatgttcgaaagcggttttcctggacaacgatcgcattctgacaactggattttcccgccattcagacaggcagtatgccgtgtggaatcagcatgacttaaagaaacctttggtgcaggaagtgatcgatagctccagtggagtggtcactccatacttcgactacgacaccaaaatgatctacctggcgggaaagggagacggcaacattcggtactacgagttggtagatgaagcaccgtatgtgtactatttgaaccagtttctgtctggacaaccccagaaagccctaggattcatgccaaagcgtggcgtgaacgtctcacaatgcgaagtgtttcggttttataaactccacgcagctggaaatatatgcgaacccatttcgatgatagttccgcgtaagtcaacgcttttccagagcgatctctatccggatacgctggccgacataccggcgattggtgccaaagagtggttccagggacggaacgtgcaacccatgctgaggtcaatgaagactggcgaatccattctggacgcaaatgccaatcagaaaacccgcaacagtgaaagcaaatatgccaccatccatcacaccagcagcaagcacaatgtcctcaacaaccaccacggcaatcacaacggaaatagcaataaccatagccatagcaatggcaccaatggcacggcactcaacggcagtaactacaccaacggtaacagcgtaacatcccttaccaacggtggc

SEQ ID NO: 586 - DNA, 1915 bp, Aedes aegypti
cagaaatcaaataaccgcaacagtcagtcgctgtcggcatcgtttggtgcgggtggttccagtccgaataatgacatctacatcgacgacgaaggcctcgagggttccggaagcagaggagagattcgcgacgatctagagaaggaagacgacgaatcttccggctccgggtacggggacgatgacgaggactcgtccgcgcgaggttccagtcgtagcaacagcaacaccggcatctcgaacataggcctcggcggcggcggaagctccaagggcgacagcggggacagaagctcatccggcggagcaggtggttccatcggcggcggaggccacgccggatcaggtgatcatgagctcgacgggcgcgaagatgacgatgaagatgatgatctctacactgagaccaaaagaccgtccattgatctgggcccgaccgacgacgaagatatgccaatcgacacgagcaagtcgggcggcagcgtaacgcacggccagggtcacggtcacttaccggacggaaccgatccggagatctacaccccgcgcattccgccaacggagggcggccacgatagcaacaacccgtacggcggcagcggagtcctgatcatgaacgccaagaatgaggacaggactgcgagcttcttcgcgcagccgggcattctcgcagctgtgattggaggtgccgtagtcggtctgctctgtgccatcctggtggtgatgttcatcgtttaccgaatgcggaaaaaggacgaaggcagctacgccctggacgaaccgaagcggtccccaacggccaacacctacgccaagaacgccaacaatcgggagttctacgcctgagactactcgatcgactccagtgacggtgatttgtaagctgcgttcgtgtacgaatcttgtgcatcggcgttgctctctctcactttccgcaaaagcaaaacaaaaaagaaaagcatgctaacttctgttgatttgagagcggtccagcggggatggccatcagtagtggtaaacggaacaaatacgcacgtgcgttagaatgtagaacaaaactagtaactcaaacagaaagctgcgggtagattgctttttaagacgtaagaaaagaaaaacttaccgagaagaattctgacttagggcaaaattttaatggaaacgtattgaagctgagagtgacggcggcattttacacaaacggcgagtcacaactgaactgtagagtcgtgtcgacggagtatattcagcagaagaatttcagtaaaagatttttcacggtgcgatttaatgttttagtaggcgattgattggttgttcaatttttttgtgaccgataagtagcgagagagagcgagacagcagagggacccacagtaggcgcgggtgcggtgcacctgacgcctactgggagcacgattatacaaatttttattttacttttcggtttatttcaagcaaatatttgtttagtaggaatcgtggcaactgttttttcaattctttttgcgagtaatgtaaaagataaaaagtgtaacgttgcagcatttattacggatggcaggcatatttactcattctcatacgcagtgaattaacgctgaagattgaaaacaggcaaagttttaacgtgtaaggaaaaggctaaaaatcgtttatataggagtaaatagatgttacatatttataatggaatgctttgcgatggagaagtggaggcaaaacagagaggaaataaagtttattttattttttgattcgggtcgccttcttttctgttctagcgtcacggcaattttattttcgaacaaaatgtgaagaaacatataggaaaaatcttaaatactaaaaatttcatccgtaaaaggaagaagacgattgatactttattgttaaagtatggtaattataatac

SEQ ID NO: 587 - DNA, 1017 bp, Aedes aegypti
atgcatgcatggatcttgattggtgactcccctttcggcaaatcagaagcttacatcaaattagaacaacttggagaagggtcttatgcaacggtatttaagggttatagcaatttaacgaatcaagtggtggcgttgaaggaaatcaggttacaggaagaggaaggtgcgccattcacggcgatccgggaggcgtccctgctgaaagaactgaaacattcgaacattgtgacactgcacgatatcgtacacacgagggaaacgctgacgtttgtgtttgagtttgtgaataccgacctttcgcagtacatggaacggcatccgggtgggctggaccatcggaacgtgcggttgttcctgtttcagctactgcggggcctctcttattgccataagcgacgagtcctgcaccgggacgtgaaacctcagaacctgctcatcagcgagatgggtgaactgaagctggccgatttcgggctggcccgtgccaagagtgttccaagtcatacgtactcgcacgaggtggtcacgctgtggtatcgacctccagatgtactactagggagtaccgagtattcaacctcgctagacatgtggggcgtcgggtgcatttttgtagaaatgatcactggtatgccaacgttccccggtatccgggacacgtatgatcagcttgacaagatcttcaaaatcctcggaacgcccacggaggaaacgtggccaggtgtgacgcatttaccgggctataagcttcatatgttaggtttcttcaagtcccgcaagttaggtttaagttttccccgtctgtacgatattatcgagggtgaaatgatggctagtgctttcctacaactgaacccagacaatcggataagcgccgatgaggcgcttcgacatccgtattttgctccgttgccaaaaaagttgtatgaacttccggatgaaacgtccatcttcacggtggaaggtgtgtacctgcatccggagccgaatcgccaccaccaacaccataaatga

SEQ ID NO: 588 - DNA, 1134 bp, Aedes aegypti
atgctgatcgaagaactgcatccggaaagctcctacaaacttcggatacaagccgtgaacgagatcggaaacggttcgttctcaccctttatcaaattcaccacagcaccactgccaccgaaaccaccaaaactggaatgtattcagttcggattcgcccatctgaagctgcgttggggcgaaggaaagaatctagcggacctcgctcgatattacgtcgaagtggagaacaatcgcaccggggagtatcagaacgtttacaccggaactcgaagcacgtgcaaggtgatgaagctgcacgaactgaccgcctacacattccggatagcagtcgaaacgaaacacgccggtatgggcgactattcggaggatttcgtgtttgccactttggccgccactccgaacaccatcaaggcaccgagagtgtacatcgaaccgctgggaggcagcatgaacagctcaccgcaacatccttcaagctcgacagcgttgaacggtagcgttagcaatttgaccgcggtgcagggcagcacgcacctcacgaccgggtcctctgcgccggggatggccctgctgaccatcgagtggcaaactagtcggaacaacccattctccgacccgatcgagtacttactacacatggcgaaggcgaaagatcaagagtttagcgaggtttattgcggccccggcacaaggcacaccatccagaatctaacattcggtcaaggttacctattcaaagtgtgcccggtgcgcattcgctccaacggcgaggaaatccacggtcagttctctccggttctgcaccaccagctgactccgcacaggatttcgatttcgcgccactcgggccacgatgaggtggacggatccggcaccaagtactacgcaggaaacgtggtcaaccggcgaggggagttgatcctgaatagctccgattgccaccatcattccggttccgctgggtatgctagttcaaatgtcaacgcgaaacaatctttactgcacctgcccaagggcggaaatctggtgcaaacgatatcggaactgctggaaaccgattccagcaaggcggtggtcggcgttctggtgtttattgtgctgtcggtcattgttgcagcttttctaaagtga

SEQ ID NO: 589 - DNA, 2583 bp, Aedes aegypti
ctaatcaacgatggccgatgtcgatgtgatgcgtacccagaccgtcgaggtcaagaaaacgcgtaaagtgaagaagacgactaccaaacgtcgggagtcttccgatcagaccggagaggtcatgatcaccgagatggagcagacagactacaccacgcagaaccagaacgccatcgaagataagggtggcgagtacaccaaggccatgtcgaaggattggcattcgggtcacttctgctgttggcagtgcgacgaaagtctcaccggtcagcggtacgttctgcgtgacgagcatccctactgcatcaagtgctacgagaatgtgtttgccaacgtttgtgaggagtgcaacaagactatcggcatcgattctaaggacctgtcctacaaagacaagcactggcacgaagcatgcttcctgtgtaataagtgtcgcatctcgctagtcgacaaacagttcggctccaaggccgacaagatctactgcggaaactgctacgatgcccagtttgcttccagatgtgacggctgcggggaaatcttccgtgctggaaccaaaaagatggaatacaagaccagacagtggcacgagaagtgcttctgctgctgtgtctgtaaaaccgccatcggtaccaaatcctttatcccccgtgagcaggagatctactgcgccggatgctacgaggaaaagtacgcaacccgttgcatcaagtgcaagaagattatcaccagcggcggtgtgacctacaagaacgaaccgtggcatcgtgagtgcttcacctgcacccactgccaggtgtccctagctggacagcgcttcaccagccgcgacgaaaagccatactgtgccgagtgcttcggagaactgttcgccaagagatgcaccgcttgtgtcaagccaatcacaggaatcggcggtacccgtttcatctcgttcgaagatcgtcactggcataacgattgcttcatctgcgccatttgcaaaacgtcactggttggccgtggattcatcaccgatgaacaggacgtcatctgtccggaatgtgccaagcagaagctgatgtaagatgttaaaaaaacaaaaaccaacccgtcagtgggatttcactaaacaaaattgtacacaaatcttcacacaccccaactcacaacacattgtagaaaacgaaacacaaaaaaataaaaccatttctctctctaaattgcaaacgaaagcaactgaaactattgttacaacgaaacaaaaaaaaaacaaaacaatgatattctaaaagcaaacaactatgtgttttagaggaattgaaaatgtatatgttaattcgatggatgaacaacaaaactaccacagcagtgaagtagtctttcacagtgtactagaattgtcaaacgacccggtggtggccatttttaaaagcgcttttccgaatattttatatggtgtcattgttgaagtcttttgaaaacaaagatcactcattgcccttcattttttaaataactgtcgcttcaagaacttgttttatggttagattgaaacgataatttcctcgaacaatcgataaaatgtattaaacagttgaattgccataagaatgttttcaaaggacacagatttgataatatatttttttaacgtgtgcttaaaatatatcttttatcgaaaacttttattctgtgaagacagttttaggacgaaaataagtagttggctttattttagcagagacactttcaaagcaacacaaacactcacacaagagattagcgggaacggcctatattcacaaaagttgccttttactaagaacaaaactataagaaacaaacatcaaaacctacaccttatatgaacaggagacaaattttaaataaaatacgattgtcgttctagtttttaacggctttttatcgaagaaatgagatgaacagaaacaaaatattaaaaaaaagtatttaagagagtagaacgcaaaaaaatgctttcacaaagaaaatatatccctaatattgatcgcttatcttcccctctttatgttatatgttgttatttctaagcttaaagaataaagaagaaaaatcaattattacctactgttaatctaggcggtcgacgaaagaaagaaaactgtatttaaacgaaggcagaacattattattagagcactctatcagagatgattgacttaacatttactaaagataatcctaatcctagaaaagatgaaccagaagcaggaggaaacaaccctcgagagtaggatagcgcttaagatcatgactcattgatctgtcccttctctgtcacatcagaagcagtatcgtataacgaatatttttattgattaaattattatttattcatattaacacctcgattaccattatgttgataacaggaaactttaggaaaggcaaaatgcctgtgtatatcgtacggaagaatgctggtggttaaaaaggtacatacatataaaaaagtatatcaaatcagaaaaaaaacgctaataatttcacctcttctttgttattattaataattttagcgatagttggatttttcaataaataaattatctcttcgaa

SEQ ID NO: 590 - DNA, 3876 bp, Aedes aegypti
agtttgaaatacagaactactgagctactaaattaactatgtgagaaagcgtaaagatgtataacgttgcgatgaactgtttcccaaacaagtgctataattgaaaatcaccaggtgttacaaagttttgaaaacgaatcgtgcccgctataatagcaagcgtgaagaatagaagcattctgaggcaatagagagtcaacgaggatggatgccaccgcttcgggcggtgtggtgtctccgatggcaagggctggcagtatgctggccgctgctatggcgcaaaatgtgactgccgccattactagtgccagtaccgccgccattgatgatccgtacgtaaccagctccatgatgcccccgggagttccgaccagcaatgatagtataagcggcggtggcgacgatgatcagccgagcatttccatggataatctgtacccggcgttggtgcagtgtttcgccatcatcatttgcggctaccttgccggacggctcaacatcattaccaacaccgaggccaagggcctcaataccttcgtgggcaccttcgctctgccgtcggtcattttcctctcgctggccgagcttaactggagcacggtcaattggaactttctgctgtcgatcttgatatcgaaaacgatcgtattcctcgccgtggccgtcatctcgctgctggtggcccgccccatcaactatggccgagccggaatactggccattttctgcacccaaagcaacgactttgccattgggtttcctattgtgacggcgctgtactcgaagttgcatccggaatatgcgtcgtacatctacctgttggcgcccatctcgttggccgttctaaacccgatcggctacgttctgatggagatctccaaaattagagcgaaagcgacggaagaaacacagactcttcagcaaacgcgtcgcccatcgatcccgccctgttcccaactggccgatgccggcaactcaaaccgcaaattcctgaagggcaaagttctagtcgttatcaaaaccatcgagtcgatcttcttcaacccggtgctcttcatgaccgtcttgggcgtaatcggaggacagatcttccgcaacggcatcccaaccgtcctcgccagtatcctgcaagccttgggcaactccttctcagcgacatccctgttcctactaggcttaagaatggtcggccaaggggccaccctgcaagggccgggcctcatcctaccgggcatcctgattttagttaagctgttggttctcccgttggtgacccgacaaaccgtgaacataatcggtgctggagcaaacttctccgaaacgacggatctcagcacattcgggttcctgtacggaacgttcccctcggcaccgggcgtcttcgtcatagcctcgcagtacaatcaggacgtggatctgatcgccaacagcatggtggcgtcgaccttcatcagcgctcctctgatgtttatttcggccaagatgatcacgatcaccaatctgaatccgtccgattatctgaacgagctggacaagttcgcgttcgacatcagcatcgtggccatgtgctgctcggtgtggatgctggtgctgttcacgctgacgcggaagatgaagaagatgccgcatcggataacgagctgcctgatcatatcgcagctgatctgtaatattggggtgatcatgtggtccacgttcgatcagaactccggatggaaaatgtatctgcagttttacttcttcacaattgggtgctacagtagccggctgtggacggcgttcctggctataacgattctgtttctgcagtgtcggagtctgtgcttcgtgctgaagctgtggccgatatttattgccgcagcttggggtctaccaaccatcatagtatcgcttctctttctgctggacacgaagaacatcactccaacggagaagcgcaacccaagtttccagtacgggaatgcccaggccgcgatcgccgtatttcttctagtcatgtgcttcatcgttaccgtgggctgcttgatcttgcaccagcgattcaagaaacggcacgaaaagtatatgaccctctcgagggaggtgtcctcgccggaaacggacacgagtaccctaggggcgtcgtcggtaaccaacttgatccagcaatctccgacggcggggggtcatcacagccggacggtgcacagaaggcgtccttcggtcacttcgagtgatgatgaaattctgagaggcggcagtgggggatgcggaggttctaatggcgggggatgttgcagtgccgggaacggcggtggaagttcaaatgggggtcgaactgttgtggacattgaagatttggttgttcaacaaagcgtgaacaatgatcttgaaaacgaggaaaccataacatccagcggaatgtgttcggcgcagttcaactgtccgtccgcctccaaacagcagtgtcaatcgttgattgagcattaccgcgagcaggctcgcgacggtctggaaccgctcgagttcgacaaaacgatcgacgagcatcaaacgctcaagcacatggtcctcttgattctactcctctgttccatgttcgtgggtctggccctttcggtgtggaccctcatcatggaaggcatgtccggaatctacgtcgagctgaccttcctggatgctttcctcaactttggccagagcattatagtgctggccgtattcatcaccgacaccggagaactgttgctaccgttgatgaagttttggcgcaaggtctggtacggagcgaatctactgcagcttccgatttggagcgagctgtccgccgaaacgcgacacatctgcgatcagtttacgacgcatcatctggacaattgtcgcaaggcgatcgccagggataagagatggcgcatccgtatctacaagaaggtgttttacggcaacgttttcgtcgattggctgatcgaggtgggtctggccaaggatcgctcggatgcaacgcactatgcgagacgcttgatcgatggccgggtcctgcggcacatcaacaatgtgtaccacttccacgatcgcaacctgctgtacacgttctgcgatcgtttgtaggttggtagtgattacatcgccttgaatcaggaagaccccccaactctggagtgctttgctttatctcgcagcagccagtatttctaaggatttatagaccaaaaaactaatgataaatcgaatctatctaggaatagcaaggaggcacaaccaagaactccaagagtattctattttcccaaaaaagagacgaatcgtaaccggttaccaaaaagaggatcgaaatggaaagtattgtgatgactacgacggtactcgtaggttttatttgtttagctagttttattttgtaaggcgaattttgttaaataattcctagtttagatatttattatcctatatgacttgtcgcgcaagaagcggtaggtatgattgagcagcatcgtgattcgtatgattgtaaatattttagactttctagcgaaaggaccacagtaggatgaaacaatgtaaatttaacatagaatattttatgaatgtagtaaacgctttaaaggttctcaatcattacacacacaaaaaacttggtctgatacaagctacaaatagaaatatacaaatatgaaatatttatagtattgagcaacataactgataggctagagcttcttttatttatttttgatgacaaatccttagagatacatagatcatgtattttaactatataactatataagaagggaagagcttgtacacaaattttgcaatacatatagctttgctcatacatacaacgttgaaatagaagagactgagtttatttactctcacttagagcaaacctcc

SEQ ID NO: 591 - DNA, 10568 bp, Aedes aegypti
agtacgacgtgcggcatttcttcatgatgataaaaatcatatcaattgcagaaaaaccaatttctatttttgcagaaaaactttttctttttttgtgttcaataaaaatgtatttttaaatgattcttagatagtagcatatggtaatggaaaaccatgctctatgtgtagttccatcgaggtgaacgagctagaaggtcaagcaaaataatatctcaattcatgttggaaactaatacagccttcataacagaccaatccaagtttatctcgataaatgttttattattctattcaagaccgtacctcactttcaaaacatagctcccaactgctttgcatggcgacatgccatcgcctttacacagacagcaattgatgtttacagctggccttgaacgatggtcgaccacaatcaaagttcatcgctgctgctgcttttgctcttgctgttgcagtaccagtagcagcggatgtggtagctagctagtacccgacctattctcaaatgctgcgattattcagctcggcctgagctttatgacactgatggtttcatattttcgagtcttcgtaatgtttgatcaatacacaccgaaagcatttacgagcgtcgaaattcagttcatacgaaactatcagcacgcgacatgtgaatcacaaaacaaaacgaaataaattgattcgtgacattcgacggtgaattggtgttagatataactagacgttcgattttactagcggagtgtgacgcgccagtaaccgtagtcgaggcagcagcgtcagaattgtaaaatcgattggcacaaatcagttcaacgactgattttagttatcaagcatctcttaccttcacggggcctcgaaattcagagcatggcgtgtgactgaagcgaaattcaaggtttcttcatgatccaattagcacacaactgtttcagtagctcgttgcacaatcttatctctctgcctgcatcgcgttgtcttgccgctgtgtctgtgagcttagataaagcgaataactaatttgtgtctgtgtgtttccttaccatggagtgaccggcagattatatttcaaaaacgtgtaacggctttgagctgcaattcggcgcatgtatcaaatactggatgggtgacgttgatccagaaacgctgctagaatggctgtcgatggggcagggagacgaacgggatatgcagttgattgccctggagcagctatgtatgcttctgctgatgtccgacaacgttgatcgttgtttcgaaagttgtcccccgcgaacgttcctcccagcgctgtgtaaaatatttttagatgaactagcgccagagaatgtactggaagtgacagcacgtgccatcacctactatctagacgtatcatccgagtgcacacgtcgcattgtagcgatcgatggtgcgatcaaagctatctgcaaccggttggtggtggccgatctcgaaagcagaactagtcgtgatcttgcggagcagtgcatcaaagtacttgagctcatatgcactcgagaagcaggggccgtgtttgaaggaggtggacttaattgtgtgctttcattcattcgggacaatgggtctcagatccacaaagacacactccactcggcaatggccgtggtgtccaggctatgtaccaaggtggagccacaaggtgctaatgtacaaacttgtgtagaaagtctaagtactctgctacagcacgaagatccgctcgtagcagacggagcattgaaatgctttgcttcggtggcagatcgatttactagaaaaggagttgatcctgccccacttgcagagtatggactagtaactgagttgttaaatcgactaagcaacgctgcaggaccacaaacatcagccttgacagccggagctagttcaaatgcgacgcccgctgcacaggtcaacagtcaagagaccacaggaacagtgcagctttcatcgtcagcaccaaaaacacagggagcagccgaagcagggcgatcgagtcaatcgatcgccacaactatatcactgttatctaccttgtgtcgagggtcaccatcgatcacgcatgatctcctccgatccaatctaccagatgctatggaacgagccttcaaaggtgatgaacgatgtgttcttgactgtatgaggcttgccgatctcatcctgctgctgttgttcgaaggtcgacaagctcttggcagggtgggtggatctagcggtcagttagctcctcgtgtgcgaagagcagactctagtactgagcgaacacatcgacagttgatcgattgcatacgtagtaaggacaccgaagccctaatcgaagctatcgaatcgggtggaatcgatgtcaactgcatggacgatgtcggtcaaacattacttaactgggcttcggcctttggtacattagaaatggtagagtttttatgtgataaaggtgctgacgtcaacaaaggccagcgaagttcctctctgcattatgcggcctgtttcggtcgacccggcatagcaaaagtactgctcaaacacggtgccaatcctgacctacgggacgaagacggcaaaacaccactggataaggctcgcgaacggccggatgaaggccaccgtgaagttgcttccattcttcagtcgcctggcgaatggatgaccgcggcaacacgatcggacttgaaaaccgaccccgaagacggggaaagcgagccccgcggagatccggagatggcacccgtctatctcaagttctttctaccaatattctgcaagacgttccaaagcacaatgctagccagcgttcgacggtctagtttaggtttgatcaagaagatgattcaatatgtccaaccagaaatgctgtcgaggctttgttcctcggagggcctccaaagtcatgagcacagcctaggaactttactagtcgaagtcgtcgccagtgttttggacaacgaggacgacgaagatggccatctggtggtgcttaccattatcgaagagctcatgtccaagacgcaagacgatttcctcgatcactttgcccggctcggagtgttctccaaagtgcaggccctgatgggagaaaacggcttcagcgggggcgaaggtgataacaacgatgtgatcaaatcccaagacgagctcaaaccgtctgcgaccggagcacaagatgcctcggttgtctccactactggaagctcctcctctggaactgccactactaatacggtggaagatgccaaagaaatccttcccgggaaggcgtaccactggcgagactggagtatttgtcgaggtcgcgactgcttgtacgtgtggtcggattcagccgccttggagctttcgaacggatccaatgggtggttccggttcatcctggacgggaaattggccactatgtactccagtggtagtccagagaatggcagtgatagctcagaaaaccgtggtgaattcctagaaaaattacaacgagctcgcggagcggtacggcagggaactccctcccagccgattctttcgtcgccgagcctttcgcgaatcgtggtcggcaattgggtgctgcagagccaaaaagagcatcagctacatatcaacaactccgaaggtcaccaggtgacgatcctgcaggacgaactgcccggattcatcttcgagagcaatcgcggcacgaagcatactttcacggcggaaaccactctgggaccggacttcgccgccggatggatcaacaccaagaagaagaagatgcgttcgaaggcggaggctcagaaatatcaggttaaaaacatcgcccgagatctgtacaaccggtatttcaaagcagctcaagccgtcccgcggggcgccgtggcaaaactgtgcaccatcgtgcgtcaaatcgaggcagccctggaggaacaatgtgcccctaaggcgtccagtttgctgcaggttcggattcaacctgacgcttctaaagcaacgaacagtacatggcaggagaagctgtacaacgctctgcacgatctggtgcaactgttgaacgacgatggagtcatcagtgcttacgagatgcacagttccggacttgtacaatccttggtggccgtcctgtcccggaactactgggaactcgaaatgaaccggagcaaggccaacaagtaccagaaacagcggatatccattttcaaaaagtgcatgtatggcgataccaaaaatggcaaaaacacggccagcattctggtgcagaagttggtatctgtattggagagcattgagaagcttccggtgcacatgtatgactccccagggggtagctatgggttgcagattctcacgaagcgattgagcttccgacttgagcgggcagcttgtgagcaaactctcttcgataggaccggtagaaacctgaaaatggaaccattggcaaccgttggccagctgaacaagtatcttctgaaaatggtagcaaagcagtggtacgatatggatcgatcgtccttcttgtacttgaaaaagctgaaagaggcaaaaccaggaagtgtacacttcaagcaccagcacgatttcgacgagaatggtcttgtgtactatatcgggacgaacggaaaaaccacggaatgggtcaatcctgctcagtacggattggttactgtcacaagtagcgaaggcaaacagctcccgtacggtaagctggaagatatcctgtcgagagatagcgttagcgtgaattgtcacaccaaggataacaagaaatcgtggttcgccatcgatttgggaatgtttatcattccaactgcttatactttgcgacacgcccgtggctatggccgctctgctctgagaaattggatgttccagatgtcgaaggatggaataaattgggcgacaatgctgacccattcggatgataaaagtttggcagaacccggaagcacttgcacttggccactcgaatgctctgcggaagaacagcagggatggcgtcacgtgagaatccatcaaaatggacggaatgcttcagggcagacccattacctaagcttgagtggatttgaaatctacggaaaggttgtctcggtttgtgacgatatgggaaaagctgcggccaaggagaatgaagctcggcttaggaaagagcgacgacagattcgagctcagttgaagtatatcactcaaggtgcacgcgttgttcgaggagttgattggcattgggatgatcaagatggaagtcctcctggagaaggaactgtaactggtgagattcataacggttggatcgatgtaaagtgggaccatggtttaagaaactcctatcgcatgggagccgaaggcaaatatgatctgaagctgtcaaacagtgaaaacctgactgcaccttacgatatgaacaactccggtgctggacttgttccaattaacgctggaagcgtatcttcggcgaagaaagtatatgataagtcgttgaacgttctgaccagtcgcaaatcgagctctactccgagcctcccggaagcaacggagaacaagtcatcagtagcttcgactgaacaagccacttccgtggataaccttgcatggaaacaagccgtagaagtgattgccgaaaatgtgctatcctgtgctcgatctgatttggccaataccagtggtggaagtagcagcaatgacttatccgctcccggatccaacaataataatctgaacaaccaggaagtgtctgtgattgtccactcgttgggagagcggggaaacatcccagatctgtcgcaaatcaatacaagtacttcgactctagtctcggatttggccaccatcacggagaatctaacgctttcggataacatcaagaataacatcagcactggaagcagcacgcagtttgtgagcaattttggaacccaacttgcagcttgctcatcctcgtcttcgtccgaagacaacaacaaaaccaacaacatcaacgaaaccaataacaagatcaatctcaacaacagcagcagcagtagttccggcaaaacggcatacctgccaaccaagctcgacgtgttggacaaaatgagggaaggcgtcgacatgcttcggaacaataccaacaatttgctgtcctcggaattgctcacccagtcaaatctactctcgtccgtaaagattgcacttccgacgccacaacaaccgcagcaaactggagcgacagctcccgcaggacctttcttcgtggccagcacaagcaccagcagcacgagcactctcccttcgggtgataaaatcgttggagatgtcaagtttaacaataccatcaacaacaataccgcttccggtggcgtaacgaagaaagtcctgaacgaagtcaagcagcaggaaccggatgatcgcgacattgccaacaatctgaagaacaacaccattgtcgtcgattcggtggaagttggtgcagcaggaagttcgaaggaatcaactgctgagtcaccttcggcggcggtcacggtcaatccgatgagtgtgagtgtcccgaatctgacgagcaatgagaacaatgcttcacaagaggtccaaactccaccagggttgttggaaacgtttgcagccatagctcgaaggcgtacgtctggaagttctgtatcccatcatgtgaaccctagctcaaacgcttcaaccgcttcttccggaaccagtggcacaaacaatactcaacccaacaatcagctgagtagccttgggtccaatattcaagcagcgaactctagcttcttcccgaggggacaaaactccgttactagtctggtgaaattggccctttcgagcaacttccacagtggattgttgagtaccgcacaaagttatcctagtctctcgagttcgagttcgaataatgcaaattcggtcgcggtaagtggaggaactaacaacaattcggcgagcggcgtcggttccaacaatggatcggttcaaagcggaaacgtccaagccgtgttgaatccagcactgacgatgagtctcacctcaaccagtagcgatagtgagcaggtgtctttggaagatttccttgaacagtgccgagctccaacattgctgggagatttggacgacgacgaagacatggaggacgagaatgatgacgatgaaaatgaggatgaatacgaagaagtcggaaatactttgctccaagtgatggtttctcgtaatttgttatcgtttatggatgaggagactttggagaatcgtctggctgccgctggcaaacgcaaatcgtgggacgacgaattcgtgcttaaacgccaattctcggcactcattcctgcattcgatccgcgtcctggcaggaccaacgtcaatcaaactagtgatctggaaatacctgctcccggcagttctacagacagtagtcatccgagtagcagtcactctgagcatgctcctttgcctcaaccgtcccttgcacttcttctgcgtggtcccaacataaacggagtaagtgatgtggaaattccactgtcgcagcccgattggacaatattccgagcggtccaagaactgatccttcaaaccaacatgaccaagcaggataagttccgcaaaatttggcaaccaacgtacaccatcgtctacagggaagcctcttcttctgccggactcggttcctgccgcggtgaggacttcagcagcggagaagaaggacgggccacccccgtcgtttccatgttttcccaacgcagtggaggatctaccctttcgcctagctctccgatccccggaacaccactcaatccaaccgccaccgctcactgcactgtggacgacgtcttgcagcttctcggccagttgaatgccatcaatcgaacgcttacatcttctccatccaacaacgacaagaacctcatcccggacatggaatccaacaatctcaacgcggatatattcttgagcaagaaaattaccaacaaactgcagcagcaaattcaagacccactagtcctggcgagtggaagcctaccgaaatggtgcgaagacttcaaccaaagctgtccgttcctgttcccgttcgagacgcggcagctgtacttcaactgtacggctttcggcgcctcgaggagcatcgtgtggctccagtcgcagcgggatgtgaacctggaacggcaacgggctcccgggttgagcccacggcatgccgatcagcacgagttccgcgttgggcggttgaagcacgagcgcgtcaaggttccacgcggtgagaatctactcgaatgggcacaacaggttatgaaagttcactgtaatcgcaagtcggtgttggaggtggaattcgttggagaggaaggcaccggattgggtccgactttggaattctacgccctggttgcagctgaactgcagcgaagtgatctgggaatgtggctgtgcgacgatgaacctaagctaatcgaagacgaaatcgatctaggagagggaagcaaacccatcggttattacgttcgtcgttcaaccggattgttcccggcgccgttgccacaggaatctgaaatttgtgactttgtgtcaaactacttctggttcttgggagtgtttctggcgaaggtactgcaggacggtcgtctagtcgatctgccactgtcgaacagcttcttacaactgttatgtaataacaaatctctcgctagaggttcactaagcgaactttcttccaagtctgccttgcacgatgatgtgatgatttcttctttaatgtccgaggaaagcgatcgtgatctggtggattcatatcagtcaaaattggctaacgatggctgttggtatgatggaatcctgtcccaagaaaatctccaggaaatcgatccgattcggtacgagttcttgaaagaactgcaagagttggtgcagcagaaacaaaatatcgaacaaaatgatgatctcacctccgaagagaagctactgcaaattagcgagcttaaattcaacaccaaaactggcagtgtagctttggaggacctcgctctaacgttcacctatctaccaagttcgaagaactacggctaccaatcggcagatctgattccaaacggttccaacattgatgtaacgatcaacaacgtcgaagagtactgcaatttgacgatcaacttctgcctgcaagaaggcattgctaagcaacttactgcgttccatcgaggtttctgtgaagtgttcccgctgaacaaattggccgctttcacatcggaagaaatccgcaagatgctttgtggcgagcagaacccagagtggacacgggaggacattatgacctacacggaaccgaaacttggatactccaaggaaagccctggattcctgcgtttcgtgaacgtgttgatgggaatgaatgccagcgaaaggaaagcatttttgcagttcaccaccggctgcagcagtttaccacccggtgggctggccaatttgcacccgcggctgacagtggtgcggaaggtagatgccggcgaaggttcctacccttcggtcaacacctgtgtccactacctcaaattgccggactatccgaatgaggaaatcttgcgggaacgattgctgacggccacaaaagaaaagggattccatcttaattagaaaaatcgcagttttatgaatgcagaaaaaaaaacaccttgagctaacgatatcctacttcacaaacccacaaactgatgagcgtggattattattagcaaaataaacacatattttctagataatgaactcatctataaggtaaaaataaatcatgtttcaaacaagggatacaaaagattaatgaaaaaaaaaacaataatatatgaagtgaacaaatgacagctttccgattacttaaagttatcgatccgttgtggttttatgttataaaactctaaaattatgagaaccaatttctgcgagagaaaaaagcatacaacaatagataagataaatgcgatgaataaagcataaatttaaaaacccaaaacattttaagtttgctgtgagtagatgaaaattatacaccccgcttcaagtatagacttagttaaaccataaataaagattcaaaattcgtcagctttttaagtagtcatagtccaaaatcatttaaactgtacatacataaaagagaggacaaagaaccggtactactcgagagagtgcaaatgtggcacttctgagcgttacgtgattgatcagaaatttacttgttttcagcacgatattttcgaagcctaacaaaatttgtataatccaatatatttttaggacaaattttgaaccaccaccattgaacgattgaaaaaatagaatgattcaaacaactattggtcactggaagtttacacaacgttgaaactcacaaatacacaataaaagtagaatcgaaaattgacgtatacattatatagaaatgaatatgttttacattgtatcatggatgaaatcaaaattacctaatggcaacaacagaaatataaagcggctgaaaggttctcggctattatagaagaactcaaagtgcagtcatatgaaaatcacatcaataacgaattttaaattcaccacaaattaaacagcatgttgacacaaaaaaaaaa

SEQ ID NO: 592 - DNA, 3864 bp, Aedes aegypti
atgaatctttctccaaacagcatcaccgaaaccatgaccagtatactctctacaccgggcaaatatcgctcgcgtaaggatctcagcaccggttcgatccccacattggtctccctggaggaggaatctagtcttcacacagtcaccggtgccgaatcggaactttcacacagctatcacattcattcattggcgtcgcccaatggagccaccggaagcggttcgaatggaagctacgaaccgttctccaatgcactaaacatcaaaaatggactcagtgccaaatctccgcgacggagttcactagccataggcctccttggaggtcgcaacaatggtaacgccgaaaaaggcaacaaacgacgaagttccattgcagtggccttcctcggaggtcgtcgcgattccaagtctcacaatcacaactacccgatcgcgacgatccccgaaaagtaccacaaaacgaccgagtcggacattgaaaacgactcacccaatcactactacacggtcccagccggaagtgtcgctgctgtcctcagtggggaacccaatggtcagtccgaatacggtgggggcagtaatgggaacctcacggtgaacggctccggctatgataaaaagcggcgtcgttcgtcctcgtggcaaaccaaactggaacgacgccggcgcaaggggatgtcctcggcgctggacaatgcggaaggctccggcaatggtctggatagtttcggttcggcgaacgggctcgatgccttcaccagcaagtacgggcgcgaaaagcgacactcgtggtggaacattttcgttccggagaacctgaaacagaggacccgccgagctagtcaagatgtgatactgtccaaaagttcggacagcctcagtccaccctatcggaggagcaaatcgaggagcgttgatcatggattggctgcacccttcgatttagactctctgcggtccaaagtggagggccgcttcgaaagcatcgaccgactgactaaagatggagagaagaaacgctcgatgccgacaattccgaccacttcgtacacagtcggagacagggatacgctgacctcggtggcagcccgcttcgataccacgccgtccgagttgacccagctgaatcggttgggcagctcgttcatctactccggtcagcagctgctggtgccggacaagacggccaaggcgggatccggatcgggtgccgaaggggactcggatgccagcaccgaacggtcgtcacacagtcccaccgagggtcgccgcaagggatccaacgaagatctatcgcaggatgagaaagatctactggaaggacttcgtcccggatcacccaagccgggccacattgagcgtgttgcgtccccgaacaatcaaagtggtggaggaggcggaggagacacggcggcaggtttcagtgaagatgacccggttacgatccaacgtttcctcaaaatcaatgtgcggcacatcaccgatgggcagggtgtggtcggaggtgtcctgttggtcacccccaatgcggtcatgttcgatccgaatgtgtccgatccgctagtcatcgagcatggtcccgaaagctacggcgtcattgcacccatggaatacattgtaaatgcagccatattcaacgatattgcccacatgcgtgtgcagggtgctaccgggggtaacgaaacagccgagaaggctgaaatctactacccagtgccggagaagtcctgttcccgttgtgacacccattcacccggcaaggactcactgctggtgaaggacgaaactttcccggagctgggagttggctccgttgaaggctgtgacgatcaggaaagtatctgctcgagcaacgaacgcgaaggagatgccttcccgaaggccttcgaacgtgatctagtcacgccaaacaacctgcagcgcttgcatggcgattccaccgagagtggtggcagttcggagaaacctcccagtattctcgaggatccaacggtgcgcaccctggaggaacggagacgaagcttgctcgaccagcattgggccatcccgagtaaggatagaataaaatgtaattgcaataaaaccttatctcaaagatcgctggacgacgaggaagccgccagtacgggaagtggtgccacggccacctccagcggaacggctcctcctgccatcggagttggtgctggaggcgccggtgtggatgaagttgtggccgctgccggtggacaactggtcaaacaatcctgtcacgattccggaatcgatatccgggatcccaatacactgccatcggcggctgccggagcaggagctgctgcagcaaatcaagcaccccttccagtcgtggcaccgattcccaccaaaaaagtctacagcgatgcggacattgtgctcagtgccgattgggtgcctccgttgacgatcgccccttcacactgtatcgacagttcagcgagaacctcctcaaccacatcttcgcagcatagttccctgtccactacgcaagccgatgccgccagtcggaagaaggcctccagcgtgagcttcagcgtggaggaacatgatggccaagggggcacccaaggggacaagggtagtgaaactaagaagaataagatgctaaaacgactttcctaccctctggcctgggtggaaggcttgaccggcgaaggaggaagtaccacccacaaatcggattcgatcgagtccgctcccaacacaggagattccaatcaaagcgtattttccaaagttttctcgaggcgctcctcgataggcaccttcatcaggccccaatcgtcggcggaaaccggctcagccaccaagcagaaacaggcaccaccaaagctggactaccgttcgatggtttcgattgacgacatgccaacgctgtttgttagcttcgacaaactgatcccgcgaccggcccgtgcttgtcccgatccgccaatgtaccttcggttgcgcatgggtcgcaaaatcggcaagaacaccccactgccgaccacggtcatgtcctacggcaagaacaaactacgaccggagtattggttcagcattcccaagaacaaggttgatgagctctatcgattcttgactgcttgggttcagcatctgtacggtgaattggacgagaaagccatcaaggagcgtggctacgagttgatccagaacgacaccgattgggcaaccaagggcggaagtccaaccaaggatggacgatcagccagcgaaggcgaaatcaccgagtacacccgagaatcatgggaggttctgtctatgagcacagatgactaccggaaggcgacgctgtttgcaaccagttccttcgatcaagacttccagattccggacttgatcggccagacggagatcctcagcgaggagcatcgggaaaaactctgcgcccacctgccagcacgtgccgagggctactcgtggtccctggtgttcagcacttcgttgcacggtttctcgctgaactcgctgtaccgaaagatgcacaaactggaaagcccaatcctgatagtcatagaagatacggagcacaatgtgtttggtgccctcacatcctgctcgctgcacgtgtcggaccacttctacggtacgggcgaatcgctgctgtacaagttcaacccccacttcaaggtgttccactggagcggggagaacctttacttcatcaagggcaacccggagagtctggcgatcggtgccggagacggaaagttcggcctgtggctggacggtgacctgaaccagggccgatcgcaatactgtagcacctactcgaacgaaccactggcaccacaggaggactttgtcatcaaaactctcgaatgctgggcatttgtctaa

SEQ ID NO: 593 - DNA, 2916 bp, Aedes aegypti
atggctgatgataagtcactgttggccagattctaccacgcagatagagcgctaaccgccgttgccagcgagttggatagcttcgatggtcgggcagaaccagttagatgcactcggctagttggacggttacgacaaggacaggaccgcgttctggcgattaccaatcaaattatggacgagcttctgggtgacgatcgggcgccgcgagctttccgcgccaaatttccagaggaggttctacaggaaagtttggctggacagttatggtttggtgcagaatgtctcgcggccggatcatctatcatgaatcgtgaagtggagagtggggtaatgcgaccactagcaaaagccgttacgaaaagtttggacaatgttcgaaacttgctgcgagagcaatgccttcggaacaacacacccaacagtttgacactgcggttggatataaacgatgccgcgacggaacagttgtatgaaagtttgaaaatcttcgatcgcttgtttgcggaatttgaattgctatacgtcagtgcaatggtacaagtcaaatcgaagcaggagtacgagatgcaggagctcatatgtgtgcttttttccgaaacattgcaacgggctcttaaaattggacttcttgaacaggaacaggtggattcgtatgacccggcgttgatgttttccattccacggttagcaatcgtcgccgggttagttatattcaaggacggacccctaaacatggatcaaccagcagataacatttcagaaatgtttcgaccatttcgaaagctattgatcaaaatgcgagatcttcttcggacgctgaccaagcatgagctctatcagttggaaaagctgttgtgcaccaacgaggaaattagtctgaaggaagaattaatctgtgatgcaaacgaaaatgatagcagcgatgtcttgccacaggaagaccacgttgttatcgttacaaccaatgttaatactagtaataatagtgataatagtgatagccgtgtagacgattctccaaacgatgaactgcggcatgaatcggaaactcgggacaatcggaacagtagtttttatagtaaccgtattatagatagtaatcgattacatgcggacgtggaggatgatgtatccgaaaatgacgacgatgatgatcctagtaatgtattgaaagacagtctagtgacgacagattgtgcatcaggatatttgattccaaatacaaacttcggtaacctactgcagacgaatgaagcgcccttaaccgatagttttatcgcaacggacgaagagctgaagctgggaacctcttcaaatgctcggatagaacagatattgtcagagactaaccagaaacttgcggattctggacttggcactgccaacccaagcgtagataactctccagaattagatacggaacggccgattacaagtcgtagtgcatgcgaatcttcagaagaaggagaaatagacgaatatgataacgaggaagatgacgaggatagtgataacaatctatcgaatcaacaattaatggaccctggttccagtgctggcacatcacaatctgctggaaagccatatcgtactcacaaacagcagcaccatcaccgacatcgtcgatctagtggaagtattatgtcggctacatcgagccgaaaatataactcaaaacatcataaggcgagtgcatctgcttcagtcatcgtacctagtaatcaaggcacctcatctaagacatactccaactgtgatacatcaccgtcgtctggcaatcaaagtgaatgcagcagtactagtagcacaaccggtgaatcctcacaggacgtggccatggccattagagcagccggaaggattaaattcaaaactactgaaaaccttctgcatagactctttgtctgtatagcaggagtcgccgatcaattacaaaccaattttgctgccgacctacgccaaatgctaaaaagtgtgttcattataaattcatcacctccggaaccggaagagccaccagagttagcaccgacgtcaagtgataaaccaaaggaaccagacccaacggatttgtttgaatttcgtgctagcgaacaggatgtaataactcccggtcaaaacagtggagggtcgagtcaaagcatttattcagcagaggaagtaaatccagaagatccgcatgactctgtttttggatctccgggcacttctcccatacgagcttcttctgctccgcgcactatgatgactactgcagagagtggaggtgtgacagttaatgtttctgtttcggttgttaccggtggtggctctagctccagtaggaatgtccaagaacgaagtgttagtttaagtgaaacgtcgattgtggtcgaaaacaatggtggagccacagattccaatttacgtgatagccaccgaagacacagtgcaattgggtccaaaggcgagtacggacgaagtcgatctagtccgaacagtccagtgaatggaacatctgctgaagaacgccgcatgccggaggcacctccccgttggattccagatggagatgcgccacgttgcatggcgtgtgcctcttcatttacaccattcaggaggcgacatcactgtcggaattgtggtggggttttctgtggcgtatgctcgagcgcctctgcaccacttcccaaatacggattgactaaggcggtgcgggtttgtcgagattgttatgttcgtgaagtggggacctagagattagcagcgctgaaaaaactcaattctttttagttaactattgttgaatttttcacgtgacgagttcttttcttactgtgaggtatttgtttttactaaaatgtaacatgtctgttttatttgtattttacaaaacataagacgaagtaaaattatcaaatcatgtttttactg

SEQ ID NO: 594 - DNA, 3783 bp, Aedes aegypti
tcagttaaatcgaaatcagagggagatatattttactggaagtaggggcattttttattgggattttccattgatgaagaggcggaatagcagttacctgcggcggcataagccggggtgttttcattgattacccataggaaaaaaattcgaaacagatgagctggagttagctgcgacaacatgggcgtaagatttcagagtgcatttggaaatcacttgaaccggtccaaccaaaatcatttaccctactcccactgtaaataaaacacacactgcaccggtgcaaagcaaactgtcaaaaccatttttcggattcgcttttctcggatgtttctgtttttcatgttttcctctttgctccctgtttccattcatatcatcttcttgcaaacaagacgcatcagtcagacggggcacggttttgtggatggtttcgtaactcgcgacacggtccgtcatcgaagaaaagtgtagcgaaaaaaagtacagcagccaaaggaggaaaaaaacgcagaacggattcgtcgactcgtctcggcgggggagtgcgtttgtgttcttgccggaagataccgaaaacgaggtctattccggcgttttcaagagggtttttgtaagcaggaaaaagttggaattgcggcgttctgcaagaaggtgtttggccccctctgaaattgatcggatcggggaaacaaaagttcacaagtgcaaaagacgaagaaaagaagcgaaattttatgttgattttatgctgctggattgctttggaacgccgttgttgacccccaccgaacagaagccaaagaagagtcgtgggagcctggcggcagtttattgtcttttgatccacttcggggagctttccccgggagttcggtgtgaatatcaaacaaactgctgagaggagggtgaaggtgaagtaatttcaacaatcgattgttgccgcttccgctagatgtgagtgaggtgattggattttgggggatagataggaaaaactgcacacgataatatggtggcatggtcggcttcccatcgacgacacgttcgcattctgctcgtgggggaccagggcgttgggaagacgtcactgatcctgtcgctcgtcagcgaagagttcccggaagatgtgcccacaaaagcggaggagattaccatcccggcggatgtcaccccggaacaggtcccgaccaacatagtcgattattcagctaccgagcaaacggatgaggcgctggcagaggaaattcagaaggcgcatgtggtctgtatagtctattcggtggaatgcgacgaatcgttggacagaatcaccacgcattggctgccggtgatacgggaatattccggcgaacagcgcaaaccggtggtccttgttggcaacaaaattgatctcatcgattactcaactatagaccatgtactgtcgattatggaagacttccccgaggtggagagctgcgtggaatgttcggcgaagacactgcacaatatctcggaaatgttttactacgcacagaaagcggttctccatccaactgctccgctgtatatcatggaggagcaagatctaactgacgcctgcaagaaagctttgattcgaatattcaaagtctgcgacattgacggagacggtttgctgaacgactacgaactgaatcactttcaacgtcgctgcttcaatgctcctctacagccacaggtcctggacgaggtgaaggccgttcttatgaaaaacaccccggatggtatccgtaatgattcggtgacgctaaagggcttcctcttcctgcactgcctcttcatccaacggggacgcaacgagacaacgtgggccgtgttgcgtcggttcggatataatgaaaatttagaaatgagttcggaataccttcaccctgcagtgaaaatcccgccaggcagcagtaccgaactgtcccaccgtggccagcagtttctgatctcgcttttcgagcgaagcgatcgagatggcgataatgctctgtccccggaggagtttcgcgttgtgttcagcgcctgcccttgtccacctttctccaccgatatcaagcgtacggttccgaccaacgaaaacggttggccaacgctacacggttggatgtgccggtggacactgatgaccctggtcgatttgaacaaaacgctagaatacttggcatacctgggcttcagcgtgcacgagaacgagtcccaactggctgccatacacatcactcgggaacggagaatagatttggccaagaaacagaacagccgatccgtgtacatgtgtcacgtcatcggacctaaagggtcaggcaagactgctttctgtcgggctttcctagccgaagatatgcggaaactttcagacaaagacatacgcggtacgaaccagtatgccatcaacacggttcaggtgtacggccaggaaaagtatctggtcctgcgggacattgatgtgcgccaggtgctggacccgttgcaaccgagcgaagtgaactgcgacgtggcctgcctggtgtacgacatcaataacccaaagtcgttcgaatacgtcgcccggatatacatcaaatactttgccgagagtaagattcctgttctgatagtcggcgctaaagcggacatggaggaaatgcggcaagagtatctgctgcagtcgccggacttttgccacaagtacaaactactgccgccgcagtacttcagcatcaagcacaacaagaaggacatctacacgaaactggcgacgatggccgcatttcctcgtttccaagccgcgtggattcttttctataagcatagattggtgcagttatgggaacaaactcacctgaaacagttcggtctaatgtccagcgatccgttgttgtggtggaaggcaggcctcggtatagcagcagcgaccatcgtgggatttttcgtcgtgaaggctttccacggttccagctcacatgcgcgatgaatcggcttaacaacttgctaaatcgtagaatcaccagccggtaagagcaatttgaaaataaacacacattttaccaaccagacgaccagcggataagcgctgtcgttgtcttaactagatttgttccgagtctactgtaaatagtcgtcactagcgatacaagttgcaaagttgtgtttagctactaaggttcagaattcagattattgcaacgtttgcattattgcattgactcgctgaagaattcctagcaatggccaaatttatatggctttcagactagactctaagcagctttttctaaagtttaacaatacagaaatatcaataccaaacatagcttgtctttattaccactttatcccgcaatattatctttagtttgtatttccatccatctcaacttcgttgatgcaatatcttatattttacgtggcgcgcgctgataccaattcttcaaaagtatgatttagattgcgcattcaaccttctgtagccagagttagggtccagttcgagttcgagagaatttgaaaatataaaaagtaatttcctctgaaacagcagaacaaaataagaatatcagtttttttttgtaatttgacaaacagaacaaactgatatctttattttcattgactcgttggcttttacggagaaaacaaggcttattagatttgaattgtgcttaaatgcggattgccctttattataatcagtttcatcggaaaaattgtcagagtctagacacacagagattgtaaattagtttgaccatacacattggtatcaatatagaaatcaatagtaagata

SEQ ID NO: 595 - DNA, 3945 bp, Aedes aegypti
gttctcaccgcgttcttagttggtggcgctaggaaaatcgttcgcgcaaatcgtattcatgatccccattgcaccagctagccggcatcaatcatcgcgggttcggtcaatacaaaaacaacataaaccttaccggcggcaatgttgacgatcgttaggcgcggggccgcggatccatcggttcccgaaccacgccagttgttgagtggctttcgtcggatgcggacgcgttttccgtgctatctagcttcttcggtgacggttatcgcgattgcgcactgagttgcacgagacgatttattatttgtgaatagaattcggtcggtggtcggaggcgatagggagaagtgtattcccagagcactgatagagcgcgtacgtttgccgtcaatctccatgagcgaaggaacgggaaccttgacatcgcggctcacatagtgacgatacggccattccgtcaccaatgttctcctgaaggtataagttacaggactggcatgattctattttcccatttgttattcagttcgaaaatctaaaacggaaagcgctccaaccaaaatgccaccaacggaagccaccattccgctaacggatggcaatcggatcgtgaagcctccggtcaccatcgtttccaaagaggccaaccggcgacagtcgctgatgcaggaagatgcaacggtaccagatgcaacgatgcccaacgagaatggaaaactttcggacgaacagcaacggcaacaacagcagcacctcagctggctgggccggctctcctaccatgtgtctatcacgatcggccagtttttctacagattgggccggttcatagctaacaacccgtggcgcacgatcattgcctgttggttgatcgtcgccttctgtagtttgggattcttgcgattccaccaggagaaaagtcccatgaagctgtgggtgccgcaaaattcaaagttcctgcacgataccaactgggtgatcgacaacttcaaagagggcaatcgtatcgagacggtcatgttgaccgcaccggatgtacttacaccggaagtattacaaaagcttgccgagatcacggaagaaattgtgagcttgactgtaatcaacagtcatggtaaaatggttggctggaatgaagtctgcttcaaagttccactgatagctgaatacacagcgaatgaacgcacaaaacgggaagactctcaatctctagcaactacaaaacgtccgaagaagcaaaagcctttcttcaaccccagcgttgatctaccgagcttcatgtactgtccactgatcaacagacttccagttggttgtctggaacgtagtatcctcgaactttggaagttcgaccgggaggtcattgcaaatctcaccaaagagcagatagtcgataaactgaacagcaccaagatcagtcccgtcacggggcacacgattgacttctccgaacttctcggcggagtgcagcgcgactggatggggcggattgtgtcggcgacggccctgtactcgaactggatgatacacgtcaactactccgaagtcgactccgatgtcagtgggaatgctgccggaacggaagattgggttacggaggaggcaatgctatgggagggcaagtttttggaaaaacttggagaaatgggtgagaactataccgatgatgagacgaagatgttctacgccgcggggcgtagctacggagatatcagtgccgattcgatgttcaaggacattgataagctggtgttcggaggagtggttatgttcatctacatgcagttggtgctatcaaagttcagctggactgaattcaggataatactaggatccgttggcctgctcagtgttgggatgggtttcatagctggcagtggcattgtttcgattctaggcgtctcgtacggtcccgtgcacacgtgtctaccgtttctgctgatgggactgggagtagacgatatgttcgttatgatggcatgctatcgtaagattcacgaaactcacgcaaatctaccgttgcccgaacggatgggtctcatgttgaagcacgctggggcatctatcacggtgacgtccctcaccgatatcgtagcattcgccgttggttcgattaccgtgctgccttcgctgcaatcgttctgcatctacgcagcattcggtgtgctgatgatgttctttttcgtcatcacgttctacgtcgctatattcacccttgacgagcgtagaattgcagcccgtagaaattcattcgttccatggaagatccatgacgagaaatcaacgcagttatggtgccagtataaccttatgcatcgcttcatcgaatttatttattcaaacattattcttacgaacattggaaaaactctcatcatttttgcagtcatctgcatgacaggtctgaacattcaaagtttaatgaaacttcgtcaaaagttcgacccgaactggttcatcccggaggaaacctactataaccaatttatagtaaaaaatcgcgaacattaccctaataatgggtacgaagcaatgctacttttcggcaactacaactacaccgcagagttaaaggaattactcacgataactcataagctggagaacagaactgatatactgcatagcgtggactcttggcttgaaccattccaggactttgtgtactctaactatgatcaagatattggtgaagtcgtgctgagtgaatcagatttccgcaaatacctatcgaagttcctatacagtcacgagggaggccgatatcaaatgaacttcaagttcgcatccaagctgcagtgtggagaaccggcgccgaacattaccgtcactacgatcgacttcaaattccgcccgttcagtgaacgagaagaatacatccccgccaagtacgcagtcgaagttctgctcgccgagagcaactttacaacgggagaaccgttcaacacgctctgggcgaagatcttcggtaactgggtcaccgacgaaatcatcgatacggagatctacagaaacatcgccttggccatggtcggtgtaatgttctgctcggctgtgctgatcgtcaatccacagatttgtttctggattttcatatgtgtcctgctgacgctggttaacgtaggcggattcatgcaacggtggggtctgaccctggacatatgctcttgcattgcacttcagctagctgttggtctctgcgtagattacgcagctcatatcggtcacacgttcctaactattagtcatggcaatcgtaatcgtcgctcgctggaaacggttcttcacataggcgccgccgtactttacgggggaggatcaaccattctatcgctcagcgtctctctggatctcaggcgtatacctaccgcaccttcttcaagatattccttctagttattttgcttggcttgttccacggacttgtcctactaccagtcatccttagcctcgtgggacctcccccctacagtggctttatagacgactcgaacaagcttcccgatgatatcgaaaaagaaatgcaacccattactatcaaccagaagcggcacaacggccaacttgctcactgtgaagaagagaagcaaccgatgaggacagaacccgtactttgaacgaaacaagcactggaagcgttccatgacttatcttgctaatcccccggaaagcaacgagtggattgcaactgttaacaatcaatttgaaacaaacatacacaattagatgcacaaaaagtaagtctttttctgctgttttacactcaagcaaccatatttgaatgatcttgcaacaagagctgtttttttatataggccacgtgatgccattgtgattttaagtttgctaatgttagctacaaagtatttttggacaaagtcattacatgtgtaagtgaaaaaaaggaaggcggatagatgaaaaaagcaattggattgtactaaa

SEQ ID NO: 596 - DNA, 1855 bp, Aedes aegypti
tttcgaacgtcaacggggaaacagctcttctcctttctccaaaacgcgtggcttgtaaccgagtgaaaaattgtgctgcttcagttcaagtgccccatatcttctaatctaagtgtttcgcagacggcttcactggaagaaaggattggagatgactgcccagtacaaacaaacgaataccaatggattaacggcccggaatttgaacgtggctgttgttgggggtggactggttggctctctatttgcactccacctcggcaaaaaaggacacactgtggacctgtatgagtacagagaagacattcgcacggccgaactggtcattggtcgtagtatcaacttggcgctgtctgcccgaggccgcaaagcactggccgaggtgggcctggaggacgccctcctccagcatggcattccaatgaagggccgcatgttacacgatctgaagggaaaccgtaagattgtgccgtacgatgccaacaccaaccaatgcatctactcggtggggcgaaaacatctgaacgaggtgctgctcgacgcggccgagaagtacccgaacattcatctttatttcaacaaaaaactccaatcagctaatctggatgagggagagatgagtttcattgatccaacgacgaaggaatctactcacaccaaggccgatctgatcgtgggctgcgatggagcttacagtgctgttcgcaaagaaatcgtcaaacggccgggttatgactacagtcagacgtacatcgaacatggctatctggagctgtgtattcctccgaccaaggatggggatttcgcgatgcctcacaactatttgcacatttggccccggggaaagtttatgatgatcgccctgcccaatcaggatcgcacttggacggtgacgctgttcatgccgttcaccaacttcaacagtattaagtgcgatggcgatttgttgaagttcttccggacatacttccccgatgcgattgatctgattggtcgtgagcggttggttaaggatttcttcaagaccaggcctcaatcgttggttatgatcaagtgtaagccatataatgtgggcggcaaggcggtgatcattggtgatgcggcacatgccatggttcccttctacgggcagggaatgaatgccggattcgaggattgtactgtgttgaccgagttgttcaatcaacatggcagtgacgtcgataggatactggctgagtttagtgatacgcgttgggaggatgcacactctatctgcgatctggccatgtataattatgttgagatgagagaccttgtcacaaagcgttcctacctgttccgaaagaagttggacgaactgttatactggatgcttcccaacacctgggtcccactgtacaactcggtatcgttctcccacatgcgttacagcaaatgcatagcgaaccgtaaatggcaagacaagattctaacccgcgtcttatactgctgttccatcaccgccgttgcagcggctggttacttcggctacaaatacggaaatatggatctcgtgcaacactactcttcctctgttctgcagcttcttaaactaaaatgaaaaactcatttctgcatttacaacagtatctttacctaataattccttcatttactacaataacaatcggtgatgatgcaaactcttcaaatattctttgtattacactactgcaataacctgtatgattctagtgatgactataaataaacgtgcaagtggagcatatctgtgtcgaacctctttggactttgaattataactaagtaacaaactatcaccactcctcgctactctaaaatgagcttgacattttcataattttcaacatat

SEQ ID NO: 597 - DNA, 3395 bp, Aedes aegypti
gacagtaggtgatcagccgcgctttcggaacgttcaaacaagtagtctgaagcttcagctaacctgtagctttcccactggaaggagttcgtttgctgaaggttgttaagtgctttttataaacattgttgggattgtcgagtgtttgaaattttagcgatcgagtggcctttaagggttagtgtgataaaaacacttgcagaaaataaaattaacagtgtaacaacaatcgacgaatcgcactctcttctcccgcgcgttcggttttcagagagagaagggtgcttcaagaagaatcggtaaacaagccgtaacaaaaaagtgactgtccaaattcggtctcctgtggaagtgctcgtgtgaaaagagggaatcggcgaggaaattctgctgcagtttttaatcggaagtgaagtgaaatcgcaaaaaaaaagactcaaaatgccgcagaccaaagcaaccaatggattcgccaccaatggccacaatggctacgaaatggaagacgggtgctcctttttgttcacctcggaatcagtaggcgagggacatccagacaagatgtgcgatcagatcagtgacgccatcctggatgcacatctgcagcaggatccgaacgccaaagttgcctgtgagaccatctctaagactggaatgattttgctgtgcggagagatcacctcgaaggccgtcatagattaccagaaaatcgttcgcgaaaccgtcaagcacatcggttatgatgattcctcaaaaggattcgattacaaaacctgtaacgtgttgctcgcactggaccaacaatcacccaacattgccgccggagtgcatgtgaaccgtgctgaggaggaagtcggcgccggagatcagggtttgatgttcggttatgccaccgacgaaacggaagaatgcatgccactgaccgtggtgttggcccaccggctgaacgagcgtatcgccgaactgcgccgcagcggtgagttctggtgggctcgtccggattccaagacccaggttaccgccgagtacgtgttcgaatcgggtgcgtgcatcccccagcgggtgcacaccatcgttgtttcgctgcagcactcggacaagatcggcctggaggaacttcgcaagaacatcatggacaaggtcatcaaggatgtcatcccggccaagtactttgactcgaacaccatcgtgcacatcaatccgtgtggattgttcatcattggtggaccgcagggtgatgctggtttgaccggtcgcaagatcatcgtagacacctacggaggttggggagcccacggtggtggtgccttctccggcaaagacttcaccaaggtcgatcgctcggctgcatacgctgctcgctgggtggccaagtcgctggtgaaggccggcatctgccggcgctgtttggtgcaggttgcgtacgccatcggtctcgctgaaccgctttcgatcacagtattcgattatggaacttcaaagtatagccagaaggaactgctgaacatcgtttcgaagaactttgaccttcgcccgggaaaaattgtcaaggatctaaaactgaggacaccattctaccagcgtactagcacatacggccacttcggacgcgaaggcttcccatgggaggagcccaaggagctggtgatgaattgattggcagctggagccgttgcttgtggtggtcggagcgattcgttagccgccactaccgcaagcagtagcgacgaggctacaccagtagttttaaagaaagccaagctagacgtttaagagtatattcgagcatgaatagggtttattttttaatctgaattttcatcagttttttacgcgtgtaggtgtcgtttaataagttcccgtgacagttgggcttagattagttcagcagccctttcctgagtcaatagccggattgtgtcatatttatgagcggaaaatagtttgtattttcaaagtttatgtttgtctgtgttgacaatgtgattcctgtaccaatttttcgtacataacggaaagtatccttccaatttacactttaataatactacttcaaggtgaaacaaattgccagtcttaaacattcgaatcgtgtaggaaagcaaaaagtttaggaaacgtgattaatagagtttaaaaattgtaaacgaatttcttcgctcttgccgcctttgttagttggttagccccagtcttactttacacaaaagaaaaaccatcgcaaaaaatatgtaaccatcgcaacaatgtctctacaattagtttgtacgcttacttacacgcatacactctttgaacatttggtaaaacaacaaaaagtggtatgtaatacaaaaaataaaagtgacatagtgtttacagaaaactacacaacaagtacacaaaaaatatcataaaaagtaaaaaaaagtagaaacatgctgcttgaagcggttagatataaaacggatccgtgatgcttcgacaaagctagaccattcggttggccacagtaggaaccccatcaagtgcgcttccagagcaacatcccttggaagtgctgcctgctgcaaaattcgttgtatgacgtgaaaaaaatcagttcaactgtttcatagcgacgtatatttttgacgaatggaattctagggacatgaggtaaacatggagaaggtacgcaatagattctacattgccatgttgcaaacgtgaatcgaggaaatcggcatgaaactaaaatatacagaatatcaaacagttgcaatttatttttttcacatgttcatacacgttttgtgttgtgtttacgtaaaggaatttatttgtggaaaagagccatttcgaaaacactccggtccgctgaatggttgaagggtgctcgcagtgcagcaaaaaaatcagaaaaattacataaaatagtcccttacttaaggatgtaactgcctcagatgttagtttgctttgagttttgttaaaatttcaccagtaggaagaactagaacgtaattgaattattctcctaaaagcgtttcatttgaacggaagttttgccaaaacgaaaaaatctaacgttagaatgcatgttacgtaaagtacatttaacaaaaagaaatatataacccaaaccagaaaaccaaaaaaacgaaaaaaattgtactgcgacacgctttgcgagggctcggattcgaccaaaaatagagtttgaatagttttttatttgtctttaaatgaatattccctaaggtacgatttacttacttactgctgagaagaatggaaagcgaagaaatctaaaacaaatacttcaatatcaatcagaaccagattgagtttaaggaacaaaagcacgatcagaaaatttaataaaaagcagaaaatatggaaataaagtccctctacttctggtagagtgaaac

SEQ ID NO: 598 - DNA, 2972 bp, Aedes aegypti
atgaccgtcacctacaccgccgaagttgccacatgtcgaggcttcggctgctttctgaagctgctggtcagatggcgtggcagtatttataagctggtttggctggacctaacctgttttctactgttgtattatattctcaacataacttatcgactagttctagatgagtaccagaaaaagattttcgaagacatcgctcaatattgtgccacctatagtaatctaattccactatcgttcgtgcttggtttctacgtcaccatcgtaatgactcgatggtggaaccagtacaccagtataccctggccggacccgatagcagtattcgtcagtgccaatattcacggacaggatgaacgaggtcgcgtgatgcgtcggacgatcatgcgatatgtgtgcttgtgcttcaccatggtgttaacgaacatttcgccccgagtgaagaagcggtttcccacgattgatcacctggtcgaggccggtttgctcaacgagaacgaacataagatcatgcacgatctgaaccaaaagtttcctcgacactccaaacactggctgccgatcgtatgggccgctagtattgtgaccagggcgcggaaggaaggtcgttgccgagatgatttcgccgtcaagacgatcatcgacgagctgaacaaattccggggacagtgcggcttgctgatctcctacgacaccatcagtgttcctttggtgtatactcaagtggtgacgctggccgtttactcctactttctgttttcggttatgggacagcaatgggtgtcgtcgaaggaaaacgtcacaggggttgtgaccagaatcgaccaatacttccccatattcacaacgctgcagtttttcttctacatgggatggcttaaagtggccgaatcgctgatcaatccattcggtgaggatgatgacgatttcgaagtgaactggatgatcgatcgaaacgttcaggtttcgtatctgattgtggacgaaatgcaccacgaacatccaacgttggtgaaggatcaatactgggaggaaggcttcccggcagagttgccccatacggtggcatcagctgagattaaggaagaaccaccggcaccatctaccgacaatattacggtcaatcggaaacaggccgaagtgatatcagtggtaccatcgtcggtgcgggtggacgaaatggccgatgacaccgcaagtggaatccacttttcagcgtacgataacaaaccattccatcggacgggtccttccacaaacagcctcggcagcgtagtgaacacgatgacccgcgtcaacacagtggcgtcggcattgaaacgcttcttcagtaaggacgaaggtcacagtgctagcagaccacagagtgctacaccggaggcccaaaccggcccattccgattcccagggtcggcaagctcgtccaatctcggacagcgacttcccgaccgaggaagtgttcgcataacggatcaagtcatcgaggaggttgatgaacaacagatgaccatcacttcggttcaaggcaaaaatgatgcccgacccatggctgctagcctgtgggaacaaggtcctccaaagcctaccgagccggtagatgttcctcaaccggcttataaacgaacccagtctgcagtggcacatggtccgtatagttccaccgccatattcccacctggtggcgtagaatctttgcttagcgcatcagcacccgtaggaggacgcttcgaaacgacttttgttcccattgacagccatagggacgaaccacacttcacggacagcaaagaatcgactaaaaccatcgacgacggtttggatggtggccccgatggggacatgagtgaagcagatgacttcgaaaggttacgtcaggcacgtgaaaaagagcgtgccgaacgccaaaaggttaaactagcaagatcggtcagcggactagcgcccatagataccgatattttgctagaaaaactgaccaaaaccgcagaacaacaacagcagcaagaagctggtccgtctggcacggatacaccagacactcaccgacattccggagtgcctgccgcacaccaacaagccgacaccaccttatgattctacgtctccgacgaagacaacgtgatcgtggtcaacgtaaaggacggtagctagtattaggagaaatttgtgaatctgtttgtcccaggttggcattggcattgaaagattcacaactttttataatttgttatttttatattttcgacaatcactataaagtgagcttttcggaccagtattttatcagtttatctgattctcgactttaccttgttaagcacaaaaaagttagatattcaaatttaccataatacaactgttgaaaaaaaatgctgttatagttttgcgttcaggctatggcttctataccaatattattcaactaaattgcatcagaaataatcagatatttcacatgaagatatccaatattacgcatataagccatagtctgaacaaagcattatgtactcaaaaaaagttctcgatgaatatacttcctatcaatacgctaatggagcatcagataaaacattaacccagtgatatttaatttaaattaggcacaacagtagttactacaaagcttgtaaagataaaacaataatcacgtggctttaggagaggaacattctaattcgagatgcctttagaacaaacaaaaaaaatcgcctgccttgtgatagcgcgattcgacttttgtaacacttatttgctgcgcgcagtttgtcgatattagcatccaatctcgtttagatatttcgaataaaaatggctaaaaacacattactatacaaacattactgcatatttgcaactataaatggatagaagtagcatccttcctagaaggttttatgcgcatttttcggcgaagtccaaatacgacaaaacttaacttgaaacaaatgattatactatcggaatac

SEQ ID NO: 599 - DNA, 1673 bp, Aedes aegypti
cccacactactctgaagaagacgcgccttgtttcgatcaaagtctatattgcggcagtgcggaacctgttgagtgcggttgaaggatttaacgactgcagactctatagatttcacagtgtgtgctaaatttggatttcgcaagtgagaaagaagaacacacctcaattgatttcgattacgcgctgaagcaggtccaacgcagttccaatcgtcaattaatacaacccaaaaccagagatcgcgagtgtggaattaatctttcgctcggtcaacaaagcggcaaagggaaaatcagcttcagaaaaaaaaaactcttgtgaattgtcggaagaaatcagttacataaaacaaccagtcgtgaaagcaacgaatcgcgaccacgttcgcttcagtgcatcgtctaccttttggggcgcatttttggaagcatctttgccttacctgtgcgacctaacatacctagtgcaaaaccagtggagcctagcctcgaagaaagctgtgtcgtgtgtgataattaattaaaagtgaagccaagaaaaactggattacatcagacggttgaacgctgctgagcaccaccggttgttcatctgagacgactcccaaaactcaaaagactgacgtcaaaatgacgatgggcaatatgcgtccgctaaaaatcaccactgtcggcgatggcatggtcggcaaaacgtgcatgctaattacctacacacaaaacgagttccccgtcgaatacgtgccaacggtgttcgataaccatgcctgcaatatcacagtcgacgagaaggaatatgccctcacactttgggacacggccggccaagaagactacgaaagactacgaccgctaagttacccaaatactgattgttttcttatatgttactccatatcaagtaaaacatctttcgataacgtgctatcgaagtggtaccccgagataaggcactatgcgccccacgtaccgattgtgctcgttggaaccaaaagcgacctccgagtacacggatcggaaaagtttgtcacaactgctgagggcaagaaactgaagcacaaaatcaaagcttactcactggtagaatgttccgctaagaagaaactcaacctcggggaagtgtttgacgaagccgtgcgagcggtggagaaaaagccccacgccaaaccacgtgtctgtacgatactctagctcctccctgtggcccttttctagtgttttaggtttcgttattaactctatattattgtagttatatatcaataaggccacggccagtgatgttaggtagataatctcctttctacttaaacaatcgactcagaaatctatagtgagctccacaaaaaagtcacatttggccttaatcagaaatgaaaatccaacaagcgaaaaacaaaaaaagaaaagtattcgacgatttcctaccgttatagtattgtgcatattgaccacagaaatgttttcttcaaaacctacattagaatgagtgatcggatattttgtgctatattcttcagatgtataagtttgttacatttttgattggatattttattatatagttccaacgtatgggacccatttccatattcatcagctagtcatacgatttttgtcaatatgatcgatgaaaatgtaactaatataacttgtaaaatatttgtgtacag

SEQ ID NO: 600 - DNA, 3986 bp, Aedes aegypti
atgtttgttgtgttctgttcttccccggcgacgacgacgacgattttgacctgcagcacgacggcccccggaacagcctacccgaccacacagacgggttatgcagtagcgacagcggccgcaccggcagcagcagcgacctacggaacagccgcagcggcagcgcgtccagccggatacgagcaagcctaccaaacggccgcaactcccggaacctacgcaacaactgcaacggcaacctacgactacgggtacgctcgtacaactcaaacatacgacactagcaagacttactaccagcaagcaggggcaaccgcaggctacacagccgctccgaccgcgtacgacacttcggcagcaggaaccgccaaggtaatcaacttccaaccggccactcaagtgacgtacggcgcccaaccggctcgggctacaatccaaacggctaaggcagccactgcccagtacaccggtcaacctacggcctacgttccgcaaactaccggttactcccacacagtaaccacggtcaacaccgctccgaagccggctgccactgcccaaacagtcggtcagagcgccaactactcaggctacgaatcggccctttacagcgctgctaccatgtacgttgctcaacagcagaacaacaaagctaccaatgccgttggcggacagcagggcggtggtggatggcaaggatacaaaaaaggcccgataggaatccatcggttcaagaaccagaacaagcctcctccaaagccacagccaatccattattgcgatgtttgcaaaatcagttgcgccggtcctcaaacctacagggagcacttggaaggccagaaacacaagaaacgggaactgctgttgaaacaggctaccgaacccggcactgcgactccggcacgtcctcccaacagcctgcactgcgaactgtgcgatgtgacatgcaccggaaacgatgcctatgccgctcatgttcgcggcgccaagcatcagaaggtcgttaagttgcacaccaagctagggaagccaattccggcatgtgaccctgctccaaacacggaaaagaaggacgaaaccgatggagacgagcatgacgaatcggtcaaaccggtcggaagtgagtacatcgaagagatcaaggacgacgaaggcaaactggtcagtttcagttgcaagctgtgtgagtgcaaattcaacgatcctaacgccaaggagatgcacatgaagggccgtcgtcatcgtttgcagtacaagaagaaggttcaaccagatctgttcgtagatattaagccaaccttgaagcagaagaagatggccgaggctcgtgcccatcgtcaggctatgcaggaggagtactggaatcgtcgtcgcatggcggaagccgaaatggaggaaggtggcgatcatggcatgcgtcagtttggacgtcatccgttctttggaatgcttccgggacgtcgtccggaatcttctgacgatcgccacgttgtggcacgtcatgcagagatctaccccaaggaggaagaactgcaaactattcagcgcatcgtttcacacaccgaacgggctttgaagctggtttcggatgcgatgaccactggcggtgccaaggacgagaagaaggaggccgattccgacaagaaggacagcaaaggagatgagcagaacaagggcgatgctaatcagatgatctccttccacaaggaagccgagggcagcaatgttcgtctgctgaagggcgttatgcgcgttggattgctggctaagggacttcttctgcatggcgacaacactgttcaactcgttgtgttgtgtgctgaaaagccaacgacctccctgttgaaacgcgtcgtaaccgagctacccatccagctcaaaaaggtcaccgaagaacaaaagtacacagttacgatggctcctgtcgagggtgccgttctggtgtcggacggtacaattacggtgaaaatctccctcacatcccctctgctccgtgaagaagcaaacagtaccgctgcaaacgagcaagtcaacaaccagagctcggaagatttactgccacgggagccctgtctccaggcacttgccgccctacgacacgcgaagtggttccaggctagggcaaccggtctgcagtcctgtgtaatgatcatgagaatcatgcgagatctttgccagagaattccaatctggggaaatgtctctcaatgggctactgaattgctcattgaaaaggtcatctcatcgtccggtggaccactgtcaccgggcgagtgtatgcgtcgagtgatggaagccgtagcttcagcgatcctgatcaacggccccggtctgttggacccatgtgagaaggaaccggaagatgccctcgccaatctcagccgacagcagcgggaagatatcaccgtttcggctcagatgttcctgcgcttcatggccttccggcaaatccacaaggtgctgggaatggaaccgttgccaccgccgaagtttgtcggtaaccgcaactggcgcttcaaccgcaagcgcaggcgttccggtaccgagggagctgatagcgaagctgatggtaaaatggtgaagaaggaggaaaacaaaggggaaggtggcaccaacaacgccgtggtgaacatggacaccgaaagcgcaaagtaaaggtcgcttccgttttccttcttcgttgatatgtaaggtaggttctattcggctagaattttaactgacaactatatgaaaataagagaaaatcttctagagcaaccttttaagacagtaaacttttcaaatattggatttaactctactatgaagaatatcatcttaacatggtaataaaaaaaataatgcatacaatgtactcaaccagaacgcagttgaaatgtaacaacaaaaattcgaaataaaattgcataaaacattatctggaagatcttatcagaataacgatttgtttgtccttgaagattaaatgcaatatttgaagtgaaatcaggaggaagtcagtcagacaaactctttcctttaattcgccctcttcggcaggaattgtcatcaggtgaaccagtcagaattaccaaatcttaggcaatctatttgttgaacaaaagtcaatttatgaaagatgaaaatcctcaatgaaattttgtttcctatccttgattcctaaaatattactttgctatcaaatttaggcagaaaaccaaaagaaaagggtaagactaactaaaaagcgttttggaatacaaacaaaaaaaaaatcatatacacttaaatgtatttaatcctcaatcgaaatcagatagaaattttaacgaaaaataaagaaaaaataatgtatgacaatttcgtgtatcctttggacaaaagacctctttgagcaactaaatcagtatgatattcaaaacttatcaaccgttctccgttcaacatgaagaagtacaacggcaggttgtatcgatctagcatcctattagcgatagataggccgtcagtcagtgttccgcgaccattgacgggcagtgggacggaataattcaagtagggcccatggagtgacgttaaagcaacccaagtagcgcacatctgccaggtactttttgcgtgaattaagaagcactgataaagaaaacaatggaaacaacaatacatatgaaagttcacaaacacacacaccaacacaaaactcacacacagatacaattaacctactacactcaactctgaaacagtccctcgtttgcagagaacgtcgatagccgtagactataaataggaatccttatttgattacgaagaattacacagaatgaaccttacagttcgctgtgaatttgaaacactagatgcggaacagcattacaactttcgctcattacacacgatcgaagaacgtcagcctgttgaataggtgaagtcagtcagtttgaggaatccatgatagcaagtatgtaataaacaaatttgaagtattttcttcttgaaagaac

SEQ ID NO: 601 - DNA, 2674 bp, Aedes aegypti
catacatacatacaaattcacattgagggcaaaatttgtctttttcgagatttactgaaatttgcacaaatctcattgcctttctcatgaatcaatgtatacaaaatggttatatgtattgatattatctatttttttgagctcttgtgtttcaaatttctgggtctcatactaacttccattttatattcagacataaaaatcaagttatgttttgaaacacaagagttcgaaaaaaatgcacagttccaatacatatagccattttgtatgctttgatatacagtactgattggattttgtcaggctttttttgcggagaactttttgctctcaccgttttgtgttcgttttttaacaaatatttttcaatccagtttatagtattataaacacagggaagaaagaattcagataacttgtttagattcaaaataggagcagaaaaagatgttaaaaaggagctgacaagatcgggtcatctatgtgtgagaaacgcaatgagaatttgtttttgtgtgtcgttgctatagatctcatctctggtcctcgaggcacggattctcttcccatttcttgcctttatcacactttttttttcttatcattgctctgtttgcaatgcaatggaaagtattccaaaaaagagaaaaacttcttttttgtttacgtttcctagtgaaagagaaggtaaatgccctatcacctgcaccgcctcacagaacaagttccctaatcgtataaatgaatcatagcccggccgcagaaatcccaacgtcaatgaaccgaacgacaaaccagtttatttcttaatttgaaagattgatgaattaaatttctcctacggcaatgacatcatagaatgattgtagttcatgctaattgcaaaacgtaagcaaaaacaataattattgagaactcactttcaagcatcttcgatgagctatagtgtagaccgtatgccaattaaattatttgtttaatgacgttgttacattcttgttcgtcattgcttctatgtgtagaatagggcaaaagatgcatacacttatgaagcgcagactatctgtagtttgcacctatacattccattatcagttatagcaatcagcaatggttgagtcgagcaaacgacggagctccgatcattagttgaatggaattttttttagtttcggtttgctagttattgtaccaatatcagaatgccgtggaccgaagtttagttttcggtgatatgagtatacagatatcggcatttggagttgggaatccctttgtcctcaaacaaaaagttgcctcaggatgttttcaagtaaatgttatcctaatacatttcgacgacacatgtcgtaaagacttccatcccggcctacgtcagtgcgggcgtatctctctccggagatcgtttgttagttcaattactgcccatattcggagagggcaagtgctcgtaggtcgcgtatctccgttgttagaatattcgcaaaactgatacgcgacatctggctaggcaaatgatgtctggttccaatgataagagtgatacaatttctccgacagaagacaactatttgttcggttttccaggcttggacgaccgtttgaagcgtattgctgccaaagaactgagagaaaatgaattcactcgaaagcaatcgttgaagcagatgcgagaatggattgccaagaaccagaggatcaaaaactgccgaacggatgatccgtttctgttacgctttctacgcgtaaaaaagttttcggttttgaaagcatgtgaaacactggaaaaatatctaatcatgcgtcaaacctatcccaagtggtgcaagaatctcgaccctctgaaggaagaccttcaggaagtgttgaactactgtgccctggttcccgttggtcgtgacagtgaaggtcgcattgtggtcatgggagttgttcggaactttgatgctcagaagcaaaactctgatcagatgattcgtctcaacatgattgtaaccgagtcactcttagatgaggaagcaaatcagattgccggctttacgcacgtgttcgataataccgacatgactctggcccatgtcacctgttggtcgttggaaaatattacaggctatctacgtagcgttgtcaatgctgttccgatccgattgaagcagaaccatttcgtcaacgttcccagctttgctgcccagctgagtaaatattgtctgtcgtttgccagcgagaaactcaagtcacgaattcattgccatcgcagcgtggaggagctgaagcggaacattgatgcgaaactgctgccccgggaatacggagggaatgtaccgctggcagaattgaacgaacgtttcaggaagtatttgatggagaagcgggaaatgctactggcactggataagatggagatccagctgaccgatcaggtggagacggttcacggcggcgtggatattgtggatgctggcgcaatcggcagttttaggaaactgcaaatcgattgagccattcacggaagaaattaaagcctgtccacgttaaatttcggacacccaaataatggcagcaaaaaaaagtttctcataattcaacaaaaacaattgtttatttcagaataaaagagttatatctacaaaataaacagttgacaaggatgttaatccttctttctgtaaaa

SEQ ID NO: 602 - DNA, 1390 bp, Aedes aegypti
gttttctgtgtcgaaaactgctgctcatttgtagagctccacaagaacagaagaatccccatttccttgtagctctgaaggcgaaagcgaaaggcaaaccataatacaacatggcggaccgaagatctggcggatctagccgtaacaatttcaacgaggagaaaagtcctgctgacattccgcccatgtcgcggctgttcatcatctgtagtaaaaccgtcacagaggacatcctgagggagcactttgaaaagttcggtgaaattgaggaaatctggatcgtcaaggacagacaatccggcgatgcgaaaggggtggcctatattaagttttccaaaacatcggaagctgccagagctctggaggaaatgaatggcaaaactatcggtgataattctcggccaattaaggttttagttgcggccaatcgacagcaaggctcccgtaagcaaactgataacgaagaagaaaaatacctacgactattcgtcctcatcccgaaggaaatgacggaggagtcgctgcgcgaagaattcggccagtacggtaccatcgacaacatcacaatcattcgggacaaggtaacgaaggagggcaaaggttttgcgtacgtcaagttcagtcgcttcacgcatgcagcgcgagcttttgaggaatgtgatgccaagtataaggcggtatttgccgaacccaaaccatcgcggaatgcttccgtgtcgtccagtgacaattttggaggatttggtagtggaagcggagcgccgaatggcttcatggacgaacgcagaggtggctccggaatgggaagttctggtccgatgatgggatttggagcgatgggtgcttcgggaagtgaccgtcgaggacccggcatgaacaacgatcggggagcaaatttcggattcaccagcagcggttattccggtcagagtgcgaatcccagtgatacatcgcttacagtactgtgcagcccttcgctgaaccaggatcagctgtggagactatttgatattatcccaggattggactactgtcagataaataacgattttaacaaccgtaacgtgactgccacggtggtctacaacaatgctcagtctgcgatgtacgcccgcgataagattcatggtttggaatatccacccggtgaacgcctcatcattcgcctgggccatgaaacagctaacatgatggccaacgcagatcccttcaacggcggaggtaagctatacattaaccatttttggttgaacctcactgtaaaaaagctgtaactttgtagagaaaagagatagaaatctgaaatttccgaactttaacatttgaaaataaagctttcaatgacctctatgagtggcaataattaataatgcattatgcattaagggtt

SEQ ID NO: 603 - DNA, 2280 bp, Aedes aegypti
atgctatgctattcacttctaatactaattgataccaccatcttctctacttccagcaattcagctcaaccagcgccgtctgtaaatagccacgacacaccgcagagcacgcgaagttcggcgaatcccaacaacaaccgtctgcgaagactacgttctgcaagtactcagtcgagttcggcaaccaatttgaacagcgtcaacaacaacaacgccaacccgaccactggctccggtgccaactcgaacaacagccggcatccccctaatcgccatcggacatcaggagccaccggaacaagcactgcagcaaacacgggtgggataatctcaagactggttgacagtagtagccacgcagcagcagcaggagcagcgccagcaacgacgacgacgactacgaccggaagcaacaataaccgtgggtcgccgggcccacagcgtgaatctacccccgttcggaagaaggccattctcatcagcccacagccaaatcctcccccctcaaggtcggacagtgtcgaccgagacccggaggagtcacccaggaaaagaaactccccaatgtcggagtcggaaccaccgcctcccgccgagccgccgacggataaggcggacctatccgatgtggaaccgaaacctcgaaccaaggcactcaccaacgattccgggatagacggggaaccgccgccgcacgccgacgaggagctggaggagaaccacaggagcgaatccggaccggttgtcgagaggagacggctaaattctgcgatggaaactagcaccacggacgggggaagtctgctgcgcaagcggctggactcgtgcgaatcggacagctcgctgggtcgcaccaatttgcgcttcattcgcaagagtctggagaacacgctggcggtcgcgtactcgaagaacttcatcgacaacgacaccatcgagacggaatatccgcgcaactatgacgacaacatcgagattctgagtcgcgaagcggagaacctggcgatgcagttcaaaccgtccgaggagaagctggtgcactatgggcccattttcgactacgagaagttcgaagagcagcgcaaacagcagaagaaggaggacgacgaggacgaagcgatcggaatttcaccgtgtggacggttcctcaagtacgacaaggaagtcggacggggctcgttcaagacggtttactgcgaattggacacgcagaccggcgtggcggtggcgtggtgcgagttgttggacaaaaaggtgaaccgagtagagcgagctcggttccgcgaggaggcggaaatgttgaaaaagttgcagcacccgaacattgtgcggttctacaactactgggaatcgccgccgactgctggcaacaagaagaagaacatcgttctggtgacggagctgatgctgtccggtaccctgaagtcatacttgcgtcgcttcaagaagatcaacccgaaagtgctcaagtcctggtgccggcagattctcaaggggctgcactttctgcactcgcgtgccccgcccatcatccatcgtgatctgaaatgtgataatatatttataaccggtacgacagggagtgtgaagattggagatcttgggctggccacgctgaagaaccggagctttgccaaatcggtgatcggtacgccggaatttatggctccggagatgtacgaggagcactacgacgaggccgtcgatgtgtacgccttcgggatgtgcatgttggagatggccacgagcgagtatccgtacaacgagtgcaatacgccggcgcagatctacaaaaaggtaacgtccggcatcaaaccggccagtttggagaaagtggagaacccggaggtgaaggagatcatcgaacggtgtatccacgacaagaaggaaggcagaccgacttgcaaggagttgctcaactgtgagttcttctgcgaggacatcggcgttcggttagaaccaatttcgaaggaaagcttcattgcgaacccggacaacaccagaatggagttcagactgagaatcatggatcccaagaagagagtcaataagcataaggaaaatgaagctattcagttcgattttgatacgaaagttgacgatgctgatgaaattgccagtgatatgcataaaagcggaattctgatggaggatgattcgaagacggtggcaaaaatcctaaaggtgcagattcaaacattgttgaaggagaaagaagaaagagctaggcaaatccagctcgaaaggaaaccgaggcattgcaaaagcaggcaatgctag

SEQ ID NO: 604 - DNA, 2551 bp, Aedes aegypti
gacctctgacagccacaaacgtcaaatcggaagggaaagtgcgatgcacttttttcagctcagctcagtcacaatcttcattttcatcatggctttacgtttccgaagtgtgtcatagagaaaaacacgattttcgcgtaaatatcagtgaaattcggtacgcaaagtgtccgccgtcatccccgggactccattcacgatggatttcggcaagttgctgagcgtggcccagcgcaatgccaccaactcggagcagaaatcttccgagtcccgttactactcgaccaaattcgccccacccaagaaggaatccaaggacaagaaactgtcggctaacatccagaagttcctcgccaaaaaagaagaggaagaacgccagaaggccctggaggagaaacgcaaacgcgatgagttgatggccaagcgggaccccaaggcgaagaagaagatcgaaaagatgctgaaggtcatcaaatcggcaaacaaatcggtgctggacgatgccatcgatcagaacgacacggccgtcacgttgcaaggtccggaacagccggacgaagacgattatggttacacgtctaatgtggcgtcccaactctaccagcagctgatggacaagtacaagaacactccggaggagaagaagttcaaggacggctccaaacgggtcatgtccaaagaagatatggaacgcgcaaaggcacgagtgaaagatgccttgaaccgggttgaggaggaagagaatgcccctagaactaggaagcggaaagatgctggggaaggaagtacccgtgatgaggaaagtgcgagtggtagtagcaaaaagctggttggtccggataggtatgatccggaagaggaacgacggaaagaagcagaaacgaaggcgaaggaggaagctgccaagaagaaagcacgaagacctgcgggacctgctccaccggattttgccacgttgctcaaattggctgagcagaaacagatggaaccggtaaaggtagaggtcccagtagtagaaaagaaaaaagaaccggaacgtctcatgactaagaaagagaagaaagagtacgaagaacgccaagcttatctagaacagaaaaggattcgggatcgaatacgaaacgatcctcgtctttcggagaaggagcgacagatcaaactggcacaatacgatgcgatcaaagctgggaaggttccaccatctgccggggccaacaaatccggaccaactagtacaaatgtgatgacaccaaatgggcgtattccaaagctgaactcgtccgccggatcttctgagaagccatcaacggcgcctccaaagccgacatcatccagttccagctccaagccttcctcttcctcccgaccagacgaaaaacggacgttcccgcagaaaacctctgtcgaggcagcgtccgccaagagcaaactcgaagcggccctcacagcatccaggaagcctcccagcagcgcacaatcctcttccgcctccagggaaccatctagcattaaaaaaccagttccatcgtctcaacagaatggcgctgccaaaatctcatccaccgcgaaaccatcaccacaatcttcagcaaaacccacaccttcatcaacggccaatggccaaaaaaccagaccattcccgccggctgacgttccccaaaagacccgccaattcccgccaccagacgtgcagaaaacgcgccaattcccaccgccggatgtacaaaaaacacgccagttcccacctccggatgtgatgcggaaacgaccgctggatgcccgtggcaaaccatcctcgtcggccccgatgaagaaacgccgccccgtcatcgaggacagcgacagcgagtacgactcggaaatggacgatttcatcgacgatggcgacgaggagatggactactcgtcccagatcaaggccatcttcgggtacgacaaatcgcgctaccgggacgaggactttgacgaccgggagatggaatcgaccttcgcccagcagatgcgggaggagttcatcagtaagaagatcggtctgatggaagatctggaggatatgcgcatggaggaggaggagaaacggatgaaggccctcaagaagaagcaggcggccaagcggaaatgaaaatggttctagaggatcaggcaattgttgtttggaaggttttgattaattttacaccacttatgcaaatacctatttattttttaataatgatttattaatttttgttagtgctttattacgctaaataccccacgtttagcaaaatgcgttagaacactgagagggcgcttttgagattttgcgagagcttcttctgataggttgattttgttacgcaacgtactttggtttgatttgcaatagatttttttttatccaactacctaaattagcccaataaaaaaagtgcaaaacgacgatttagaaggaaaatagtgaaagaccatgttgtcgataaattgtggcccacaaatttatggaataaaagcgaatgaaaattatacaaaagtatacataacaatcttttcgtagaagtgttcaggcaaa

SEQ ID NO: 605 - DNA, 1518 bp, Aedes aegypti
cctccggtaatgcccccaccggagcgacccggtcgactaaccaaccaactgcatttcctacttaaaacggtaatgaaggccgtctggaagcaccaattttcctggccgttccagcagccggtagatgcgaaaaagctgaatcttcccgattaccacaaaattatcaaacagccgatggatttgggaaccatcaaaaagcggttagagaacaactattactggactagtaaagagtctatccaagactttaatatcatgttctcaaattgttatgtgtataataaacccggcgaagatgttgtcgttatggcacaagcgttggagaaactatttctcaccaaggtgtcccttatgcctaaggaagaagtcgaaatggaagttccggcaacgaagggtgcaaagaaaaaaccagcacctcgacaacttgctcctcccggaaccctagtcggaagcgtgccgcctgctccggctgctgttgtgccacctccagcggcccctgctgcagctgcaacagttgcggcaagagcacggcctagctctgctcttggtagtgccgttacttcaagcgttccaccaacaactgcacccgcaacggctgccccggtagtgccaactgttccaccaattgtggcaacgaaaccggttcctccgaccacttcgccctacattgtgaatagttcacagtccggaattgaaacggtcttacctccccagcaacctgctaaagtcaaaaagggtgttaaaagaaaggccgatacaacgacacctaccgcaacagcctacgatccacactatggccccaatctggacatgagcaatcccaagatcgctactcgaagggagtccggacgacaggtaattagaaaggaaattccaccattcccggcatcaacgtaccctatttcgccatatcagggctcgggcgctgctcagaatccaccgaagacaaagagaagctttcggatgcgctcgtgcaatgaaattctgaaagagttgttttccaagaagcactctggttacgcgtggccattctacaagccggtggacgcggaactgctcggtctgcatgactatcatgatattatcaagaagccaatggatctgggcacggtgaaacgaaaaatggataatagggaatacaagtcagccaacgaatttgctgctgatgttaggcttatatttaccaattgctacaaatataaccctccagatcatgacgttgtcgcaatgggtcggaaactacaagatgtgtttgagatgcgtctggcaaatataccggatgagccggtaaacaatataacgcctaatcagagcaaggagacggactcctcgtcttctagcgaatcgaacgcaagtgaagacgattcggactcggacgaggaatgtaatcagaagttaaaaatgctagaaaagcaactgttcgaaatgcaggaacgcatgcgaaagctcgcagaggaagcactgttaaaaaagaaggccaagaaaaagatgaaggaaaagaagaaacaaatggcatct

SEQ ID NO: 606 - DNA, 1449 bp, Aedes aegypti
ggtggttgctgtggatcgacgaagaagcgaacgatcgtcggaggctgggcatgggcttggtggctggtaaccgatgtccaacggctctcgctggaagtgatgaccctgaatcctatgtgcgaaatggttgaaactgcccaaggtgtcccattaacggtgacaggtgttgcacagtgtaaaatcatgaaggtattttcacgctacgcagatttgctcatctactctgacaagaatgccatactcatgtatagtgcatccccattcttagtcgtgagcggcggtactaggccctgctccacgagtaaatctgatataaatctttcaatctactctcgccttacaggaactcttacagtcgaagaagtttacaaagatcgcgaccagttcgccgcactggtccgcgaagtcgccgctcctgacgttggtcgtatgggaatcgaaatcctctcgttcactatcaaggatgtctacgacgatgtacaatatctacaatcgttgggcaaagcgcaaactgccagcgtcaaacgggacgccgacgccggagttgctgaagctaacagggatgcgggaatacgagaagctgaatgcgaaaagagtgcgatggatgttaagtattcaaccgacaccaaaatcgaagacaatgctcgaatgtacaagctgcaaaaggccaatttcgaccaagaaatcaataccgcgaaagctgaatcacaactcgcctacgaactgcaagcggccaaaattcgtcagagaattcgtaacgaggaaattcaaatcgatatcgtggaacgtcgcaagcaaatcgaaatcgaaacccaggagatcaaccggaaggactgcgaactgtccgccacggtgaaactcccggcggaagccgaaagctaccgcgtccaaatgattgccgagggaaagcgtacgcaaacggttgagaatgcaaaggccgaagccgaacgaatcaagaagcttggggctgcagaagctcacgccatcgaaatgattggtaaggcggaagcagaacggatgcggatgaaggccaatgtatacaaacagtacggagacgccgccattatgaacattgtgctggagtccttgcctaagattgcggcagaagttgcggctccattggctaagaccgaagagatcgttctgatcggtggcaacgacaatactacgaacgacgtgacacgtcttgtcggccaacttccgccagcaatcaacgccctgacaggtgtggatctctccaaggtattaggtaaaataccaggggcaaaggcataataaacacacacctgtgctaaacgaccattgtgcagctaattgatcgttctagagtatatttccgattagatcacgtttaataaaaaaaaaaaaacaatgctcgaacaaaccagcagacatcatcgcaacatactgtaaaataccgatcaaacacaaataactgctatgaataac

SEQ ID NO: 607 - DNA, 1509 bp, Aedes aegypti
atggcatccaacgagaaggacaaggacaaagaacgagaaaaggacaaagataaggacaaggacaaaaatgcaataaacagcactcctggtgttagcggaaccagtgcgggtagctctggagttgccccttccggtggaagccgtggtagccagtcgcatagcacgcaagtcgttatgaatcaggatgcgccgaatattttagtttacaagaagatggaaggcatagtggagcgtatgcaaagtgaggaaggtggtgtctcggtgcgtacaatcaaagcattcatgagcaaagtaccgtccgtattcactggctctgatttgattgcgtggattatgaagaatcttaaaattgacgatgtagcggaagcgttgcacattgcacatctacttgcgtcccacgggtacctgtttccaatcgatgatcaccagctgacggtgaagaacgatgggacattctatcgttttcagacaccttacttttggccatcgaactgttgggaaccggagaacaccgactacgctgtctatctgtgcaaacgaaccatgcagaacaagacccgcttggaactagcggactacgaagcggaaaacttggccaaactacaaaagatgttttcgcgcaaatgggagtttattttcatgcaagcggaagcccaaagcaaggtggacaagaagcgtgataagctggaacgaaaagtgctcgattcccaggagcgcgcattttgggatgtacaccgtccgatgcccggttgtgtcaacaccaccgaggtagatattaagaaagcgtaccgccgtggtgcctccacgcacggctcaggctcatccggcgcggccgtcaatagcaatccaatcgagcaactcactagacaaattaagctcttgaaactcaagttagaacgtagaaccattaagatctccaaagtagccgaatcttatatatcatatttcgaacaatataacgaatacgattactttctcacaacacctgatcagccaaatccttggataacggacaatattgaaatgtgggacacagatcgaactgccaaagacgtatctcttaaacgtgtgaaacgatggggctttagcttacgagagctattgattgatcccgtaggacgagaacaattttccaagtttttggataaagagttcagcggagagaatttgaagttttgggaatcggtccagagcatgaaagctcaaccccaatcgaaggtgaaggaagctgcccatgcaatctatttggagttccttgctcccgatgcgccctgcccagtgaacgtcgattccaaatcgatggaattggccagggaagcggtgagcagctcggcacctccgaatcgatggtgtttcgatgtggctgctgcccacgtgtaccatttgatgaagagcgactcatattcgcggtatcttcggtccgacatgtacaaagagtatctcaatgggtccaaaaagaagaacaagtccataccaaatttcaaatcgaccgttttaaaatcaggttat

SEQ ID NO: 608 - DNA, 4696 bp, Aedes aegypti
cgcactcacacatcgacgattcggacgcatccacagtcagccagagcgcagaacgaacgcagaaagcagaaggaagaaaagatttttcaaaaagtttgttttcgacattcctccgcacaggcaaaagagaagctctggttttttaatccgtcgtgcgtgcgtgcgctaaagccagatcccaatccgcgagtgtttgtgaatcgagaggagtgaccgggtccgtacaatgcaacccgaatccagggaacatcttccagtctttctgtagaagcagctgcctttcgtttggtgtggtgtcttatattaacaaactacatttaccactgcatacaggcaaaagttcaagcaactaaaaacgtcgtcacacctattctctttgaatgcatttttatgtttcgttttgtgtcctgttaaaagtgaagttttacataaagttttcagtaagacggagttcaaaagctcaagaagtgtcctatcattatatggaaaagtgaagaaagtggatccgcctccagagaaagaatttgctttagtttcctatgcggtcacaatttaatggtgataaagaaaagcataaaatttatttattaatatgttcgtaaaataattggaatacgcgagtttcataggaaaatgtgacatatacccaaatcaaccaacaaggataacgaagattctaaagtgataactgtgaagatcgtgtagcgttaagtgttaaacagaagctaaaaaaaactaagttaatccaacttgaagcaaagtaacagcagcgtagcagtaataataaaataaaccatctgaaagagttgaagtgtaaatgcatgatatgtggtgaagcctttgcatacgaaatatgactcagtgcgttaagttgagaagaagcatttggtgcaaagccagagtgaacgacgcgagtgagaaaatcgaataacaacaaccaacacaaattacgtcaacgaagccaaaagatgcgtgtgatcaatttaaccgtctaacgattaagaaaaagtaaacaacgctctttccgtgggtcctgatccgggaagaagagaaccgaacaaaatccaaacgaaaaaatcggttgctgcaagcaccggtgacttcagcaagcacatacctatctattacttaagccggttgggcggtgtgtgacgaaagggaacgcatcatcagcagaagcaacaatgccacgcaacggtgaagcttccggcttggataagggtttcagcagcaaaccgacaccggactggctacatccggatcacgttataatgaacgaaggtgtcacgttcgatgtgcggtacataggatgtttagagatcaaagcttcaatgaaaacactagatttcaccacgcgatcccaagtagcgaaagagtgcataaaccgggtatgtgaagcggctagtttaaaatcctcaaagaagcggcgtgtcgacaaacgggtattgcagtgcatagcggacacaccgaacatgcaaaactccggtaccaacgtaacattgactgtgtctagtaaatacctctcgctagttagtgtagatacggcgatccactgtctagtcgcccagcacgatatgccccgaatatctttcgcctccggcggtgatacggacacgctggactttgtagcatacgtagcgaaggacacgtcggagtggcgggcgtgttacgtactggagtgtggaggtggagttgcgcaggacctgatagccacaatcggtcaagctttcgaactgcggtacaaagagttcttcaacaaaccggaaacgcagaacaaatttcgggagtttgtaaaaaccgacaaagagtactataacgatctaccggacaagatgcctcctgatttactgacagaaaacgaccattcctcgcagtcgcacagttcttccagtgtcagaacgcgagaaaggatatcgagtaacttaatagatctgaatacaccccttccaaatcacgattacgtgaacgacaaacattctaataccaattcgcacagcaataagtcggtatcttccagttcgattgtgaaagatgtttttgatatgcaaccgtttacaatctcatcagaaatccagaaatctcaactactgactgaatcgtggtaccacggcaacatcagtcgggcgcaaagcgagcatctcctgaagaacgatggggactttttggtgcgggaatcggccggcacgcccggtcaatatgttctgacgggaatgcagaacaatctacctaagcatctgttgctcatcgatccggaagggatagtacgaaccaaagatcgaatcttcgaaagcataagccatctgatcaactaccactggacgaactcgctgccgattatttccgccgaaagtgccctcctcttgaggcatccgattctgcgaacgacggaccttctgtcgaaggcgaaacaacaacagcaagctcaacagcagcaacatttggagctcaactgagggtgcgagtgccagtgctgttctcacgggggtcaatctccggagcgcagcacgctactggatcaacatcagcaacaggcctgctgcagcagcagtagtggtggcagttacaaaaaagggaaaaagtaaaccactgtaggaaaactatgtataaaacacaaactcaaagaactgtaaaatgaaaactctatagatcctatattttcttttcacttatactactatcgtatcgatcaaatgaaacaagggaataaggaaagcaacttctaaagttatttatgatctgatactggtgtagagtatgattctggcgggagagtgaaaatgtttggcatgaaacgtgaaaaaccaagagattaacaaaagattatctataaatacaaatatattcaaccgcaagcaggtgcatgaaatcagaaaaattaaaattactaggagttagtagatttcttctatgacgaacaaaaaataagcatacaactactattaccagaggtaaaaaagaacaaacaaaatataataattatatattgttatcaattccagtgctgttggttgataaaataacaaaaaaaaactacaaagaggacatatgaattccaactgggtaacagtatttattttttcgattgtcatattttactacaaccgggcagcggccgttttgaacaacgctaacgacaacacaaatcgtggttatcccggtttgtacaacgtcgtttgacataaaacaatttcgaaaaaaaaaaacgtttcaaaagctatcagttgctttgtatcaatcatatttgccatacatacgaaaataattagatttgatattttaaatgtactgaaataaattccaatcggggatcaacacagcggcttagggacaataggtcgaaagacaaaacgccgaaaagaattgaccagaacacgaaaattgtttgcttcggtgaaaactatcaaaacaaacaaacaattttctccgtttcgacgttttttctattcgacctcttgtattttgaccttcaatcctttcaaccttttgtcatagattcctatttctcgtcttattattggctttcttttgacataaggtcctatagtgttagcatagccccagtgtattagcgtttctagagctaaacttcagacttcaagctagaaataacagcttgacacatgttgtttttgatttggtttttgtatattgacttgaactgccataaatgaatcgtctatctctaaatctgtgattgtttttatttcaaataattttatgtcaaactacattgaacggaacgggcacaactatgcaaaattacataaatatatatacttacagtccaaataaacaaattacatacggacgaaaaaacgcaaaaataccttcttagattccatacagttacaaaacaataagcaaggacaacaaacaattacattcaactatccaactcgaatgaggttgcatttttttactttagcacaaactcttttcctgtgagtacgattaacaaaaagagcgcaagatttttgacgtaactaaattgtgactgtggtttcgacttgaatgcataaatgcgagaatcataacgaatgcggacatgtggcgatgaatctggtattcaaggcagtgaactagtatgactgatgtgcgcgagaaagtttatttatccgtcaaagtgctaataaaacatgtacagaaacaatagcaaatgaaggactaaacgaacaaaacaaactgtttccaattcaagattcaaccattcattattattaccaacgtattatttgataaacaaaatggatatctttgcacgttaccagatgtaatggcaaaatgcaaaacctaaatgagatgcaacatttatcaagttactatatgaaacaggaaagcaaacaaatgcttgaaataaatatttaaaacacagtttaactttacgtttgcttagagggtgttttgtttgtaccgtacagtgaatatcaatccttccgttgtagatgacagatgttatgttttaaagctagatgcatcggaatcaacagagatacgtctagtgcttttttagagaattcttgtagagttctttctgggattccttcggatttttccctagagattgctctaccaattcttccaacgatacttagaggaatttctccataattttgctacaggatatccttgagcacaccaacgctactatccgctaatcttctatataaataaaaaaggaatggtgtttgtatgtcac

SEQ ID NO: 609 - DNA, 3748 bp, Aedes aegypti
atgagttgtgaaaatgagggtgacgaacagaacgaggcctcatcgctgatcaacaactactccagcagttccacatctagtcttccacttgcgctggacagcaggtcgacctcgctcgaggcggtcggcccgacgggagcctcggctggtccaggtgctcccccgggttcagcggtccaatgttccaacacttcggccaacagttcgggtctgttcggttctcccggcggggccaatgtggccaatctgagcgcgtttggcggcggtggtccgacgatattgcccacggctcgcgaatgggtcgacagcgaggacgaaggcactgtcgagctagaagtcgactggagttccaacataccggcggacatactcgccagcctctgtgatgcggaaaagaaacgacaggaagtgataaatgaaatctaccaaaccgagcggaatcacgtgcggacgctgcggttactggagggcatcttcatgcggtccctacaggcggaaccctcgtgcaacgatctgctgcagctgttgtttccgccctcgttgcggaaactccaggagctgcacagcaccttcgagggctatctgaagcaacggcggatagagcacagcaacatcgtgcgggagacgggcgatctgctgctgttgatgttcgaaggtcaatccggcgaggacctgaaggagcacgctgcctatttttgcgcccggcagcagatcgccctggaagcgctcaaggagcggcgaaaaaaggacgacaagctgcagcagttgctgatcaaggccgaatcgcacaaggcctgccggcggttacagctgaaggacctgcttccgaccgtgctgcagcgactaaccaagtacccgctgctgttcgacaacctgtacaacttcacgatgcgcgtccagccggacaacgagcaggaggcgcaagccatccggaaggctctcgaatcctccaaacggatactggaacacgtcaacaaggcggtccggactgaggaggacaatcataagctaattaccattcaacgtaagttagaccgaagtgggttagataaggacgctcctagtgaatttaagaatatagacttaactgtacgtaaactgatccacgatggagcgttaacgatgaagaagaatccaggggtgcaattgcatggactgttgttcgaagatatgatggttttactacaaaaacaggatgacaaatacctactcaaataccactctagtcccggtctcggcggtagcgagagcaaaatcaccgagggccgcttcaatccgatcaccaaaaccagcctgatactggtgcggcaaagtgccgtcgacaagaacacgttcttcctgatcaacacgatcatgtcgcagatgctggagctgaccgcaccgagcagcaccgagtgcaaagcatggttccgacacatatcggaagcagccgacgcgtacaaattgcgtaaaggagcacacgactacagcgaggacacttccggtgtccacggtcagcagccaaaggatagcttcgaaacggtcaccgagacgcaaaagatcgaacagacctcgacgccgatcgatcggttagagcgcaaagacagcagccatcagtgtcgagccgtcagtaccagtggaggacctgtcggaagccatgcagggggacacgcaacggttcccaacagtcacgccagcgttggcggaggtggccttaacaacaatgaagattccctgcccaacaaaaaccatcaccgggcggcggcagtggacgagaacgatgacaacgtcgagaatgaggagaaggagttgatcaaacggcaaagtctgctggcggctcaagatgtgcccagcgatgacgaccggcccaaggacgaagcagacgaacagggtggtcaacagcagcggggtcgagggggagtcgtgaataacacgcgaaccctgacgcagcagtgttcgttggttgcccccggggagatccacgtcagtgtcagcaaaaaacttcgccgccttgacttggccatccggaagacgctggtcgagaagcagcgggtcgtatgtgatatgttcaaagtgccggatgagcacttcctggcgatcgcggacatcgccggtcagccggaagcgccccaaaaggaaccgaccgacatcattctggccgccttttcccacatccaatcgttgacggacgttctcaacgagcacatgcgggtcactcagagccaggagatctcggccgtctccacgtctgtctgtgatgagtgcaattgcaatgcgaatgggggtgttgccgttggaagcaatggtatgccgccgagttccggtgtcgggaccagtgccgggcaaccggaactcaatggcctctcggcgaccgatcccgccaatagcagtagtagtagtattagtagtagcggaaattctcagataaccactgtgggcgttccaccgattggggccattctgcagcagcagggcgatcaggtcagcataaccgaggacgaggacggctactgcgagattgatgaagttcgagctgcagccgtgctgttggaatctcaacgggaagctgaaaaactcaaaaaggcggaagcggaagctaaagcagctgcagcagcagctgcgactgcggattcctctgcaaccctggacgatagcggagggggacccaagtcgccggattcgcatatcgaaatcaatgataattatgatagtactcagaatcacctgcagcctaaattcatcggagtggatctgtgcgggaggaatcggctactgcatgcatcgtctctggtgccaaccgtaccgtgccatttaatagcgagctacgtgtctggtctgaacgcgcagatttcacagctattgccaaaaattagtgaacgagacttggaacgagaacaactgagacgggagaatcagcagttacgggaactactgaatgcaatgcatcaggagcgagttttagaaacacaggaaactacggaagcacccgtactgactgacccggaaccatcggcaccggaacaaccaccgcaacagcaggagccatcccttccacaaccgtcaccagccccacctccgccctcgtctgaagccgttatcgccgtcagcaatgtaaatgagtgaattttccgaaccctttcccccaaatcccgacatcaagaacgacatcatatcccttgcgcctgaacgtatgcaattgcgggcgcgaagcgctcgcagtgacccattccagatcagaaattttggcgagcaagcatcaaaaacaattgagcggtgatgctttcaacaagttatggacaaatgccttaacaacaatcacaattggcgttggtcgtagtaatcgtcatcttcgctgtagccgttgccatggcagcgtacgtaaacgtgtgttttcccaggttgcttgtagtggatttacggaaacgcacgcacgtaacacggtaaaaagatatcatgcaaaaaataatcaaaagatcacaagcaattttaccttctagtaggcaaaagaagagagcgaggcccagatcattggggattatgagaaaaattgattagaaaagtcggagaacgatgtaggatttagataggaaccgagtcgaatgagtacacgccggattaagtttaacttattacacaaagtcctccccaaaatgtatttttttagatcatcaatgttgtttatttgttctattttatttagctttttgtttataggcgattaaaatgataattaataaaaaaaaaaacggaacatgcgagataacaacat

SEQ ID NO: 610 - DNA, 198 bp, Aedes aegypti
atgtttgtgtcggaagaaaattcccaaattggccaccggattggcaccgtgcgcgacccgaattggttggtaatgaaagttcgaacggtggtgcgtccgttgccgtattgcgttagccgcgttcgaatggccaagggccggaaaaactgccaggattcgaaggttcccttgggccagacgaattttgctcgatgctag

SEQ ID NO: 611 - DNA, 4521 bp, Aedes aegypti
aaaatgacgccgcaaccgctagaacagggaggagccgtagccagcttcatcccgaccgggcaggaaatggcccagcgacagaatttgattccgctcgggcggctgatcgatttcattatccagaggacgtatcacgagctaacggtactggcggaattattaccccgtaaaaccgacatggagcggaagattgaaatctacaacttttccgccagtacccggcagctcttcatccggctcttggctttggtcaaatgggccaactccgcatccaaggtggacaaatcggccaaaatcatggcctttctggacaagcagtcgctgctgttcatggacacggccgacatgctgtcccggatggcccgcgaaacgttggtcaatgcccggctgccgaactttcacattccggcggcggtggagattcttaccaccggaacttactcccggttgccgtcgatcatccgggaaaggatcgtcccgccggatccgatcactacgctggagaagcgtcagaccttgcagcggctcaatcaggtcatccagcaccggttggtcacggggaatctgttgcctcagctgaggaagtttaagatcgagaacggacgggtgaccttcaaggtggatcatgaattcgaagtgtcgctaacggttatgggcgacggtccgaacatcccctggcgcttgctggacatcgacattctggtggaggacaaggaaaccggggacggaaaagccttggtccacaccctgcaggttaactacattcaccagttgattcaaggccggatcgtggacagcccggatgcattggccgaagtctacaattgcctgcattacttctgccaatcgctccagttggaagttctgtacacccaaacgctgcgtttgatgcgcgatcgactggatgatcacattcacgttgacgagtacattccgggaaccaagctgacggtgtcctactggcgagagttgaccaacaaagatcccaaatcggagctcggctatcgactgatgattcaaactgatcagagtgataccaccaaacagctggcgatcttgcaccttccctcgatcggtaccaaggaagtggacatcgccgatcgagccgttcgttccgagctgctctccatggagcgactgctcgttcacacggtttacgtacgatccttggcccgcctgggcgacctcaaaaccgaactgcaactcttcctcaaggatgtcgactacagcatccagggaacgccggcgatgctgctggttccggtcctgaacccctgcctacgagccgaacacatctatatcaccgtagatacccacaccggaatgctccggtgtcacgttccgaagcacctggactgcccgataatgccggagttgcagcacgcgctgaacaacgaccgcagtaagctgcagcacctgttctcggagttgcgctactggataacgcagcggcggtgcgagaagacgctgcagcatttgccggcgaccacgcaggagcggttgccgttggtcttcccggcggatcatccgatcgagaaaattggcccccatcgggtgtacattcagatgtgccggcatgcgaatgttatactgatcgtcgaactcaaagagaaggagtccagtcccaatgaaatgacctacacgttctacctggtgctggtgaagccatcctccatggaagacagccaatctgttacggctggcggaacttcgcaatcatcggccccttcggccgccgccacggaaagtgatggaatgccaaaaatgtacctcaaagtgttatcgttgatcgagttcgacaccttcgttgctacccatggacccggaacgtacgttgatgaacaaaccgttggatcgaaacgtaaactgcttaccggagaaggaccttcagctaagcaatccaagaccatctacccggcgtacttcatcccggagctagcgcacgttgtggccatgtgcgacgagaagctgccgttcgtggccctggccaaggacctgacgcgccgtaagattcctcacggcggcgtccaggtagaggccaatgcaacctccttggtgctgaagctgctgacgctgcctcaaccgaagcctccggtaattccggtgtcgagcagtgcagcagcagcggccgcagctcagtccggaccggatcagaaaccaccggaaccgaaggtggtcagcgttcccaagatcgacaaggacgtctggaatgcgctgctgaaacgtctgctctcggtgtcggttcgcgcccagatcaacaagagcatccagactcggatgtggacggtggagttggttttctatggaactccattagccagtgcgcatcataaagagcagggaatgcggcgtgcggtttacctgacgtacgacatgcttcccgtcgattcggttgacaagttcgttgacatgatactgaacgactggtccaagatcgtctatctgtatacattggttcatgacttccgcgagcagatcaagaacgacaagtacaacctgcacaacattgtgaccatcaagtcctacagctacacaagccttcttttggcttacggcccgaacaaggaggtgaacgtcaacatctactgggatacggaggccaaggagttcaaaatggtgtttaccggaggcaacaacgccatcaatgcacattctatgatgcgagatcagctgcaggctcacttgaaccacaactatgacctagcgcagattgtctatctgcttcacgagacctaccaaccactttcgtccattgccaaactaccgatcataccacacctggcgatcctgcaatctcccaagatccccgttctgtcgttctgcatcattccgcaatcacctaccctgttgagaatttccttccaaggagtgtactgtctcgaggtacgtctccgcggatccggactttgctcgatccgagacggcgcatacagccgcttcgatcgaagtcacgtcgttgaagagttcactccaacccaaggcctgaaaggcttcctgtccaagtacgtagacgaaacggccgtctaccgacgccgatcgcaatcagaagatgacaacccaccgtcccccatcaccatggaagacccccacggtggaccggcatccgttgggtccaccttcctcagtggcggagccatgcgtggccctcagagccctcgcgatccaggacttcgcttcgcggctcctctaacgccaccctcgggatctaacccacatactccggcctcaccgcatccccagggcatcggaggcagccagagtcatccgaactttaacatgacctccccaccggctccacatatgccacatccttcgcctagcggcggccttatgccatcgtcaccgctgaaccctcagcccagccccatggctgcacattccccgggaccaaccaacctaccgtacatgtccggccacaccgacagtccgttcagtgctcattcgccggcagcttccaactggccaggatcacctggcatgccaagaccttcgccccgaccgggacaaagcccggaccataaggcacagagtaggttcatggcggtttctacctctacagaacctccccaccacaacacatcgcgagtacttccggctcgatcgtgggccggcgccatacccaccctactgacgcacgaagctctggacacgctgtgtcgtgccacgatccacccacagaaggagatccctggaccggaactcagcccactggaacggttccttggatcggtgttcatgcgccggcagctacagcgaatcatccaccaagaagataatttgacggccatcacatccaacgagccgggcgtagtgctcttcaaggccgacaacctgcagtaccaggtgttcctgaatccgaaccacatgcagtcgctgcacatgaaggtcagccaagcgccgatggccccgaccatggacggtaagccaccgtaccagtggccaccggaagatctccaaatcctggagcagttcttcgatcaacgcgtggccgcaccaccataccgcccggccgtcgttaccagctttacccggatgctgaatctcccgtcgcaggtgatgaaggacttcatccagatcatgcgcctggatctgatccccgagctgggccagggcaacaagtggaacgtgcaattcattctccgtatgccaccgtcggcaacgccgatcgtccccgttggaaccaccaccatcctgtcccatcggcagaaaatcctcttcttcatccaaattacccgcgttccgtatctgccgaatatggagctgaaggactcggtcaccatgctgttgccgatggtttacgacatgaccgtgaaccacacccagctggcggaacgccgggaacaggtcatcccgcagcttaccagcgccgtcagcgctcatctgagacgtttcgtcgagtgcaccgtgcttcagccgggcgaatgctctctcttcccggccgtacgggatctgctcatgaacctaaccctgccgaacgaacaacccccgccagggcagatgggcaaccaggtaagttcctag

SEQ ID NO: 612 - DNA, 11792 bp, Aedes aegypti
tatcattgcatatgggcctttcgggtttaggtacgacgaacgacaaaacgtagaatcacaaaacgacacaaacacaaacacaaacgacgatttggaattcgacgtttcgtcaccaaaccgtctgttcgcattcgttctagtactgcgcactcaccgaagcgtcgctttggataagctgggataaagtgccgccgcgccgcaaaatgtgtcaaactcgcatcgcctgctcacttacagcatatgctgtcagttgtttgctggctgtctgctctcagaacaacctcggccatcgactgtagcagcagcaaaacgcgtgctgagggtgaaaaattttccatgcaaagctggaaaaaagcaagaggaaggtgaatttctattatcgtagacaaggataatgattagcggtgcacattgtgattgaatattcggtgaatcggcactcaaacggtggaaatcgattacgcggtgaacggcaaactcgtgttttggcccgcacgagttcaatattcacggctgagcaaagagaagttatcgggaagaagagtgttgaatcagtgaagcagaaggcaaagaagaaagaggaagaagaagaatcagtgtaaagcagcagcagaagtgtcgagtcgagttgaacgaaaagctcctcgctcgctgctctgctctgtgtggtgtgcaaagtgctaaaagtgtgaggaaggaaaaaattcacctttctgaacaggaggaaaattaacctgcaaacgaacggattttgtggattaaatagcaggatgtcgacgctgcacttcgtggtgcatccgctgcccggaacggaggatcaactaaatgacagaatccgtgaggtggcggacaaaatcaacaagtacggtgtccagacgctgccggcgcttcagtcgctcaaagtccctgtcaaacaaatcgtggtcggtccggcccatctcggtgtgctgctggaagatggacgtgcatttcgcgtagctttttcgatcattccggaacggttggatctgagcaaacaggatgcgaacaaggccagtggcaacgcaggtggcagtacggccagtcagtcgaacaacaactcgaagaattcacccgcctcgagacaatgccgatcccgggcccgaataatgcgcacgagcagttcggttcgcggcggcagcagttcacagggatccggatcgcgtagtaccggagtcatcatgggcggaggatcgtccggcagtcgatcgctcgtttcggtgccggctccgtttgtaccggaggaactggtgacgcaggcacaggtcgtgctgcaaggcaaaagccgaaatttgatcatcagagaactgcaacggacgaatcttgacgtgaacctggcggtgaacaatttactctcgcgtgatgacgaaggtggtgacgacacggaagagggcagtgataactacgtggcagaggatttgatctccctgctcgacggtgggttccacgccgacaacagtgtgatcatagatgcggaagcgatgttctcggaggatatgttcgggttctcgaacattagaaatcgtgcccgtagtgaacgaaatcagaacagctcgtcatcggctgctgctggcggtggaggaggaggaggaagcagtggcagtggcggcggaggaagtggctccggaggcggaggaggaggaagttcgggcaatggaggatctggagcggccggtggaagtggaagcggagttgatgtaggttccggccgcccaagtagtggtagttcggctggagtcggtggttccagcggaaatggagtcaatgtcgctggtagcagtgtgggcggatcagtcggcgtaggcagcggaagtggaggatctggtggcctaagtagcgccgaacgggaaggatttggccgttggcgtgataggcagtactttggaccgcgtcgatggttccagagtggccgtgaggacggctgggacaaggaaagtgatccaaaaaagaaagaatacggatccggctatcccctgtgggtgtcagatgagctagaaccatggccagagaaggatatgcccgtacgtttcaccgagattgcatcgctgtattccgagtttatcggtgtaaccagcaagggtgaactgcatcagtggcgctgggcagacgtagaaccgtatcgaagtacagaatccatcaacattttccatcccaaaacagttcccttgaacctattatacgagaaggtaattcacatctcagcaacttccattcgttgctcggtgtccactgagagcggtcgaatcgcaacttggatggatgaattgcttggctatgctggaagtaagctagaacacgtcgccaccagctatccggagtttgcactagacaaaatcgtatccttacatacgtgcaccttatacacggtagctagaacggaaagcggcgaactgttttggtggggcgttttgccctttggacaacgaaaacgcctctgggataaatataaagccaaggcgaaaaaaccggtacggcccagtgtaaatactccggaggtgactgtcggtgcgcaagtttgcatgaagaacagtcccatgtatcagcatggtgccattggatttacgatatcaaacggcgttccaaaggttggccaattgctcaacgccgcctgggatttgaccaatatctgccgcttcaagctcatatcgatgtctacgctttcgcaacagttgggattggtaaccggaacgagctccaatgctccgttgggaaatctggcaccgtgtgcagagaaagaaaagcctcagagttcgagcggtaccagttcctccaagcagagctcaggtggcagcaacaaggagacggccgaccggttggatatgcctccacctccgtcgccggcttcgagtacttgcagtgacactggcagcgtgagcaattcccacaaacgacagaagcgaatggctccgaaggacgattcggagacgaagaaggatgaggaacagtggttgctgaaggatgttatttttgtcgaagatgttcgctcggtccccatcggaagggtgttgaaagtggatggcgactatgctgcggttaagtttccgccgttgataccacctgcaagtgccagtggtgcctccggcagtaatagcaaagataagctggatgataccatcgaagcttggcaggactgccgattgttgcgcaaagacgacctgcaagtgatcaaatcggcgaccacttcccgagtaccggactgcttccagaagattcccagaaggatcgtactaaatccacatcttcctagtggtgagaccggttcgcagctgttgacaattgcggtcgattctaaaggaattcatgccatcatgagaaccggaagcaagctacactattgcttattcaacttgaacaccggacgccaggagcaggacagtattttcccaacggatattgcatctttcctgggatcctcgccgtcgaacgtttctttgacctgtgctggcgattgttcggatagtgtgttgctgctgcgagacggaaacaataccatctatcccatgtccaaggattgcgttgatgccataagagatcctacgtggttagacctgccacctatcaaatgtattgctgctgcttcgttgacgcttccttcggttggggtaaacttgaaatcacaagtatcacttgtagtcttggcccctgaacagcaactattaatgtccagaattctgcgatgtgacttggagggagtacgtcatgtacttggtcagttggaaggcgaattgaaaagtcagctggtatcgataatttcggaacacactgatggtaatagaaacatcgtacatgcctgcatcagtatgtgctcgccaacgtcgaataaagactctgatcatgatccgttggcacagggtggatctggaagtggttccaatggaaatggtggttcaggaggtagcctatctaattcagctgccttggagtgcatcaatgtcatcaccaacaccatgatgggcaatcgcccagtaagcattcgtgaaattatgcgtcgcagtgtgaatcgcgaaatggactcttccaactccaacagtgcccctcttccaccaggaagtgatgaagcacctggtggatcccttcctgtcgtctactggccaccggaatatgatgtagcaagcggagacgaagacagtatgagtggtttgaatgcctcacaatcacataaatctatgaacgaaacatacatctcagatcccaacgagcgtcgcgcaaatgctctccagatcgtacaactactgtgtgaaagtcccgttttgcagccatacctaaagcaactactgagtgcaaaagatgcccaaggccaaaccccgttcatgctggccgtgacatgtcgtgcctatcaggccggaatcattgtattcaacgccattctgaaaatcgcaaatggcgacgctgctgtgcgggattctatgatcttcccagcgggaagtgccccggatcaatcgccgttgggaattttgtgctgcaatgacacgtgttccttcacatggactggagcggatcacatcaaccaggacatcttcgaatgccgtacctgtggacttacgggttccctatgttgctgtacggaatgtgccaaggtatgccacaaaggccatgactgcaaactgaaacgtacttctccaacggcttattgcgattgctgggagaagtgcaaatgtaaggcgttgatcgcaggcaatcaaaccaaacgctacgaactactgtgtaaaattgccacagacaccgatttagtcacacgcttcaattctcgtggcgagtccattctcctgtttctgattcaaaccgtgggacgtcaaatggtcgagcaacgccagtaccgagccacttcgcgtgtgcgtaactcatccggaagtgctcggaaaactccttccctggacaccgagagtgatatgccggagcatgatctagaaccgcctcgtttcgcccggaaggcactggatcgcctattgaatgattggcctgcggtacgatcgatgatcatgaccggcgccgaattggagaaacccatagttccaaatgccaaccagcccttctatgacgatgataaccagcaggtgtatttgcagtcgcagagtggaaccactttgctagataagttcacccacagtttgatcgtgaggtgtagcaacgatccactggaaaaattgctcgtcacgctggtaaatgaactacaaaacgagaccatcccgggacggatagaggaagcacagaaggttgcaaggcgtttcgttcgttctgtagctcgagtgttcgtcatcttcagtatcgagcgcttccacaatccagaaaagtcgaggaattccaccacgcaggccaagcatctgcaggcgtatcgtcgtgtcttcaccacgctgttcaagtttgccattgaggaattgatcgagatatccgatgcgttgataacaccggttcgcttgggtgtggtcaaaccgacggcaccgttttcactgtcgtccagctctatcgatagtactgatgatcttttctcggtggaacctttggcgcctccgacaaatcgtaccgcaaatatcgttgatattggcggtggaagttcgcgtggtgatgtgattgaaagcgagcgcagctcaaattccggttttatgtctagaatcaatctacgtctgcgcgacattgaggacaacaacgatacagatgccatggcacaggatgacggagagacatccgagcaggaagagatgtccgaaagagaacaacctcctccgaggagaagttccagtattcgggccgtttcgaattcggtgcccatcaatgccagcgaagaagagtcgcaagatcccctacggaatgaagaggctgcccaaggcgagagtgatacggagtttaatttccatgaggccgagacggaatcggattcggacgataaccagagtacacaggatgcgcagcgtagcgttcaaacaggggccactgctgggtcggatacaggtcacgcgtggatgttcgaaaacgaagatgattccggtgattcgagccaaccggacgacgaaggatccgaagatggcgaaagcgacgatcactctcacgaagacttcagcttggcagatgaacagctggagcgtagacaaacgtccggaggaaatcagcgaactaatctggctccacagtcaatgcagtgggctatccgtagccgcgaaacaacgggtccggagcgagtccggctcactaccggtggttccaatctggtgttcatcgacccgaatgcgctccgtcgaacgacggcagccagtgctgcggtatccgctgcccaacagcaggaagctccaacaatgacgaccacggctagcgctttggcacgcgcttttggaatcgtgctcagacagatttccgatctgattggaatgctaccgacaagcttcgctggggcgtcgtcagctttggacgttacgcaccaggaggcgatccagttgcagatgtacgttgagaaacgactgaaacccacctgggattggattctgaccgtgatggaagccacggaagcacaacttcgcttcggagcctcgctcaccgactcaaccgatccgacgcatccgctgcaccctcttaatacgccaagcgcatcgtcttctagcaataacaatcccacttcgtccggaggggtgatgggagtacttggcagtagaaatcgtgccacaatcaccacgctaggcgcaaccaccgcgcgaagtctcggatttagcgacagcaccagtaacgagagaagctcgcgcgatggtggctcatcatcggacgccgcatcaagccgtcgcgatttcctgacctactgtttgtcgctgatgcgtgcccacaactcggaacatcgtgacttcttgcccgtgctggatgtgacggccttgcgccatgttgcgtacgttctcgatgccatcctgttctatatgcgtgcaaccaacgattgcgacattgatcgcactaccacgggatcgaacgtttgggacgaccaggacgaaaacgaaaatgaagacaccgaagaggacatttccacctcgattgtgatggataccgattcggtggatgacgatctgatgcgaccatctcttgggcgtcgtcactcgttcttccagagatccgattcaacgctctgcctcggatgtccggcaccggatccgttcaacacacctctggcggaagctctgcctttggccgatcaaccacatctattgcaaccaaacgctcgacgagaagaattgttcggcatgccaaaacgcccaataaccctaccgctaaattctcaacaaccaggtgaatccaacgtcaatctggaggtaccaccggtcagattgagtttgtcatcgacaaatcgaagtgacagtacaagctcttctgctggtggttccacttcatcttcaggcaatgttgaaacggtcgcaatggaaatctaccaggacgaaacttcgcaagagaataaaccatctggctctggcaatacggttgagatttccattccggtcagcatctatcaggattccaagcagcacaaaacgacgatcgtagtcaacgagaaaggcgaagcaatttcacccatcaaggagattaccgttggttccgattcagaaccaaaagctggtccttcgggtgagcagtctcaatcgccgaagcctccaccaccgcccccaccgatcgcttccgggtccggttcatctggtgacaattactacaagaaaaaccgactgttctacatcaagaacaaatacaacgaagagtctgacgtagaggtcgatgaggaccatgatgaactatccgaatcggattccgaagacgcaccccagttgatggtgaagcgtcaaaagatcgacgaaggagccatgaatgacgacggcacgctggttgtaggccaacaggacgcatctgcttcgtcgattcgcccgccgataatcgtgaccagaaggaaggtgtccatcgaagcgacccaacaaggtgccagcggaagtggttccgacggatcggcagctatcattacggcccaaggaggcgcttcatccagtggatctctgaccgatcagcagggtacaattacgtcgtttatgacgtataccacgtccggaaaccaggtcactgtgtcaacgggatccgcagccagtggttcacccggaaagagcgttatcgtacgagctggaccctcttcgtcgttttcgccatccgcaagcaccagcgctgcagaggtaatccagcatgccgaagcgatggatctgcaggagatttccgctcacgtaacggttgaaacaactccaaacgtccaacagacggtgcaaccggaactaccgcctcgtggaatctatctccgttccggtaacagtcagggtccgctaaattcctcgatcctatcggacatcctgctgggacgttggcgtttgtcgttgattttgttcggaagagtgtttctggaggacgtaggcgtcgagccgggcagtgttatctacgaattgaacggatttcccgtgaaagaggctaagtttagacgttatatggagaagctgcgaaattctcaacagaaggatctcacgttgtccaaaatggagcgcaatagggcagctttgttgacgcagacattcaaagaactgaacacccattacaacaaccgaaggcttcaatcgccactggcgttctcacgggtgaaagttacgttcaaagatgaaccaggagaaggttctggcgtggcaagaagtttctacacatcgatagcggaagctctgttagcgaacgaaaagttgccaaacctggacgcggcacaaaccggttcagcgaagtacacatcggttccgttcaacaccatgatgcagcgcagtcgtggcactagcagtagcggaggaggaagtagcgcatccggtgctggaggaagtagtagtaacagcagggattcgaacgttcgacgaggactttccagcaaacaacctctatggagaccgaatcgtgaatctcgcaaaacgctcaattacgatgcgagacctttccgaccagcaagcgaacaaggacaaggttctgcgggtagtggtggagttggaggcaatagcagtccaccatttttgcacatcaacgatagtttaccggctcatcaacagcaactaggcgaacgattatatcctaaggttcaggctctttatcagaataacgctcccaagattactggaatgctgttagatctcccggcaactcaaatcctaatgctgttggcatctgaggaaagcctcagacagaaagctaacgaggcgttagaaatgatcttaagccggcaacgactagaaatagataatctcagcgtgggtggctcgtcttcttcggcgacgactggcggtagctccgttgatcaacaagctggtagcagttctggatactcaagtgctggtttgtcgaaaaagagcggtccggtgctgatcctggaagattgccaattagacgctccactgttctactcgcccggaaagcgtggattctacagcccccgacaaggatacccatcgagtgaacgactgaacgcatttagaaatgtcggcagattgattggactgtgcttactgcaaaacgagctattcccactgttcctgcaacgacacgtgctgaaacacattctcggccgccacatccgcttccacgatttggctttcttcgatccggtcgtttacgattcgctccgtcaactggtcaaggattcgcacaccaagagcggtatcagcattctgcagagcttggaactgaactttgttatcgatcttatcccggaggaaggttccggttcggtggagattgtgcccggaggccgagacattcaggtgaacgaaaccaatgtgttcgattacgttcggaagtacgccgagtatcgtatgatcaagacgcaggagaaggcattggatgctatccggtcgggtgtgttcgatgtgctaccggatacggcactggatcaactgacggctgaggatctgcggctgctgttgaatggcgtcggcgatattcacgttggtacactgatctcatacacttcgttcaatgatgaatcgaacgaaagcagcgataagttgttgaagttcaaacgatggctctggagcgtcgtggaaaagatgagcaacctggagcggcaagatttggtctacttctggaccggttcgcctgccctaccggcctccgaggatggcttccaaccgatgccatcggtaacgatcagacccgctgacgacgcccatctcccaacggcaaacacctgcatctcccgactgtacatccccctctactcgagcaaggcggtcctccggcataagctgctactggcgataaaaacgaaaaatttcggattcgtttagatggttgccatcccccgcacatcattaagagaaaggagactaacaacacccgacaacaactagcctgtaccaaattctgatttggaccagtgatataaaaagaagagatactatatagccaaccaatatcgcaaccaagcgaaaatccctaagaagtgtgcacgcacgatcaatgaaattgacgaacggagctgtatttctgtatacaacttttcattccacttcttttgtatgtaaatagatatattcggttgattggcgtttgattttcaaattataaaaatctgttttattgaaactccgctttgcagttgcgatttctcgtgtaaaataaaaaaaaaactaaaaaagcaaagatacaccctcggtgatttatatataattaacacgatactcggagacggtgagagaaaagggcgaagcagttttaccaaccttgtggaaacaagcataaaaaacagtaataatacacgcgttcacttagttgtgtctgacaccttcaatccttaccgtggagaagcagaggagaatgaaagctactcaatgatgtgtcgcgttttaatgtgattgaatcatttatatattcgatataaatgcatctttaagtaaatttatatatatttatcatatacaaggatacacaattactactagtactatactaccactattctaagagcaaagatctttatcaaaaaatcaccgctaaccgcaggcagatatcgtatagatagagttagattcagttctaatgttaaattagcaatcaaattcagcagagatcaacagcaaagagagcgtgctgatatatacacctagggaagcagagaagaaaccgaagtagctggcgtgcgtatttccaggagtgctttgccattgggccaagtgagcacagtgctccaaaaattatgccgatagcgttgaaacagctactacccgatcgtaggaccaatttatgttgttatcattctgattgatcgttctttctattaagtttacaatagagcaaaacctttttcgtttagtaatttatatcatgctattattattatcatctttatgagtcttcattaattgttaaaaaactttcggttcttttatatcttctttttttcgttttgcacgcaaatcaaccagcaaaccgagtaatcagcatcctcttctgaatagatgaaaagatgtccaaactgtaacaccacagcttgatatgctgcagtagcacactaacgacacatcatgcagtctatgtacctaccacagaagcagcaaaaatcaccggaaaatgataataataatcaaatggaacacacctcctgtctgttcacatacacacccgcgcactgtactagatggtgttttatcgaaaatgatatcaaactgttacaactcaaaaatactacaataagccaactgaactattaattcgtaatttcaaagaaatacattttaaacacatgtaaaaagttg

SEQ ID NO: 613 - DNA, 1927 bp, Aedes aegypti
atgttcgatcaattgaaaaagaaggtgtaccgtcgtcagcagaagcttgagcaggcaaagctggacgccagtaaacaggctgccagtccggacgatttggacgatcttagcccgatgccacagacgacggctcccccggtgcgaagacgcggaggcatttcggccgaaccggtcagcgaggaggatgccaccagctacgtgaagaaggtcgttccgaaggactacaaaaccatggcggccctgtcgaaggccatcgccaagaacgtgctgtttgcccacctggacgagaacgaacggtcggacattttcgatgccatgtttccgtgcaccttcctgccgggcgaatcgatcatacagcagggcgacgagggcgacaatttctatgtgatcgatatcggcgaagtagaggtattcgtcaacaatgagttggtaacgacaatcagcgagggcggcagcttcggcgagttggccttgatctatggaaccccgcgagctgccacggttcgtgccaaaaccgacgtcaaactgtggggtatcgaccgggacagctaccggcgcattctgatgggttccaccatccggaagcggaagatgtacgaagagttcctgtcgcgggtgtcgattttggagagcttagacaaatgggaacgactcaccgtggccgatgcgttagaaccagtttcattcgaagacggagaaacgattgtgaggcagggcgagcccggaaacgatttctacatcattgtggaaggatgtgccacagtcaggcaaaagcgtgatgagaacgaagaacccgccgaagtgggccgtctcggtccgagcgattactttggagagatcgccctgctgctggatcgcccacgtgccgccaccgtcatcgcccggggtccgctcaagtgcgtcaaactggaccgggcccggtttgagcgggtgctcggcctatgcgcggacattctcaaacgaaacatcacccagtacaacagcttcgtttcgctatcggtctaaatttcgggaaaaaaaaagagcagtgctgaatatgaatgaagaaatacacacacatcaccttaaacgaatggcaaaaaagaagagccaatgggaagaaatagaaactctggtcaagcgaacacaaattatttttcagaatccagaaaggttttttttgcgtttatcaatagaagtgtagtttgtagcggaaaaccatattttttttatatttacaaacgaagatagaatgcaagtcctgaaggcacgttgattgaataaaagctctgaaagctgttattcagcaaacaatgctttttgtgaataaaaaaatattaatttcaacatgaaatacgtttttattaggtgagggcaggccttgcaattctttccattacatagacacaaaactttacttaattttctgtttagattttaatgaaaaaatcgattagcacattttgacatttaattgcagattacggattagtaattctctaatattataacgatacaatttaatgttcttagtaactaattagaacacatcatcgacgagccgaagaaaacagaaaggtgcatgtgtgataagggagattttttctagctatcgtatcattcaaacatacacaccgaaatacattgacaaaaagatgaaaaatttgttctactaaataaagcatatacgaggaaacgccgccgagtcgctataccaaacaatagcaaggttattctattctcatcgtgaaacattcttagtgtaataaaatacggtctgcttgggaagaacgaaaaaaaaacttcacgccattgaaggaagaaaagtagaaggaagcaaagaaaggaaggaaaaattattaacaaatcaaagttgcagcatgtaacaagaagcagaagtacaggcaaaaccaattaaaaatgataatatccttcagctaaacgtgac

SEQ ID NO: 614 - DNA, 3627 bp, Aedes aegypti
gcggttcactttggctttcaattgattttgttctttcgcggtgtcaagtaccttttctctctcaagaaaatttcaaagaaagtgtctcagttttttcaagtgttttttcctcgtcaagaaaagtttctccaagcaagcagtttgattccacacagcagaccaaaagaatcccaaagcaaaaatggcttatcgaaacaataaccgtcgcaacaacggaggtggtggcaatttcggcaacaactacggtgctggccgaatcaatccttgggacacgggtgtgggcgggggccgtggcaataataatgacgccctcacactggccaacagtctgatcaataatttactccgcaatcaaaactccaaccaggtgccgccgtcgctcctcgatggcgtccaatcgtcccgattcgatgatatgaatggattcaacttcatacggaatgactatatttcaaggttaaaccttggatatcaaagacgaaatccaattcagtctagtaataataataataaaaataagaacagcagcaacaagcagggagcaaataagaaaggcaactcaagcaatgctggaaacaacaagcagtcgaagacgtcgccctacgccgatgtctcgaacgagtacctgtactgtcacatgtgcgacaagcacatgtacgatgcgacctctttcgagaatcacatcaccggtcgtacccatcgggtcatgaaggaaagcatcgaggagagctaccgcatgcgggcaaccttgctgcggcaggaagctcgcatcgccgaacagttgaagacaatcgagatcgaccggctgaagcgtatgggcaaggccaagaactactccaagatgcgcgagtactgcccgatgtgcgagttgttcttctacggacacatcatcgcccatcgtcggtccgagaagcatctggacctgaagaagttcttgcacccgaagtgtgacgaatgcgaactggagttccacaaccgcaccgagtacgatgaccatttgctgtctgtggttcacatgaagaattgcaaaactaaaccaagccgacttgacatcgaaaagaaagcaaaacaattggttatctccactgctaatgatgaattgctagacattcgtgaagaaacggccccgaaaaataagaagaaggacaaagatgctgcctcttcggcagcgaaaaaaaccgaacaaagcaaagcttcggcaactgcgaccgaatctacggaaaatggcgaggccgccaaggattcggaagcagctgccgagaagcccgccacggaggagggagctgcggacgccaagatggaggaagatgtcccggaggatgaagttgtcaaggatgaagagagcgaagattgcattctcgactacaagcctggtgatgaaatcgctccggaaatcgacaacaagctgccacggtacaagaagaaccgtgcgcttggtgtgagcctgatcggcaagctcgaatgccacgagtgccgtatctgcttcaagtatttcgacaacgaagccaccggggaaatccatgcccgcacgcactcccattaccgtgcattcattcgcttcctgaacgagaaggcccaggaggtgcgtatcgctcagaagcgtgccgccgtcgcactggaagaggctgaagccgccaagaagcagaagctggctgccgaggagaagaaatcggagaacggcgatgctgacaagaaggattcagagctctacgacccatcggaggctactggtgaagaatcggctgatgccagcatggccgacgacagcaagagcgaagaggctaacggcgaatctcagtcagagccaatggagacggagaacgctgaggcgaataagggcgactcgtccgccgctgcggacgacaaatccaccgcctcctctggtgatgccagcaaggccgacgaagccgccaaggaggatggtaaaccggagaaggagggtgacaaaactcccgccaagagccgacggggacgcgctggacgttccggacgctacggtggacgttactaaaacatcccagaaaaaaaagtttaaactcagattcaacaccattttcagcttttgaaaaatgatcttaaaaggaaagttttttgtgcaaatcaataaaagttttcagagagatgttctggaatcgaacgacaagttttaaatactgcaattaaagtcacacaaaaccacaagacactttcaaatattcttctactttttatctatccaacactactatttcacgataatgatcgtaaagacgcaaggcaaatacagcatgtgtattcttacaatgattttaacagtaaaaactatttgtgtttttttgtgtttagtcacattattatcttttgtcgtgtatgattctagattgggtgaagcacccgtaaggcgtactacctaatgtccgcagtagtttcaacattattttattaccaagctgtaacgcaaagtaaggaagaatgatatgcatacattaatataaacatccaaaaagaacacgttcgtaagaaaatctggaaaaataatcaccatattcagattaaacaatatttctaataaatgtgcactcgaaagcttctgtgtcgtctaggctttctattaccaagcgtgcacgcacaacataaatggctcgtgcaaaattttaatgcaaatgattcaacatgtcctcgatactccagaaagacgagtgcacattcttacgtatttattagtattttatggataattgtgttaactgccaagcagttgatctaacaactagacggcaagaaacatatttaacgaaacaagaagtataatatattctctgaaatgtaagcaaaggaaatcatgtttatcataaaacactaaattctcggtatcgttaagtaatccaactaaaacaaaaatgaaaaagaaaaatgtaattgtatttcaccaaaaaatgtagtagcattgttgtgaggagagttgaaacctctgcagtaaaaaaaataattgcttctctttgtgtagttacagcaaaaaccaaaaaacaaaaaacacataaaatattgtgcatcaaatttaatgagtttttctctgcaatgttctaacaagagagaattaatttgtatctttggataatccagttaaaaagcagaccgcttagctagaccgatttgagacactctcgatgcacttatgcgtagcttcagtcgaaacctatcctgggtgccacccgaatgttgtatgatggaaagaaaagaagccttttggtctgctgtagctgagttagctgacaccacgctgcatgccaatgttcgtagcattcgattcgttcacctaatgaaactaaatgaagaattttgtggaatgaagatgtttgagattcagagaaaaattagttagtagcagcatgcatctgtcaatgcatcccgtaacaaaaaaaacctaaatattgcgagttaaaaaaatattccagtgtaatattcataacaaacagaacaaattaaacaaatgaaaatacacgcgtcatcaccaataaaattgaaagcatccatggaaaacaaacacaagcaaaaaaaacaggtaccgatgtaattgagcattattgtaataccgagattgatcttctagtgattgactaaaataaaaccaagcaaaaatctgagttt

SEQ ID NO: 615 - DNA, 1780 bp, Aedes aegypti
atgtcgaagaataagattgcgagttccaaactcgaaagcgaccacatcgagataaagtcaaagttcgacgccgaattccggagatggtccctaaaacggtccgagcagcacaacttcgaggcgttccagtcgctgattgaacggttgcacaaactggaccgatcgcagctgctggtgtcctacatagatccgcgagataacgatctgctgccgattaacaatgacgacaactttggacgagctctgaccacggcccggccgctccttcgcgttatcatccagcggaaaggagacagcatagaagaaataaccggatacggaaccattaggccacggaatcttatcagcagcatcctcggacaaacccctgtgaaatcaaaaagtttagctatttctaatccacatgattttcgacaagtatccgcaatcattgatgttgatattgtaccggaaacttgcagacgagtccgtttacttaaacatggcagtgacaaacctcttggattctatattcgtgatggtacatcagtacgcgttactgcgaacgggctagagaagcaaccaggtatattcatttcccgcttagttcccggtggtttggcggaaagcaccggcttgctagcagtgaacgatgaagtccttgaggtgaatggtatcgaagttaatggcaaaacgctggatcaggtcactgacatgatggttgccaatagctccaaccttatcatcacggtgaaacctgctaaccaaagaacgttggcccctccgaggcgtggatctttctcacgcaacagtcaactgtccggcggttcacaccaatcacaccacacaacgggatcggaggaaaatgatcaagatgatcaggatgaaattcgagatcttactggtgcggcgacacttgaagaaaacgcattaattacgcaaaaagatggggtgcttcatttgtgagtgacttggcagtaattgataagcgagtaacttaaatttaaccagcaccacaacataccttttagaggtgccttcccacaccagcctccacagaaatgtataaaacagcacactattgtgcgtcaattgtgactcaaatatttagacgtctttttagactatgtgtaccaacttatagataactgctaacagtatttcagaattcattccgttcgtttatgttgtctgcatttagattatgaaaaacaagtttatattgtctgttaggaaaatacagtatatgcatttgggaaaatcccaggcctgaaaaaaaacttttattgttctacttgttgcttttgtccattgtgctattcgacttatttggaattttgtttgtgtttaactatcggtacactttttttctcgtaacatatattttaccacgatcttaatctgtacttaaaaaatggtcaaattctcaattgttgcgggagtaattcttatcatttcaggtgttatcttcacttatttgttactatgattataattcgttattattgaaaaaaatcaatccattcccaaaagtgctcaatgtaataacgcgcatcaaaattttgaaaacatacagacatgaagtagagactagtgcctttagagtatgactattaggaaacaaaattctcaaaagtgcacctttttataattggaagtctttattagtaatcaaaaatgcctttctatacaaaagtgattaaagaatcagaaaattaaaaaaaaatagcagatataaaaagacatcaataagatattccaagaacagtgcaagtatcaaaatataatgataagaagttat

SEQ ID NO: 616 - DNA, 1742 bp, Aedes aegypti
caccgagattgcttgataggtatctgtctcgcgttgtttcctcgttcgttcgatttcccattgctgctctcctatttatccacgtggttgctgctcgttggtttccactgggactggaaacaacagcaataacatcaccacgacgaataaacgccggtttcatcgactcaatctttcatcattaatttagttgattttattagctttgtgtgtgctgggtaattgaatcggttacgcatttctgatcgctgcgattgttcgattggatgtggatgtttattattgagtgtttctatcggtttcgagaacaggacagtaaaatgtaccattttagatgctattgttgcggatatatttgttacatgacttgatcggatggttgtgtccagtatcaaatttgagcggaatatgacgtcgagcaacgcgatgttcctggcatcgactgtgcacatctggcgatggacaccgaggaaggtgtcgaagttgtatggaacgaagtacagttttccgagaggaagaatttcaaatctcaagaagaaaaaatacaacaagtattcgaaaacctaacacagttagagcatccaaatatagtcaaatttcatcgttattggacggatacccataacgataagcctagggtaatatttataacggaatatatgtcctctgggtcccttaagcagtttctcaagcgtaccaagaaaaacgtgaagaaactaccactgcaagcatggaagcggtggtgtactcaaattttatctgcacttagttatttgcattcctgttcgccgccagtaattcacggcaacttaacctgtgatacaatatttattcaacataatggtctagttaaaattggtagtgtagctccagatgccattcatcatcatgtaaaaacatgtagagaaaatatgaaaaatatgcattttttagcaccagagtatggatcactcgcaacgacgaccgccatcgatatcttctcgtttggcatctgtgcgctggagatggcagcactggaaatccaagggaacggagattcgggtacgctagtcacggaagagcaaatcaaacgcactgtcgagagtcttgaggatgcccagcagaaagacttcatcatcaagtgcctcagtcatgaccctgccaaaaggcctaccgctagagaattactatttcacccgctgctgttcgaggtgcacccgctcaaactgctcgccgcgcactgtctggtgaatacctcatgtgagtcccctgctacagcaaactacgacgagatgctgcaaaagctgaacaaaccggacatggtatacgccgaagtgttgcagaccgagtatcacctgggctatgtgatcggcacggagaagctggaaaagttcgtagaggatgtgaaatatggcatttatccgctgactgccttttcggcacaaaaaccacccgcttcccgaccacgagcaatatcgcccgagactgcagaatcggtgaaatccgaaacgccagagccgctagatattgaaactaggagagttgtgaatatgatatgtagcgttaagccgggagaggataattgtgtattatttatgacaatactattaaggatggaggataagatgaaccgacagttaacatgtcccatctcgccggacgattctgccgtcgcgctttcgcatgaactagtacatttaggatttattcatgaaacggatcgtgaaaaactagctacaatgatagaggatacgcttaggagt

SEQ ID NO: 617 - DNA, 2153 bp, Aedes aegypti
atgaatcttcgcaagtttcagtccataaatctttgctcctgtagacgcacaattacttaactatttgaagtgcaagcggtcaacagtgaagttgtataacattctccggttcttcgattctatggtgaaagttagttcctacctaacgacctcgtgtttgtgcttttctcttgaaaaattgagggaacatccgatgcaacatgactcacaaccgtcgtgcaacatacaacatgctgctgaggagcagcgaaaaccgctccgtaccgttctgtaactgcgagtatccggccgtgacacggtcacgacatacggccaggaaaatcgaacgctgccgatgtggcgaggatacctctacgcggctcgattggacctgggatgtcgactgtggccatccggacacgaaaatcacaaacgggacggagatcgtgttccatcccgtgtacagccaagggacggccgtcatacgggggacacagcctctgcagcaagggatgcaccactattgggaaatcaaaatcctgagtcagctagctggaacggatattatgctcggaattggaacggacaaggtagatctcctggcacatcgtttcaaattcgctagttgtctgggactggacgaccaatcatggggctattcgtaccgtgggctgacccaacacaacaatcagctgaaatactacggcaagaaattcagtcagggtcgcattattggcgtttacgtcgacatgttccgtggagtcctcgagttctatttgaaccggcggtcgcaaggtcgtgcctactcaaacattcctcgcgacagcaaaggatgcatttacccgatggtctgttcaacatcggctaaatcatcaatcaaactcatcaatgcggcatcattcaaggatagtctgatattccactgcatgagagttatctctaagtatcccaaattgctagagcaagtgcaggcaatcccagggttgcgacggcacgcggatgatttgtggtttctccaattgcgggaaccgaaaaagcccgatgaatttcaacgcaacaaccttctgttagaagatgaggctttgctgtgcggaatgaagaaaaagaaattcaatgaaatagtttcgcagagtcaagcacaagctccgccagaaaatatttcggaggatcagatctatgaaaacatgattaccgaagaggatacaaagaaacaaccacttaatggcactcgaaccataagcactagtagcagcagtgaagacgaagagttggcgtggatgatctccagagagttcttctgtaaccattgagtcgaagcatttataagcaaattaataattccaaaatatgactgatttaaaacgctttgatcggcagttgtagacttaagtagttttcgaacaatataaggattaagaatctgtctgtgccatttacattgataaacgcttataatatgctacatggtttattttcgtttaagtgtaactgttacatacaatttgtgtaccaagcgcccaattttcgagatatacaaacatgtaagagtaaatatcctgcgaacaagatacagcgtgaatgtgttctctacatatcaccaaatatgtatccaaccaaactatgtatacctaagttaaaataaagatattaaataattagataaatgtttcaatatcttagctccgccgttttttttacggatttcattagcagttcttctaaacattcaggaactaccaaggattttggcttaagatacttaattcacagaagagaggatcaataaagagaaatcgatcatgtaactttcacctttattctaacaaacgcttaaaattatctcaatttttgaaaactcttgaaaaaaaaaatgaatgactattgatttaaaagttacagatagaattaattttggcaagaaatacaccaagacaaaaagttatgtaaaaaaactcgatgaataaatcaagcgtgtgctagaattaaggaatgtaacataatcaatttctcttcatcgatcctctcttctgcgaataaaagtgacaacatgcaaaactgctggcttaaaatgcttaaaatgctagattgtttcgctgactagcttaagtatgttaaaccagatgatgatgttgtcaacatggcgatggtttttgaagaaatttgtttcaaatgtt

SEQ ID NO: 618 - DNA, 2871 bp, Aedes aegypti
gatgtgactgatgtcaaaagtgaaaaattttcgagagtcggctgcaaacgaaatctggatcgaaaattgtggaatgcattgaacgccagaaacgaagtaaataccgctgtcgcgtttgtaattgccggaagtacgttgtgcagtgtggattaaccgcggaaaacgcgaactgtgcgtgcgaaagtggcgaacagattttccctttgacgaaagacgggaggattaggtggccccgatagacggaggagagaaagagagtgagtgtgactgacaatcatccgacgaatataaaaaaaaaatcttccagccacaaaaagaagtgtttttgataacggagcggagggcttctgtttgaagtaggaaagaaagcaacacagaaggaatattgttctccgacaatgtccggattcgacgataacccgttcggcgagccaatagtcgataatccgtttgcggacccttcgattcaggcagctacccgcaacagcaccaatccccaacagacactggacgattatgacccgttctcaaacgaagcgcaacagcagcgaacacagaacaactttggccaacctgccaccctgcagccctcgtcacaaaccgttccggcgtacagtccgagtgcggcgcagtacaacaataatggagcgcccggtgccagcagtccctcagcgatgacacagatttccactgctgaattgcagcggcgccaagatgagctggaaaagaaggcccaggaactggaacgtcgggaggccgaactgatgaacagtgccaacgccagtcggccgaacaattggcctccgttgccgtcgttctgtccggtgcagccgtgcttctatcacgacatcaacatcgacatcccgaccgagttccagaagatcgtccagaacctgtactacctgtggatgttctacgctctggtcatggtggtcaacatcctcggtgggttggtgttgttgattcatgacggggaattccgcacgtttggattgggcatcttctacgcggtgctcttcactccggcatcgttcttgtgttggtaccgcccggcgtacaaggcgttcaagaacgactccagcttcaacttcatgatgttcttcttcatatttttctttcaaacgttggtcaccatcatccagaccattggttttcctgggtccggtacgtgcggtgttattacggctatctcgcagtttagcgctggcggtattggaattttggtcggtatcttcatattggctatcgctttcgggtatggctcgtgcgctgctggcaacgtttttatgttgagcaagatccacgccatctaccgcagtggttccgagacgaaccgaatcacgatggacaaagctcgccaggagttccagtccggctttttcgggaatcaaatcgtgcgggatgcggcggccggtgcggcgagggctaccgtgcaatcgcagttcaaccagaacaggtactgaaattcaatcccaaatacaaaacaagcaaacaaacactacaaaaaaacatacaaactattactactattatatttacgaagcattacccactttcgagtttaccgtttatttatatttaaaatctattacatactggcgtgtagtcatgacccagaacggctgttgacctggttttctactctccttactacctttgcgatcactacttgatcccctcacaacccgattcttcccgttgattctacgttctttctatagtgttcccgtttcctctgtccgcttcaaagtatccatgccctacttacttcactttttttttctattttaaaaattatctgaacgaaagtagtttctgtttcttgttttgctccgttgtgggactcgtttcgtcccataaacgctttatcgattaagtatggtctgttccaatttgagattcgatttatcatgcttgagtttttgagtttaaatgaccactcgacgatgaatcataatcattgagaataaggaagaaaattgttagacgctagaaagcatggaaagcagggctaaataaattgtgagaacaaacattcaaaaaaaccctaaattaaacctttatcacgttaaatggataagctagtaactgctaagcataaatcaaaaaaacaaaccaacacacttcagtgatcattcaaaatgattagacttaacttttaaacttaccacacagagactaaaagaaccttcttgcgcgatatggtatgcgacatagacttcggtagcgataactgaaagtgaactgtaggagagctagatttgtttttctgatagtcatgagttgagaagttagacatgataagttaaagagaaaggcactgcttcgttgtttattgcctacttaataattattgaataaaagataatgatcaactctgaaaaagaagcacgtttttgatcgtcctttttgaattagttgttagtcaaagcgaagaaaaggatatccgtctcattcgccttcggttgatgtaagaagtgaatacaaaattagtgagagaagtacacattaactcaatttacattaaattaacaagcatataaatgtcagtgccctgttggtttttcgtttttcgtacttcacttcaggaagactgactctacttttccaattcgaggcggtttctatagaatgatttaattttatactaaaaaggggtacaaaatgggcgcacccatacttaagcttttgtaggtcggttcatgaaaagctcgattaactttgtgagaaatgagaattccagtttttgcgtttgttaaacgattcgcgtatctagatttttatatttttggcaatggcaatatttttgcgatacgaacagcacggtccatacccagatgtaacaaataacacattaccgtaaacgtacca

SEQ ID NO: 619 - DNA, 3358 bp, Aedes aegypti
gtataacttattattgcgcgtgtagatattcatgaaattttggttattactagttcagagttcatcacaatctgtaatgtggttatcgagatggcttccacgtaagaagtgcttcgacagaaaaacattatcgcagtcgtggaaaatccaggcgatcgcgaaaaagtggtaaaatcgttcatggagacggcgagctggcagcggaaacatgcgcaatccaaacttttccattcgggacgtggccaaaaaggtcaattctatcgtctggtttatccagcagacaatgtagtgtagtcttcaaggtgaggaaggcgcttaaccgaaccgataaacagaatatgatggccaaatcccatgcccatcgtgatgaacgacaagaactacattaaagtggacgccaagcagttcccggcctggaatttttcgtcgtaaagtcccgcctggatgtttcgaagaagttctgggagaggaaagtcgacaaatttgaatctgggtgaaatcaaggctcttgagaatgccataacatagcacatggcttcgaattttataccaaatcccagtccaaaacacataagcatcacgcacaccactgtaagactagcgtcgtttgagtatgttttgatcctccaagtacataacacagatgttctgacagatgattgtcaaagggaagaaagaagaagtcaaaaagagccgaaaatctcatcctctcgacgacatgctcgtcgcccttttcatttgtgtgtgactcattcattcacgagtagcacgcagtttcggacagtcgcaaaatttattccttcgactgaaataagtgcatccttctttttggaagaaaaaggaagaggaaaaaaatgtcacctacagtgtgtcgctgaatcagttcataatacagagaaaaaaaatgtaaaatcaacgcccatcgcgcgagctagccgattaatgtatctcacgagcaaaaggttggacgtgaaactgttcctatggggcctgtttctgctgcagatattcctaatatcggtcttcctggcgttcgggtccctgctggccgccagcagctcgatccagcaggatgaccaatcgcccggagctcggaaccgatcgcagccccggtcggcggcctggttcgacgtgaaattcgtcaacaatcagagctcttccgaatctccgtcgcaaaccgcggccatcgagggacggcagaaagtggtgggcggaggacatatcagacacccacgattccggccgcttcagctgaagaccatcgccaagccggacgattacaccaagtattataggcccatccactatcacgatggctaccgagagcacacccatctgtgctttatcgagggaacccatttcccgacagcgaaaccaaaaaagaaaacacctcccacggcaccgggacggcaacccgtgggacctatcaccaatgagactgacttcgaagcaggagagttagatgtagtagtagtaacagaaggaacggaagacgaggaagataatgacatggacaatgaagtcctagtggacgggcgctgtcgctgtcggccggaatggcacggtccagattgtggcctgccggaagtgctctggcgtgcgttcattgcctctcgtatcccaccgaggaatcaaacggcagcaccgcggaaggtgccgaagaatgtgttctacattatcgacgccaacttcatcagtgtggaactgctggagattcagatcatggaactgctggatgtggtgagtttgttcgtgctgtgcgatcggcagctgccggtcgccgatggagtgaagagtgagacctatacgataggaccgcatgtgatgagtactgattttttgaaggcaaacctagacaagattctcctgttggaggatccaacgtgtagcggaaggaacgttttccgaaaaatgaaaaagttcgtccgcaaaagtgatatgcatgtggaagacgtgctgctgtacagccaaacggatgagattctgaatcgaagggcagtgaactacttccggtggtacgacaactggccgcatccggtacggttccgactgaagtataccgtctttggcttcttctggcagcatccgaagagcaccttcatcggaggggccgcctgtcaattaagtactgtggacgaagctttccgatccgacccggaagccctgctaaggatcgaaaagccggtgatgctaattggtgatctgaatcattatggcggttggtactgccagcactgctaccaactgatagatatagtaaaatatttagagtttataaccttagtcaatactaatactagcgctagcatcattagagccaaccaatcgtcatcgtatcttcccgatccgaaaaagagtaccgttatgaatgtggaatacattcagaatctcattgccagcggaaagtatttcgatgacaaaaccattctcactaagctgcagcgccacgtggacaagtactatgcgccagagtatgtgcacaaaaacagctggcggttcgataacatcgtcatcaatctgtttgcccgctgggaagatagcgtcatcgatgacgagtactttagttagacgcaccacaatcatctcaacactcattcagcgcatcatcataccaacataatcaacacaacaatcgatactcttcctatcataatcagccaaagtttggaaatagccaatttagaaacttgaacaaaaattaaacagccaaaattactcaacaaaacctctcattataccgtactctcatcccaaacatctcaactgactcatagaagcgagcttgatatgaaatgcatcaaaaggcatcgcctaaaccccaatgaaaaaaaaaaaacgaatatgaaacactagatagctaccaaaaacaaaattttgcctgaaaagaaccagaatcaatactctgattttctgaattgaatataatcgggaaattatttctagtcgttcgaaaacttaaaaaagaaaatgaaatactatttaaattgaaattcctacgtaacaccatatgatagcactctgtcatggagataagagttactggatcgaagcgaaagcggatgaaggaaatgtgaatgtgaaacaaaaaaaatcgtaaatgccacaatacccaacaaacgtcgatgacacccagaagtatgtatacctgataaattgcatagttactaacaccattattgattcgattgaattataacgaactagagtaaatttggaacggactatcgttttacttaattcggaaaaaatataggtacactgtagtaacgcgcattttgtgattcatttgcttcctttgtaggtttaactttaattttaataataaacgtattttgtgtcatgttgattctttcaggaa

SEQ ID NO: 620 - DNA, 1059 bp, Aedes aegypti
atgccggagatacaagtgttgcaaccttcgtcagccgcattacagccggtcccggtgccggccgtagttaacagatcgagtagcggccctagcagtgccaccggtaacaacaacaacaacaacaatatctccgcgaagaaaccgacatcggaagtagatcaactgccgctctttgccgacgacgagaagaaatccagcaaaatccaagaactacggaaactgatcgaaaactgtgatgatttcgtacgccggagtgatgatttgtttttggtgcgattcctgcagtgctgtgactggaacgttgatgacgcttatcaacgtatgatcaaactgttcaaattgaagcacgacaacccagattggttcgtcgacaaaccactgcatcactacaaggaactccttaacaacaacataaagttcgttctggacaagcgagacaaaaaagggcgccggatattcgtcagcaagatgggcaacatggacattaacaaattttccgcaacggatctggctcacctggacgaactgtggtgcgagttcatgctgaacgacttggaaacgcagaagaatggaatctcctgtctgatcgatatgagtggctattcccttaagagtctccgatatctgacgccaaccaacattcgaatcggaacacagaaagccgatttgatgccggtgaagcacatggagttccacgtggtgaactcgtcggccttcatgaacgcagccgtcgccattctgtatccgatgttgagcaaacagatcaaggattcggtacatttccactactcgaattgggactcactgcatgcccatatggggaaggacgtacttccggcggagtacggtggcacgaatggggaaaagttcgatcacgacatgctgaacaagcaattgctggacttggagcaccattacgacgggttgattcgcttcgggtacgagctgaagccgcacgtggatccgagcaagtatgcgaaattcttccactacgtagaaaagaccaaaggtaataagcgaaggtacaaatccaagagggacgagaatgttgaaatgtga

SEQ ID NO: 621 - DNA, 1486 bp, Aedes aegypti
atgcttacactaacagtcgtgattgccaaggcattttcgcaactttccggaatggttaagcaaggtccacgtccgctcgtaatctgcggcccgtccgggtccggcaagagcaccctgctgaagaagctgttcaaggaattccccgaaacgtttggattcagcgtgtcgcacaccacccgaaagccaagacccggagaggagaacggcgtgcactatcactttgtctctgtggaagaaatgcaggccgccatcgaaaacggagagttcatcgaaactgccgtttttagtgggaacatgtatggcacgagtaaaaaagcagtggaaaatgtgcaacaacagggtaaggtgtgcgtgttggacatcgaaatcgaaggagtcaaacaggtgcgcaattccgatcggttaaacccgctgctggtgtttgtcaatcctccctcggtggcggaactcgagcgcagacttcgcggtcgtcagactgagacagaggagagcttacagaagcgtctgaatacggcgcgggttgaaattgagtatggttccactccgggcaacttcgacatcgtggtccacaataacaacttgaagcaagcgtacgccgatctgcgggacttcatcgtccgggagctggaaacccaacagaatcaagacaacttcttcatatcttccataatcacaggatataaaggctatgaagtgtaaacgcctcattagcccttccttcaaattgcccctcgagaaatgggggcggatggcacgtgcactccaaggacgtcaatccctataatttatgccaatattgcttttcgtgtaacacacattcatgtacacacccacaaaaccctttacatgccccctatttagctctttagtggacgtagaattctgagaactaagatagtgatcaaacctgcactgatgaactactgtcaaacactgcttcgaacgtgaaagcacttggagtatctgcaagggcaaagtacgaagatagttaagattacgaagcttagttgctttcgttgtaattcttaatttgaggttttgtacgccccacttgtacgctttttaatgtgctattctaccccactatcactattaatgtaacggtgaagcttttatttgtaaaccaaatgacgaaacaatacaccgaaggaaagcagttagtattacggaacctgacgccaaggacaaaattccaaccgccgtggttgtttacctgtcaatctgatatgtcatattatcattaggttttacttttccgatgaattttttgtaccactttacacaattataatactatagaatgcaaacatattcaaattgatccgatctagttttaagtgttgtaggtcgtagaaatgaatgtcgtcgtcttcgttgttctgtagcaacgagatgaaaaggatacaaatccagtctgaaagcatgattattgatatgagttaaatgaaataaatgattatatgcttctagataatgttagacaatg

SEQ ID NO: 622 - DNA, 3125 bp, Aedes aegypti
gcctaaactattttgcaagacaaatgtaggatatcagatttcatgactgattgcataattgcatgacccattacctttggacaaatttgtaacaaatttttgacagttccaaattcgacttcagtgtcaactacaggtccagctaccctcagcgacaaccggctccgaccgtatgttctacatcgctccacgacagtagtacaacaaccacagagcgcatacattttaatatcttctctacttcgcttctctcgcgctgtgtccagctttttcttgttgcctgcggcttgcctcatgattctcgggttttactacaacggcattagttttgtgcgaaaactgaacttgaagtgtgtggttgactgtgccggacgactccgattgcggtgcccaaatgctacgccgtgattgttatatgatgttagtttgacagtggaatttctccagccagaaaattagggatctagtgctcttatttttttgttttgtttcgtctgtgaatgtgatatatcttcatgaagagagaataaaacgtgaacaaaaaaaatacgcaagtgctctggtcgaaatcatcgtacaaaacgacggacgacagtcagtgcaacagtaggcgataggaaggagaagaggcagtcgctgcgacggcgacggcagtcggcagtgttttgctttttatcagcggtgcctccccaaaacaaccggaagtgagcaacgagaaaaatgtcttccaaaaacgaactgaaaaaactttccgaggaaagtttaacccgccagccggaagaggtcttcgacatcatctgcaaactaggtgagggaagctatgggtcggtctacaaggcgcttcacaaagagagcgagcaggttctcgccatcaagcaggtcccggtggacactgacctgcaggagatcatcaaggaaatctccatcatgcagcagtgcgactcgccatacgtggtcaagtattacggaagctactttaagaacaccgatctctggattgtgatggagtactgcggagcgggtagcgtgtccgacatcatgcggttgcgaaaaaagacactgtccgaagacgagattgccacgatcctgatcgacacgctgaaggggctggagtacctgcacctgaggaggaagatccatcgggacatcaaggccggtaacattctgctgaactcggagggtcacgccaagctggccgactttggggtggccggacaactgacggacacgatggccaaacgtaacactgtgatcgggacgcccttctggatggccccggaggtgatagaggagatcgggtacgactgcgtggcggacatctggtcgttgggtatcacggccttggagatggccgaggggaagcctccgtacggggacatccatccgatgcgagccatcttcatgataccgaccaaaccgccgccatcgttccgagacccggacatctggagtccggagtttatagactttgtcagtttgtgcctagtcaagaatccggaggaacgggcaaccgccacggatttgctgacgcatgagttcatcgggaacgccaaaccttgtagcatactcagccagatgatagcggaagcgaaggaaattagggaaaatcagagctatcggcacgcggcggcaatcagtcaggccaaccggcagctgcagaataacaataataataaccacaatcacgagggagattcggacgaggacgatgtcaactcgagaacgatgcgagagttcccggaagactgtggaacgctggtgccgggtcgggacgatggtgacggtacgatgatagcgcatacggactgcggtacgctcgttccggacagtgcgacgatggtggaactgcagtcgaatctaggcacaatggtgatcaactccgactcggaggaatcgacaatgaaaaggcacgacaccaatccggacaaacccaagtaccgcccgctgttcctggaccacttcgacaagaaggaagcggaagcggccaacttcgtgaccaaatcgaacaatcagcaaagttacgacgatgatagctcttcgccggaagatcaggacgcgtccccgcagcgaccacaacctcaggtgcaaactccgagtaagcaacagcagcccacggctccgcctctaacgcagagcctcgatgagcagcagctgaacgaggagcggcagcgatttcaatcgcacttgcagttgcagctcaatcagatatctgccgttagccccaatatgcatcagcagcagcagccgccacaacaggtgcagtaccagcagtccccagtggctgtaactcccgatgggggagggggaggtggtggcggtggaggaggcggaggcgggatggaagctcacaatcgcatttacaacaataggatcaatttgattgatagcgaatatgattcgttgaaattcctcaactacgaacagctcgagcagcggttggccagcatcgacaaggagatggagaaggaactagcggaaacgaacaaacgctaccacgccaagcggaagcccatcatcgacgcgatcgaggccaaacagcagaagcgacagcaaaagcacgaggaattctgagtttttccatctgcagcggggcatagttttgggcttctaacgcccgcagagatgcgcgaagtaaaagtgctataaagaatcccacttgtagagaaaacagaaactatagtaataggaatcaaatgcaaagacgtcattttaggaacctacactgatgtcggtttagttgaaaattgattatttttaagcgataaaaaaacaactttagtgagcattcaccgaatcaaaccattgattgtcgttcgttttcatgctgagatttttgccacgagcgaaagcaaaaaaaaaactcagatgcatctaggaattcaagcaaattttagttttcttgcatttgaaattgtttatttatgcagaagctccgcgacacagaaggacgacttcccgactgcctgcaagcctgaaacggagcggaatcattttagcgaaaaaaaaaactaattaagtgctattttaaaaatggtgaagcaaagtatagatcattcgaatttatgaactaatatctattaaatttgtattactttgaacaacagcaacaagaaaaaaaaaacaaa

SEQ ID NO: 623 - DNA, 6024 bp, Aedes aegypti
atgaaaagaaattcattcaatgcggcggtatactatccaccggaaatcattcgcaaaccgtcgaaccaaggcgtccgggttggcggagtggcaacgtttttctgcggggccagaggtgatccacagccaaacatagtgtggaggaaaaatggaaagaaaataatgggtacccaatctcgctactcggtcatcgaatctaatggtgtttccatgctgcggatcgaacctgtacgtgccggccgtgacgatgccccgtacgaatgtatggcggaaaatggcgtcggagatgcagtatccgccgaagctacattaaccgtctacgaaccggacaaaacgccatcgggtttcccggtcatcactcagagccccacgacgcgagtaattgaaattggccacacggccgtaatgcaatgcaaggcaaccggaacgccgctgccgaagatctactggatcaaggacatgaaacgtgtcgacatgaccaatccccgctacagcatcaacagcgaaggaagcctccaaatagacaacagcgaagaaagtgacatggggcggtacgagtgcgtggcagaaaactccgtcggtacggaacacaccaagcaaacaaacctctatgtgaaagttcgacgtgtgccacccaccttttcccggccaccggagcccatctacgaggtgatgttgggaggaaacctgacgttaacctgtgtggcggtaggatctccgatgcctctcgtcaaatggcgccaaggaattgatcaggatctaacaccggagaccgacgtcccggttgggcgcaacgttctggagctgagcaacattagacacagtgccaattatacctgtatcgcatcttctacgctcggggttatcgatgccaccaccctggtgaaggtgcaatctctccccgcagcaccaactgacgtgacaatatcggaagttaccgcaacacaggtgcgcctagagtggtcgtacaagggaccggaagatctccaatactatgtaatccagtacaaaccgaagaacgccaatcaggcgttcagcgaaatcagtggtatcattacaatgttttacgttgtgcgaacgctgagtccatacacggagtatgagttctatgtgattgctgtgaacaatatcggtagagggccgccctcgtcgccagctacgtgcactaccggagagacagagatggaaagtgcaccgaggaacattcaagtgcgcccgttaagttcatcgacaatggttatcacttgggagccacctgagacgcctaatggacaagtgactggctacaaagtgtactacactacaaaccccagccaacaggaagcatcctgggagtcgcagatggtggacaacagcgagctaacgaccatctcggaactaacgccgcacgcaatctacaccatccgggtgcaggcgttcacttcgatgggggccggtccaatgtccaacccggtacaggtcaaaacgcagcaaggcgttccctcccaaccgagcaacttccgcgctaccgatattggcgaaacagctgtcactctccagtggtcccggccgacccactccggcgagaacatcgtacactacgagctgtactggaatgacacctatgcaaacgagcagcatcatcagcgaatccccaacaccgaaacgtacacgttgagcagtctctacccggacaccctttactacttctggttggcggctcgatcgcagcgtggtgaaggagctaccactccaccaatacccgttcgaaccaagcaatacgtacctggtgcaccaccacgtaatataacagttgaagccaccagtccgacgacgatcaacgtttcctggctgcccccgccagtggagcgttcgaacggtgccatcgtgtactataaagtgtttttcgtcgaggacggccgctccgatggggacgccaccgtaacaaccctcaactccaccagcatcgtgctggacgaactaaaacgctggaccgattacaagatctgggtactggccgggacaagcgtgggcgatggaccccggtcctacccggtcactgttagaacccacgaagacgtgcccggagagccacaggacgtgctagcagtcccagtcaattctaccaccatcaaagttacatggaagcctccgaaggagaaaaaccgcaacggcattatccggggttatcacattcatgtccaggagatgcgcgacgagggccgaggactgctgaatgagccgatgaaattcgacgtggtggatgcgatggagtataacgtcactgccctgcagccggatactaaatattccgtccaggtggctgccttgactcggaaaggcgatggagatagaagtactccaattacggttaaaacgccaggtggcgttcctgtcaggcccactgttaacctgaaggttttagagcgtgatccaacggtgtccattgaactggaatgggaacggccaaagcaaacgtatggtgaattgcgtggtttccgtgttaaatggggcgttcgagagcatcctttacaggaagagccaatcctgaatgaaaatactttaacaaaacgaatcaacgatctggagcgaggtgtagagtacgaattcagagtagccggtatgaatcacattggtatcggacaagagacgatcaagtattatcaaacgccggaaggaacaccaaccggcccgcctacagatatcgttgtaagattccagacccccgatgtggtctgtattacttgggaacccccaacaagagagcatagaaacgggcagataactcggtatgatgttcagttccacaagaagattgaccacggattaggtacggatagaaatacaacgatgcgaaaagctgtgttcacaaatctcgaagaaagtactgaatatattgttagaattagagcatacaccaagcaaggggctggtccatacagcgagaagaaaatcatttccacggaacgggatatgggtcgtgctcctctatcagtgcaagctgtggccacttctgagcaaactgtcgaagtttggtgggagcctgtgccgtctcgcggtaaacttgtgggatacaagatattctacaccatgactgccgtcgaagaccttgacgaatggcaaacgaaagttgtcggagttaccgaatcggcagatctcctgaatctagagaaattcgcacagtatgccatagcaatcgctgcattgtacaaaaccgggcctggaagactcagtgagaaagtaactgtgaaagttaagcctgaagatgttccgctaaacctcagagcccacgacgtaagcacacactccatgacccttaactgggctccaccaatccggttgaaccccacgaactacaaaatttccttcgatgccgttaaagagtttgtcgactctcaaggtatacctcaaaagcaagtcctaccgaaacgcgaaattgttctgaaaagtcatagcgttcaacataccatctcagacctgtcgccttttacgacatattttgtcaatgtcagcgcaattccaaccgattattcctataaaccacctacaaaaatcacagtcacaactcaaatggcagccccacaaccgatggtccaaccggacttttatggcgttgtaaatggtgaagaaattcaggtcattctgccacaagcttcggaagaatacggaccaatatcgcattactacttgatcgttgttccagaagacaaatccaaccttcacaaacatccggatcaattccttacagaagatttactcccgagcaagactcgatccgaacgactcaatgcaccgtacatagcagctatgttcctgcaaaggaacatcccatacacattccaccttggatctggcgaaaccaatcacaattttaccaacaaaaagcttgaacgcggaaaaagataccgaatctttgtccgagccgttgtagacactcctcagaagcatctgtacacatcgagtcctttctccgagttccttgctctagacatgaaggaagctccaacaggagaaccgccacatcgaccgaatcccaacgtgccgcaagatccggaaattctcatccggggtaaaagtgaagaacctggaatgatttgggtcgttggacctattatcgctgcactcgttctgtccttccttttagtaatcatttactttgttaagagacgccggcagccgtataaaacacccgaccaagctgcagtaactcgcccactcatggctgccgatttgggagcgggtccagctcctaccgatccggtcgacatgcgacgtctcaacttccaaactcctggaatgatcagccatccgcctataccgatctcggaactagccaaccacgtagagcgcttgaaggcaaacgataatctcaaattttcacaagaatacgaaagcatcgaaccgggacaacagttcacctgggatcactcaaacatggaagtcaacaaacccaaaaaccgatacgcaaatgtaacatcgtatgaccatagcagagtgatcctgcaaccgatcgagggcgtgcccggatcggattacatcaatgccaactactgcgatggctacagaaagcacaatgcctacgttgccacgcaaggacccctacaagaaacgtttggcgacttctggcgaatgtgttgggagttgaaatcatctaccatagtcatgatgactcgattggaggaacggtcccgcattaaatgtgacatgtattggccggcacgtggcaccgaagtttatggcgtcatgacggtgacaatcacggaaactcaggaattagctacttacagcataaggacgttccaaatttgccgtagtggaagcaatgagcgacgagagatcaagcaactccaattcactgcatggccagatcatggcgtaccggatcatccggctccattcttgcagttcttgaaacgcaccaaggtactcacaccaccggattcgggacctatcatcgtacactgttcggcgggtgttggaagaactgggtgctacattgtgattgactcaatgctggaacgcatgcgtcatgaaaagatgatcgacatttacggccacgtgacctgtttgcgagcgcagcgtaactatatggtgcaaaccgaggatcaatatatcttcatccacgatgcgctattggaagcggtcatctgcggtagcacagaggttcccgctagaagtctccacaatcacatacaaaaacttatgcaaaccgagccaggagagaacatcaccggaatggaaatggagttcaaaaagttatcaaacgttaaggccgactcgtctcgcttcgtgacggcgaacttgccctgcaacaagcacaagaaccgactggttcacatactgccatatgaagcatctcgggtctgtttgacaccaatacgtggagttgaaggtagcgactacatcaatgccagttttgtcgatggctatcgataccggaacgcgtacattgctgcacagggaccgcttcaggaaaccgcggaagacttctggcgaatgttgtgggagcacaattctacgattgtcgtgatgttaacaaagctcaaagaaatgggaagggaaaaatgtttccaatactggccccacgaacgttcggtccggtatcaatgctacgtggttgatcccattgctgagtacaacatgccccagtacaaactgcgcgagttcaaagtgaccgatgcacgggatggatcgtcgcgcacggttcgccagttccagttcatcgactggcccgagcaaggagtgccaaaatcgggcgaaggcttcatcgactttatcggtcaagtgcacaaaacgaaggagcaattcggccaggatggtcccatcacggtgcactgcagtgccggcgtcggacggaccggcgtgttcatctcgctcagtatagtgctagagcgaatgcagtacgaaggggtgctggacgtgttccagacggtgcggatactgcgatcgcagcggccagctatggtgcaaacggaggatcaataccaattttgttaccgtgctgctcttgaatacctgggctcattcgaccactatgccaactaa

SEQ ID NO: 624 - DNA, 4059 bp, Aedes aegypti
gacagtcttcattgttctccactggaccgggcctacaaaagcatagcactagcacactatccggagcacgtggcgtggaacccgttcgatgcacatgggatctgtatgctttccctaccacagggcttgcggtttcgtacgcagaaacacaatatagagccacggtttcacgcgtttgccaccacccgagaggacggcaagcggtgctacgggttcagcttggtgttctacgaagaagttcgcagccgggatatttgcaatgccatgcacacgctccaatcgatgttcatcacggagctttccacttcgcaacaacctcccccgggaactctgcgacgggtcaaggaaaatcccgtcagtcgatccttgccgcgacagtttaagatagccgcacaagcccacacgtctgcacttagctattatgatattaccaaggataaactgtttgttgcgaaaagcatttcgctcgtctgtcaggtgccgtacgctcacgttgctgagctatttcttaggaatctctacaagtgtcttccccgccaccccggtgctcggctcagcctggagagctacgtgtacaacatcctgtacgaagtgtccactcctccgccagggaagtccatacgtatatacataccgccggatgaccctcatctacctcccatagcgacaatcttgcaacgacctgccctaaaagatgaactaccctttatggatttcccgctgagactgttgttcacttacctgagcgtggactgcgtcatccagctgttcacctgtgtgctcctcgaaaaccaagtactcctccgatcttccgactaccagaagctcaccataatagcagaatgcataacatcgctgctatttcccttccaatggcaacacgtttacgcaccgatcctccccgcttctctccatcacttcttggacgccccagttccattcgtgatgggcctacattccgattccgacaacagcatccgcatcggaagtgaagccaatctctgctacgtagacgtagacaaaaaatcagtacagctcccagaagagttgccggcctttcctcatcggcacgacttcatcgcagaaatcacggccgttctcgacaagtatcaagtacctcgggatcgctccctggacccgccctccattcttagtccaaagaatctcctcaaagaccacgatatgatgacaacgagctgcacgctaccatcgggaatgcacgtccgacgaaagcactcactgcacgacgttctggactgggaccgaccaaactctccggacatgccacttccaccgacggccgttcccgcccggccggacgtccgtcaacgaatcgtggatattgtacggcgcagcggaggcgacgaagtcgattccggtaccaacgaagtcatgcccagcgccaagcagaagcaacccctcaacaccctggaacagtactacgaagatctgagactgaacaactcggtccgggagattttcctcaaccggttcgtgcagatgtttgccgcgtacgagcactttgtgattctaccgaaccaggaccgagacgaatggcttagcaaccgcgaatctcttcacaacttcgataaggcgtccttcctgtccgatcaaccgcagcatcatcggccgtttctgtcgcagttcctcgagagtcagatgttcgtcacgttgatcgacaacaagatcatgctctccctgaacggggacgtggagtacaacttgaagctgttcgacaatcgtatcaaaattctaaggaaacgctacggtggcgaaagtatgatccgcacggcaaactacgaaccgtgcattttggccagggaaacccagaagcagctggataagcgactgggcagcgtagacatggaggtggcacccccaagtgagatcctggacaaacgaccgccgtactaccggagctttccggtgctggagaagggcgtactgaaccaggagtgcgcttccaggggtagcagcctcagacgggtcaagaacggatccaagtggaaggtgaaggaaatatccttggatggcggtggcggtggaggaagcggaaacaaggagaacgatggcggcaacaagtccaaccgaaactcggcaaaccttaccgggacggagatcagcccggctctgatggctcaggcgaattgggcttttgtggaaaaactgctgaaggactgcaaaagcaaaaccaaacggatgttgctggagaagatgggaacggaagcgatcgaactgggactcagtggagaggcgtccgtaaccggagtcgaggagaatacgatgatcgcttcgctgtgtgacctgatggaaaaggtttggtcccatggggtagtgaacaaacagggaaaatcggccctatgggctcatctgacggcgtatttggacatcaaggataagactcagggcaagcagatggggaacaactatttatcgccgggtaacataacaaacaatggtaaatccactaagtttaccattagtcccatcattgtcacacccagcaattctagtaaagatctatcggctctggccattgaaccagaacttcactcgtcaccaacccgaggccgctccaagtctcgggatcgcaaaagtctgggacctgagcagctacgtccgctacctgaatctctggaatttgatattaggaatatccaagccatgacggatatcaagacccacattgggtacgcccgtgcctgggtacgattggcactggagaagaaactgctttcacggcatcttcgttcgctgctcaccgatacggcactgttgaggcagctctacaagcgatctgccttcgtacgtagcgacgatgaagttgaacaattcctctaccacctgttgacactgaatgcggtagactacttttgctttaccaacacctatcctacgaccattttgccgtatcgggttgtgatattcccttcgaaaaagggtagcgctgctaccacttcggccaacgtgtggattgctatctccggaacgctgggcgaaacacagcagattagtgtgccgcgacattcattggaatttgtgtttcatcacaaaacccttggtatactaacatctttgcgaatcggccatgacgacactggaatgtcatccaaatggctggttgaacacgtagtcatcagaaacgaagttaccggacacacctacaaattcccttgcggtcgatggttgggtcgaggcatcgacgatggctccatcgaaagactactgattggacaactggtacctcgaaccgtggatagcgaagagcttgtggaagcctgtcgtactccaccgcgcacacgaagtcctagtatacagcgaccagaagttcgcccgtcagacattcaacacatgctgggcgactgcgtgaacgcaatcgtcaaatggcactaccgacctactcgcgagcgagatgccagctcactcacaaatctactctgcggtgagaacggcctcgtaaaatgtcttgagcaggcgttcctctgcggattccgctcgcaacgcctgttcggacgaaatctatacctctgggattactttatacgggtcaaggagcagttcgagaccagcttggtggaggagtctgttgatatggttcgtggtggaggctcagctagcaattcacctccaaccagtggatccagtcctgaatcaccacctcaaggatctactacgccacttcctccagtagctaaacaggaactctcagcagtttggcgatgctactgccatctgatggacgaaatcaacaacgtcaaacagacactcggaaaggatggtcgcttccaactatttatctgtcttagcatacgggaacacctcctgcaccgcatgctggttccgatggcgtacacccgggtaaccactgaaatgtacgaagagcagagcttcatgcgcaagaaaggtctactgacattcctgaggcaaattctggaaccgctggatgagttccacatagtgctggagaactcgatcactcagggaattggatctcactgttaaacaaaaaacccgttgaaataatggcacctcaaaataaatcgcattaagtaactcctc

SEQ ID NO: 625 - DNA, 2402 bp, Aedes aegypti
aaagtgcagtgccgaagaagaaacccaaaaccgtcacaccgaagccactcgcacagtccacagagtggtaagtgggatagtagttgtgttgtgcaggaaaaggtacccgaaacaccccgccaaaatacgtctcccgacacgatactagcgaaatgttgccgaaacgatcccgtttgggcgaggttcgtgggccgatctcgaacggaccgatgcagtcgcggccgctggtggccctgctggacggccgggactgctcgatcgagatgccaatactgaaggacgtcgccacagtcgcgttctgcgacgcacagagcacatcggagattcacgaaaaagtattaaacgaagcagtgggcgcgttaatgtggcacacaatcatcctcacaaaagaagatctggaaaagttcaaagcgttacggataatcgtccgcatcggcagcggagtcgacaacatcgacgtgaaagcggccggcgagctgggcatcgccgtgtgtaatgtgcccggctatggcgtcgaagaggtcgccgataccaccatgtgtctgatcctgaacctttaccggcggacgtactggctagcgaacatggttcgagagggcaaaaaattcacaggaccagaacaagtgcgggacgcagcgcagggctgtgcaagaatacgaggagacaccctgggattagtcggtctgggcagaataggcagtgcggtggcgctccgggcgaaggtgttcggtttcaacgtgagcttctacgatccctacctgccggacggaatcgagaaatcgcttggcctgacccgcgtctacaccctgcaagaactgctattccactccgactgcgtgtcgttacactgtacattaaatgaacataatcatcacttaattaacgagttcacgattaaacagatgagacccggtgcatttctagtgaacacagcccgcggtggcctagtggacgacgaagcgctggcccatgcgctcaaacaaggccgaatccgggcggccgcactagacgttcatgagaatgagccatacaatggtgccctgaaagacgcccccaacctactgtgtacgccccatgccgccttctacagcgaggcagccacgaccgaactgcgcgagatggcggccagcgaaatccggcgggcaatcatcggcaatattccggactgcctccggaactgcgtgaacaaggaatacttcctacgatcgtcgacgggcggcggtgccggaggatactcagaaggtggattacaacaagcacatagtacaacaccgctcgaggcaccgcacagtgctggatcccacgggccgcccagtggtcccccgccaccgtcagtcgccgtaccacctgtctccgctgtcacagcgccaccaccacaaggttcaccccgtctgccatcgtccggattccgctttcccgtaagtcaggagttaggaaccacagccgcactcaagtaaccgagcgcgggccagctataagagaaatgtgacgactaggtatatacaagtagatgtaaaaccatgctaataaacgtgagaggaaagtgaaaaaacggaaaccacgatcagacaaaaaaaaacaagttttaatctaaataataagaacaggaaaaaaacccctaaccgtatgctttaagaatgtaagagaaaacatagtaagagatcgaaaacaaaccgctacaacttctaatgatgaacacaatcttaagtcaatgcccccttaatgatgtgatgatgcaacatagatgaaagtataacactccaatggtaaaaaaaaaatcaaccaggagaaacattcgatctgtagattctccttctgcaaatttgagcgaatcaatccaaatctctctgagtagtttcgcaacgctccccctcactgttctggatagaatcgaattacaaaaggcattcagaatcattgctagatattagtccattgtagtgctgagcatttgttaactgaaagaacaaaaaacacaaattgaggaaataaacgaaagaaaatgaaacactaagctcgtttcaaatcaattagtgagaaaagaagatatacgcgttcactgaaataattaaaacaaaatatatgttgaacgagagagagagagcacactttacagcacatcatccattccgttgcgcgcatctacgttacaaaaatacagccagccagaatcgaaattcaagaagattaaccattttagggagagtttttgagagggctcagataactgtgcaacaacaacaacagctacacacaaaagtacgatggcgaaaaacacagaaacgaaaaacccgaacacttctgtaaatgtgaataaaaagttagatggcagaaaccgtgaatgaaaatggaaggcatataaataaaatctgaaacatgggtaaaaattacaataaaaagta

SEQ ID NO: 626 - DNA, 1881 bp, Aedes aegypti
gccaaacacggggatatcccaccatgatcatacgtgacaacgtgtccgagcgattcaaataaaaaaactagtgaaattccacggttattgatggtaaagtgaacaacgcgtgaatgtgttaatgccccttgagtgagtgaacaacaacagagttcagtataggcgacgctttgcgacgcgacggacgcggtacgaatacagcgtcagcgtagatttggttcgaagcgaagtcagtttttgttttggtttcgatcgtttatacggtttgctgaaatctgttgagtctgagtcattcaatcttcattgtcgacggggtttcggtgtggagcgcccggttcccgttggtgcgtttgctgatttcgcattcggaacccaccgcgaagaatgctgaagaaggaaaaaccgatgctgagtgtagcggcgatcatccaggctcagggacggtgggatcgaacactgcctctggcagggttggcaggtttcgatgccgccctcgttggtcacatgggcccgctgtcgccccaggacatgaaacccgatctcaaaccggacatatcgctactgaatggcagtgtgggcccgttttcgccgggcaacaactgcggtcctgccagtcccggcgcgttcaaccaacaggtcgcggcagccctgcagcagcagcaacagaatgtcaacagtctaaacagtcagcagtccggtggcggaggtggaggcgggggagggacacccactactcccaccaacatgagccaacagtatccgccaaatcatccgctcagcgggtccaagcatctgtgttcgatctgcggggatcgggccagtggaaagcattacggtgtctacagctgtgaaggatgcaaaggatttttcaagcggacggtacggaaagacttgtcctatgcctgccgggaggacaagaactgcacgatagacaaacgccaaagaaaccgctgccagtactgccggtatcagaagtgtctcgcctgtggcatgaagcgggaagccgtccaagaggagcggcaacggagttccaagttttccattaagagtgaagagatcaactcgaccagttcggtgcgggacgtgaccatcgagcgaatccatgaggctgaacagttgagcgagcagaagagcggtgataatgcaatcccataccttcgggttggatccaactcgatgattcctccggaatataagggtgccgtctcacatctttgccagatggtgaacaaacaaatctaccagctcatagactttgcccgccgtgtgccccactttatcaacctccctcgggacgaccaggtcatgttgctgcgatgcggctggaatgagatgctgatcgctgccgtcgcctggaggagtatggagtacattgaaacggaacgctcctccgatggcagtcggataacagtccggcagccccagttgatgtgcttaggaccaaactttacccttcaccggaacagcgcccagcaggctggggtggatacgctgttcgatcgtattctgtgtgagctcggaatcaaaatgaaaagactggatgtgacccgagctgagcttggggttctcaaggctatcatactgttcaatcccgatattcgagggcttaagtgccagaaggagatcgatgggatgcgggagaaaatctacgcctgtttggacgaacattgcaaacaacagcatccatccgaggatggtcgattcgctcagctattgctgcggttaccggccctgcgatcgatcagtctcaagtgtctcgatcacctgaactttattcggctgctcagtgataaacatttggacagttttatcgtcgagatgctcgacatgccgatttaaagtatcctagaacaagcaacttgtggttaaaatcaaactaaa

SEQ ID NO: 627 - DNA, 2694 bp, Aedes aegypti
aactcattcgcacacgcgtgaaatttcagtgcttcagtgcagtgcagaaaatcgataatttgtgtgcagtgtccgattccatctgtggagtattcagagtgggaagttcccagaaggcgattagtcacaggtgctgaaagttttcatccggaaggaagagagcaaccttcttgcaagcggtggtgtaattccttggcaaggtgtaaatcaagcaattcgcgaagcgctagtgcggagccccatttagttcgggacggttctgcttttgtaggagagaaggaaggaagcaagcagtaacaaaggaagagagcggagaggcacaccatgcaaggtgttctattgcacaatattgctgctgcctgtgataataaataccgttcgtcatcattggaaattagtgccaacaagtgctgtttgttgtataaaactggttctcccagtcaaggaactttcataagcgccgagaaaacccacgggaactgttgtcctacgagaaggtcctgatcatcgtcctaataggttgaagggcaaagggattatacgcccagttacgtgagcaacctgcacgctaatcaccggatttgtcctagtgaaagaatcgaaaagggtcggaagtgttattaagcaagaagcaaatttttatatatttagccaacaactagtgaaatagcgaccaacagcgactcgtgctcgtaattgtggaagtgtcgaaagagaacagcgcagaaaaaaagagaggaattggggcttgattttgaaatcggttgccgaagccgaagcagtttggatttatttgtcgtggcagaagtagccagaagcagccgtcaagatagggtccgatagctaccgcggcgggaggaagtccagcagcaacaagatgccccgcaatcggaggaaaaatatggccaacggcaacgcccatcacaacaacgactcggacgacgatacgtccaacgacaacgccagcgtgtactcgtgccagtcggaaacgctgaacgatgcctacaacaacaacacggacggcgattcgacccaaacggaagccggttccggcttcgagaagcacgaggaaaagcttctgcaagcgatcgagaacgccacggacaagtcgctccagacccggatcaacgcattccaagtgatcaacgaaacgctcgtccatcactacatcccggacttcatcgatgaccgcaagatgacgctgatggatgcgatcgaaaagtccatcaagaagggcaagggcgccgagcaggcctgggcagcccggatcatcccgctgttggtgatccaactggaaggcgcacaggaaatcaacggaatgatgaatgtgctgaaaccggtcttgttggcaacggcccaagatggagccgcttcgtacgatgctcgcgccaagtgttgcatggccctgggcttgctcaacttcctcggaaccgacgacatcggagatcttctgccactaatgaagaacttcgagggtatcttctcgggaagctacctcaagggagacagtagcccaagcagtgccaatgcggacgcagctgccctccacagtgccgccctgagcgcatgggccctgcttctcacgttgatcccatccggagatctggtatcgctcgtcaacggcaacaatcaaatgattccctcaatcaacaaactggtcggtatgcttcagagccctcacctggacgtacgaatgatcgccggagaaacaattgccttgattctggagagtggtcgctcgcacgacgagagcttcctcgaggacgaactacccgatctgattgaagccacgcaaaagcttgccaccgatgcgcacaaataccgcgccaaacgggaccgcaaggttcagcgtgcgacgttccgggacgtgcaccgttacctggaggaggacatctcgccggaaatttcgatcaaatttggcaaggaaacgctgctcctggacacctggtccctgcaccatcagtacatctgcctgcgcaatgcgttgggattcggcatgaacgtgcacctggccgagaatgagttcctgcgggacgttttggaactgggcgccaagatggacgaactggagcgcagcttaaaggtggccaaggcggagaagaagttcatcaatgctgctgcgttcaaggctcggaccatcacccggggcaagaaccgcgacaaacgatcggccgttgtcaactagaaggggcgggaagcgggtggtcgttgttgtacatagaagcgtgtgatttatacctacttttttttatgataacttggatttactttaggtagtagttatccgattttttctttcttttgatagtaaaactataatattgtttgaaatttacgttaacgttaatgcttgatcgatacctatcgtttcgcaaatttgtcgcaattgggattgtcttcgaaggatcagtccaggcaaatcttaggtacatattgaatatcgtttgaattgaagaaacatgttaagcaccgaatttcctatgtagtagctgtggttagaattgtcgaacgttcattactagtatgatagcccccgtcgtataaaatctactcaatattgcaaacaaccggtaagtttaacatagtggaaggaataacaaattgcatgtagaaaaatcgtttatgtgtaaaccaataaaatcgcaactagtttcgttctctatatagaactagaagtgatcctgaaagggcaaa

SEQ ID NO: 628 - DNA, 3130 bp, Aedes aegypti
tcatcggttgtagaaaaggtgtaaaacattagtgtagtgtattttttccatcgccccgtcgtcttctttggctttgtggcctccggaaccatcagaaaaaagagtcatcatcatcgcgcggatcgtcgtctctcggagtgctgctttttgccttcagtttttttcctcatttcgggtgatataatttcgatcagcttcttgccgcagtggtgaccaaaatcttgagtgtggaaaacaaggaagagttgtgcaaaatcctgtattcgtaaaagtgcggagaaaaaagggcgattctgtcctgtctgtgtgtgcgaaggaagaaaaaaataactttcgcgacggaaagtggccgcggcggggcgaagagcaaagcgatatcacaagagtagttgcacaagttgacggacggacgggagccagaaagagagaagagacgaaacgaaatcatccatccattcattcatctgaccccccgaggctaaagagtagggtgtcccaaaatttcacttttttcggaaaagaagagctcaagctctaaaacgaagaagcagcagtagaggcacagaggaacaaaaaacggaaaacctgtctcaagaagcagcaccagcagcgagcactctactacaccagcatagcagtaccaaataatggcgaaaacgtacgactatctgttcaagttgctgctgattggcgattccggtgtcggcaagacctgtatcctgttccggttctccgaggatgccttcaacacgaccttcatcagcacgatcggaattgatttcaaaattaggaccatcgaattagacggcaaaaaaatcaaattacagatatgggacacagccggccaggagcgtttccgaacgatcacgacggcttactaccggggtgcgatgggtatcatgctagtgtacgacatcacccaggaaaagtcgttcgaaaacatcaaaaactggatccggaacatcgaggaaaatgcatcggctgacgtggaaaagatgctgctggggaacaagtgcgagctgaacgagaaacgacaggtaacccgggatcgaggcgaacaactagcagtagagtacggtatcaagtttatggaaacttcggcgaaagctagcatcaacgtagacgaagcattcttcacgcttgccagagatattaagtgtaaaatggaaaagcgaatggaagccaacaatcctcccaagggcggtcaccagctgaaagcgtcagaacaaccccggaaggcaccgagctggttatcgaagtgcaatctattttgaccttgtaatagtcctataaattattgtaacttttttatataacatactaactaaaataacggtaaactattataattatgtactgtgtagaagaagaaaaattgagagcgagagagtgagagctaaaagatatggggacaggaaaaaaacgaggaaaaatcgtcaacaaattcaaagaaaagcacacatacacaataacccacgataagaacttggacagcataggaacgtttggtcattcggaaaagcattcgtctacgagtgaagcgcccacaaattgatctccccagacagatagtttcaatttctttttaatttatttccattgtaaacccaataaggcatgactgtgtaggaaccagacacaccacaagacgaccaccaaatgagtcgataaaataacttatgatgtatgtaaaaccgatatcgagtgataagattatggaaccgacagacaaccggaaaaccctgtttgaggttgaaaagctgcaaaaccaacaatattgtgtaacacacgagaaagacattctcaatgcccagaactccacccagatgtaacggacaggaaacatttaaactattgtatgccgctgtaataacgtacaattattcacaattcctcgaataataactttgaatggatctagctaagaaaacgacaaggcacgatagtaacgaagaaaaagaaagatatccagaacaactccgctagagttttgaacaatacttgtgaataactttagatgtgattaataatcttttgaatagaaaccgttcttcgtgtgaaccccaacgaattgtaatactgcacagtgtttaaaattgtcgatttcgatttcgaagtttcttggtatattaaatcttttggttcaaaaatttctttgaattatccagctagaagtgggatagagagtagtgtgtcgatcaagttgtggggtgagtgacgtaatcaagatcaatcgtgttcggttcgcattgtgcgagaagatattgatgttctatgaaggatggattaccaactggtgagctcgtttcatgcttttgataacacaattttatcgtggcatcgttacgtttatgtaattttctatcaaactatggatgatccgtcactacaagtatcggcataaacccatattcctgtttcatataattttaatatacacataccctttttcttttcgtcattactaaaaatatcctttgaatagttcaatattataaatgtggaagtacattctcaatcttctaccaatatctttccaccacgagacaaaaatgcaaaactagttttaagcaagagtcgcatttttctccttatccatggatcgcatcaccaatcatcaagatgactcccagatctttttcctccctcactaatcaacaccattcttgtggtgataatggcgttaggcaacacacaattaatcgaacaatttttggcatttttagatgttcttcaattaccaagaaacattcacttaaacagtacagactctatataaaaaatgcacgaaatcgacaaattcgaacgcagtgaggatgtgaagattgcgtcttgtagcagaactatcgcaggatgttattcaccgctctttttcggagcttctccactacataacatattataaactccagaaggttgtttgtgacaaaatacacgaagtacgggttgtgggattttggtgtaaacccctccccttccttttcaccggaagggttgtgcaagcgatgggcgaactggacgggatggaactcatgaaaattcaattgtcgtaattagcatacgtggatactacgaataaaaatcgttagcaaacaagggttcgaaattgtggtgaagatttttcttcgca

SEQ ID NO: 629 - DNA, 3508 bp, Aedes aegypti
ttatttttgaccgtcgtttcgttcggacgcgcgaactcgaagcttatcagtgtgtagtgtggaacacttttcccacacggattttccagcgaagataaatagtgtgcatttggaagtgaacgaacgggcagctgcaaaagcaactatagtgagtgataaacgatagaacggaagtaaaatttggaccagttggatacggaagcaccagttgcagaaactacagagattcaggcacgaaaaagccacaaacaacaatcgttcgcctcgctctgaaccacacaggaaccggatgtagatcaatgaatccgacgaacgcgacgacaagcgaggtgacaacgacgacggggacgacgccctacagcagcgccacccgtcgatggtggtggtatggggtactgttggtgatagtcgtcggactggggcttccgtcggcggtggccctgagatgcgaccggacaccggagggatccggtgcgagtaaatcgcctgccgatgggcgcttccggctcaggatttccggcaatccggacaagtacgtgcccggcgagacgtacaccatcagtctggtcggcatccggtccatgcaagtgccccacaaattttccggattcttcttggccgccgaaaaagaactgacccttagtcggccggagccacaaaacaacggagcactgcaccacgtgggaacattcaacctgctgggggatgccctgaccaagttcagcgaacgctgcccaaatgcggtaacccagaccagttcgataccgaaaagcgaaatccaggtcaactgggtggcgccaccagccggaagcggctgcatagcgatccgggcaaccgtagtggaacaccgggacgtgtggtacatggacgatggtccgttgagcaagattttctgcgaagacgaagcggactccgtggatactcaaccaccggttctaaaggaatgctgcgcatgcgacgaagcaaagtacgaattgacctttgaaggcctgtggtccaggcatactcacccgaaagatttcccttcgaacggatggttgacccgattcagcgatgtcattggagcatcccacaccgtagactatcgcttctgggaatacggccaagtggccagcgaaggattgaagcaagtggctgagcatggttcaactcggatgttggagagtgagctgaagaaccaaagtgacaaaatccggacgattatcaaagccagaggcatatcgtatccgaatgtgacagggaaaacgttcgccgtattccgagttgactccaatcatcacttggtgtcgattgtttcgatgctggacccctcacctgattggattgtcggggtttccggactggagttgtgtttgaccaactgttcctggattgagaacaaaatcttgaatttgtatccatgggacgcaggaaccgacagcggcccaacctacatctctccagaccaaccaaccaatcccccggatgcaatccggaggatcaagtcaaactatccgaacgatcctcgttctccattctacgacccgagcggagcggagatgaagccactcgctcgtatctatctctcccggcaaagactctacgagaagaactgcgaatccgatgacgaagacaacgaatcgaaacaagcgtgtgaaaccgaaccgtgggacgagtggaccgagtgcagttcccgttgcggaaagggtcgtcaaactcgccgtcggctgttcaaatacccggtcaaggcgaagcaggccgactgcaagaagaagctttttgagaggagaccatgtgtgggcccagaacgggactgcgactaccagaccagccaggagttggacatcatctaccagagtgatccggagtgtgaagttaccgagtggggaccgtggagtgagtgcagtactccttgcggtaagggtaacaagactcgatcgaggaagtacaagaagaagggagcgcgtaagaagtgtgaacggatgccgaatccaccgaggctgcagcagacggtaccgtgcagtgaggagtgcgccggggacatttcgcagccggtgatcagcgctaatatcaaccccgagtgcaagatgtcgcagtggtccgagtggggaccgtgcagcgtaacgtgcggccttggtcgcaagatgcgtacccgtatgccgttgagcgctgccttgaacaccaagttgcatcacaagcgattcgtcaactattatttggcgagaaggcgcccgaccatgaacgatgacgatgaggacgaagacgacgattccggagccgactacgacggtggcttgacgaccctggatcgggatgatccgtgctacggggtggaaaccgtagaggaggtcacctgtggccatgatctgccggcgtgcgatggactgtacggagttcctgaactttgcttcctggaaccgaaacctggcaattgtcgggattcacagacgagatggtactttgacagcgacaagaatgactgttcgattctattctttacgggatgcggtgggaacaataataacttcatgtcccgtgaagattgtttggacacctgcagtaaagatcgtaaattcaccaacattccgatcagagatcagacgatcatcaactccgactactcgtcggacttcaaacaggactgcaagacttcgcactggaagcgaggtccatgcaatgccacttgcggcgaaggtttccgcgtgaaaagtcgaacaattctggctcatccatcgaacggtggtcaccggtgtccacggaaactccgcaaagtggaacgctgctttgtgcactgtgactcctctcggcacgataccaatccttcgtggggacccagcacccggtacacgccggaaccgatcgagtgcgactattcggcctggtccgcgtggtctccgtgtagcaagacgtgcggcgattacgccgtccagcagcggacacgctacgtgctgaactcggaacacgctcggcactgtccgcatcggctcgaggagcgaaaatgtgatataatgccctgtttgctgggtaactgagaaggagtgacaggggaggcgagatttgtttattgttttactgaaatactcgtttaacagatcgtagttgaagcactttttagactgtttgtttaactgaatactcactacacaatctctaaggtacgtttactaatcaagttgaaacagattaatttaacagataattatttcaaacattgtaatcaaattgattggcatataatgatgtaatcacaatatcaacaaatatgtataagtaaaatagggaaacaacgttttttgtacaagacacatacacaaacacagacattcattggtataaacgatgaacacataaccactgaataattgatcaaaagcaatgatttgaatgtgtaaaaaaggctaatccatatattagtagtaatgcatgtggcgacggtgtaacaacaaaaccaaccaaatccaatgtttaaatgaatcaacaataaagaaacctgggtgactattagaagatgaaactgcatcaaccgaaa

SEQ ID NO: 630 - DNA, 2389 bp, Aedes aegypti
atgttcattcataaaactttacaagtgtgcgtgagaagcgacgagataacaactggaaataaaatcctggccaccctaggcgagggaacgtttggcagggtggtgaaagtcaaggatttggaaatggaacacaccatggcactgaaggtgatcaagaacgtcgaaaagtaccgggaagcagccaagctggagatcaacgccctggagaagatcgccgaaaaggatccaacttttcagcatttgtgtgtcaaaatgctggactggttcgattaccatggtcacatgtgcatcgcgttcgaaatgctggggctcagtgttttcgactttctaagagaaaacaactacgaaccctacccgatggatcacgtgcggcacatggcctaccagctgtgctacgcggtcaaattcctgcacgaaaacaaactcacccacacggatctgaagccggagaatatcctgtttgtggactcggagttcacgacgacgttcaacggccgaaagaaccgtgaggtccgccgcgtcaagtgcaccgacattcggttgatcgactttggcagtgccacgttcgatcacgagcaccacagtacgatcgtgtcaacgcgccactaccgggcgccggaagtaatcctggagctgggctggtcgcaaccgtgcgacgtctggtcgatagggtgtataatgtttgaactgtatctgggcattacgctatttcaaacccacgacaacagggaacatctggctatgatggagcgtatattgggtacaattccttaccgaatggccagaaaaacccgcaccaaatacttccaccacggaaagctcgactgggacgagaagtcgtcggcggggcggtacgtgcgcgaccactgcaaacccctgcaccggtacgtgctggcggagacgcccgaccacctgcagctgttcgacatcatccgacgcatgctggagtacgatccggcaaacagaatcacactaggtgaagccctgcggcatccgttcttcgcaaagctcccgccggcgcagcgtttgcacgagaaatgtaatgaaaattccgtctcggccagtagtagccgggagcgttcccatagtttatcgagatgaaattcggaacgatttgattattattaatttataatatttacacaaaacactcatatacctacaaaagaaaagaagggaaaacactaagaacctcacctacgaagaaaaaggaaaaattcgcatagtaacgcaaacacacacattgagaaacaaactccaacgaagaagaaagtctttgaacaacaagggaattaatataaaacaaaaagaaactttcgagaagtaccatgtacggaaaaaagtaaccatttacttctccggaacattcacactcataacaaaacacaaacaagaattttatcgaacattagaaaacaaatggaacaagagtgcgacggagccctataactacgcatccaagtttagtagggaaaatttaaggggaacatggctgccgtgtcgtcgtcgtctcgcaatggggcgggacacattaggatttcaacaaattgagtaggaacgcgagcgaatggagtttttgttctttttttttaaggcagtgttgtaaaattcgtgacaggctcgatcgttttcgtaggttttctttattttttttttcgctatcgctaagcagtgggaacgttccactgcaattttgccaccttcgtcgtccgtaatatatgctttatctttatatatctatatattcagatttaatatgtgaagcttgagagaaaaaaaaatatcggttagcaaacaaatctctttatgtcgaaagttttattaagtggaaaaaccggaaaattttgcaattttctttgttcattgtagttgtaggcaattattttttaataaattggtgaagaatctgaggagaaatccgccaattggctcgatcgatttcagagagaagtggtttcttctttttccgttgttgtcctatgtttgtgaatgttttgttactcttctcggatcaccatttcagtagatcacgttcaacctcttgaaacattcttcctcatcaatggggggtgggacatttcgcataaagacgtttcgccaaaccatgtggaatggtgagatgacatcggctctgtaatgccctatggcccctgagcctgacaagtgaacgatgtaagttaaaaaaaggcgttttgcatggtttcaagcgcgaacgtgttgcataatgaacatttggcacttcttcaaagtgctaaaagttcttatatgaaactgctttatgggatactttcattatgcgaaatgggccatccctctcatcatcattgttgtcatcgttcgttaaaccaggtccttccagatgtgagagtttgagtgaacaacaacacat

SEQ ID NO: 631 - DNA, 5648 bp, Aedes aegypti
ccatgagcgaccgagagtcgggtccatgtgttggtgtgctggcatttcatcacacgaaatttgttgaatggtccggcgctgtttggtccaattttgacgagattttcggatctgagcatttcgactcggaatcgatgtttacacccgccaggattcgacattcggctagcgtgcggttccgttcaagcatgggagctaatagggcagcggctgctaactgcccacgcgctcccctgtgttggtgatcgatcacattctctactgaatgaaattaatgtttccgctccgagtcgggcactgattgcatcgttccctccactcactcatacagtgtggcactgtgtcgcctatttgcgctgcggtgcagccgttgtctgggtggtggtgaacgcgcgcgcccgtttcggtttcggttcggttcggtcggaaagcacttcaaccaacatgacttcctgtgcggctttatgtggtggtagtccgagtaggtatgctctgtggcaagcgtgtgggatgttgggttgggtgtagcagagcggcagaggcagcatatgtgtccatactgtatttcgtggcggatggctcgggcgtttgtctatcgcgatgttatgctgaatgaataacaccggtcaacgtagtttgatgtgttttatgaatgaatgtaggtcggtctcgctagaagccgtgtttagtgtgatatttaggggtgatttgaagctgtgctcgttctgtgctgcgcgatcagcggtaattgatctctttcggaaggcgattaaaacgatgacggatcttggtggaccacggctgaagacaacacatcgaagccgctagtgtaacgagctacatggatcgcagaaatggcggcgatcctttggcgcctcctcggccccctaagtccttgcctcgtgttcatcgtccccgggctcctgagccgaccataatgagcgctgccaacagtaccaatcaatcttcagcgaacaacagcgcaaacaatacgacgattacgaatcgaagtctccataacgtacagcaactgtcaccaaaacctaggaatctaagcgcttccagttcccctgcgcgtaaccttagtagcaatatattatcatcaattccaccgccgttgccacctcaaatagcgcccttgacaccgcttcacacccgaagcagtagcaacagcagcagcatcagcagtagtagtcatcatcatccgcaccaccaccaactttctactagtagtatcgttagcaataatctagcccagccagcaagtaccttctcgcgacgacgtccaccggcagctttaccaactaactcgacaccgagcattttgaacccaagcattgagacgacagcgtcgactacgacgacaacgtctgcctcatccccggtcaccctggctgcacctagaccagagaacgaaaggcttactaacgagtatgtcgatacaccgtttagtagactgtcacctgcatcgaaccgtcagcgggggcagcatgctattggatccgcggcgaccaccgggtcggcgacgactccgatgccttcggtggcatccagtatcgaccgtcaccatcaactatcagtatcgcaaccaactaataatcgattacattcgcctagcactatccatagtagcaatagtacaacggtgtcgaccatcggtaagccaatcggatccacggcgacaaccaccacgctgcacagcagcaataggaactttaacaataatacaatcaactctaggccaaaccaattaccactggggcaaacgacgtcttcgacggcggcaacgacaacaaccacgacgggaacgaccggtatgcccttatcgggagcaccgacgatacagtcagcgacattgccaattaccaaacaaccagtatcaaacaactttagcaaagactcatcggcagccggtctgcacgagcttgacaccgatctacacccatcaagtggtgatctacttaattccatcacctgccctcagtgtaaaaagtgtcggtgcgaagaatgtcaacggccgcgacagctaccttctcgatggctttgcgataaaacctgtctctgcagtgcggagaccatcattgactacgcttcatgtctatgctgtgtcaaggcgctgttctaccactgttcgaaggatcatgaactggaacgcgaaagcgatacagtttcctgtgcagacgatccctgctcttgtgttccccataagcgaacgactcgttggggctgcctggcggccctctctcttccactgccctgtctattgtgctactggccaatgcggggttgtgttgccatctgtgcgaaatgctacgcaaaacattcccgacacggttgccgctgtcagtcacagaacggtagcagtctcgccgacagtatcctcggtggaacaggcctgggcagtggtagccttggtggaggtggtaacggtgggtcacaaggtggtaacggcaatctggatcacggtagcaatatcagcagcaaattctccaccgtcagtagtactagcccgttcagcaagggacaccaccaccatcatcatcatagtcaccacaatcatcatcatcatcattcgggggatcttacgcccgaaaagcgcctgctcgattccagcccggagtactgatatatgctgtatctgtaagcgggcaacgaaggaggcagcggcggcagctgatgccattttcgagaaacaaggcccgctggcagagatcatcacgatcgcatccggcgttcaacggtaaacaatagtaggtagtagtaataataataaactcggcgagcgcaacagacaatgcccgcgcgtactctgtggctatatgtaggtagaagggaaaacaaaacgtataaaaaagcgaagagcaaagttcgaagcatatataggaatgggagaaatgttttttaattataatttaaccaaagactgcagactattattgagttatgttttttgatataaataatgtttttcgtgtaatgcaagcgaaacgaaccgacgaggaagatgcaaatctgtaaattatccactaatatacgggcttaactatggattgcttcaaacagatcgagaacgaagcaggatgaaagtcgaatcataaagtcatactacccactactactactattacacaccttcctactactgctaggtttcgttacagaaaaaaatgaatcaatacagctacagttactaaagaaattcgaagagcaggtagatccattaggacgcgggaaagataactaatttattctaactgtatacagattttaaggcaaatgcgcaatctctcaattttccagagaggttaacatttttttttctactgagagcgtagaatgcgttcaccaaaacggcgaaagtctacggtgcgaatggcgttcttcttgtgtatagggaattagataggacattttccaaatggctaggcggcacggcgaattcagggaagcgagaggatgcgcgaatgaatctaggtgtggacgcgaggaatcattactgatgttttctgttcataaatgcgtaatttatttcctacgttccgttttgtttcaagcaaacaagtgtatggaataatgcaagtgtacgattgttttcgcgatattttagaaatatcggggaaatgcgagtaagtcgacggaattctgagtgcacgcaagtcaatggccggtaagacgagaggttaggtaacagctgtcagagggaactgaaagcgaggaactcttgaagcatatagatgaaacagagttgaacaaaatcatgtaaataagtatacatatttatccaaaacaaaaccaagcgactaatttaatgtagggcgcccgtgtggcaaacaaagaaactattttcttaaaaaaaactgtacgattgaatgatgctgtatataaaccgataggaagcggttcgcaaagaaactgaataaagggaaaacagatgataagcatatttatatttaaatacacgcgaaagaaccactgaagaaatgtaatatattttgggagtgttctagtttttgtttgaggcgaagagcgtgagcgagtgtgagtgtgtgcgcgattgttccacgtgaccagagtgtttggaagagtggcataaggcgtgaatgtagtgcgttattcttctgtgtaaatatttaccacacaggaaaaaggaaagaaagcaacaaatcagcattatccggtacgaaccaattgtatttcagacgaaaacaaaatccactgcaaagagcctatgaaacgagcggcagaaaaaacagtcatgcgatcagtgagcaaagtttccaaaaaaaaaaaaaagaagagagtggtaggttcaaaacaaaaggagttaatgttgctggcagcggcttcggctcgaaacgcgcgatccacgtggtttgcggcggcgaatagacgctaatcactcgtgtgaatcgattgtggaatgacaagtatgcaaaaattatcacgctcccaatcactggctgccatagccgagcaaacaaacaaacaaaaaaatacgaacccaaggttcaacgggtgtgaatgtacttttcgcgatcatatcaacgacgctcaagcctcgtcgtcagtaaataccacagagcctccggccctgctggtctgcgggaaaaaatcggttcattgttatttaaattgataaaagcgctgattaaagtgatgcattcaccacgtttccgtaaatgttgtttttttttgttcagggtgtgtgattgtgtgcgtgaaagtattcctacggcaaggggctctccaatggtggcaggttttttttttcctctgccggtacatatttttccgaagcgtcgatcgatcatggaggggcttgaccgcgcgcgccgcaaccgacttaacagattgtaggaacacttaggaatccgctttacgacgtgtgtatggaaggagaatgaatccaccatcatcagtgcgctgtcccgtagagcgacgtgaaatatttaaacgtcggtgataacctatatggttgcaagcgaacataaataacagataatattttagtcagtggagcgctgaatgtgcctgaacggaaaccgggagcgagaaaggaacatttggctcacggttgatgtgggcattgaagtgtattttatgaagcaaattatcattcagatggatttacttctctggatataaatttgggcttgtgtcggaatttgatcggaatgaatggagggaaaaatggattcaatagagtcctaaattctcaattgttgcacctcagcataagcttgcagtagaaacataagtttattatattaaaacttttacaatttttgagtttttgcaacacccctagtttttaattcatgttttggaagaactgtattttccgtgtacttttcgtttcatgcttcgaatgtgtcatagttaaaattttaacctaattagtcgttatcagagcgagaaagtttgacaaagtgctcgtaagaacttgttttgttgtgtcatcaaataaaaattgagatgttaggagtctattggtgacaattttaccttggatagtaaacttttttgtagaatattattcaagtacaaagttgtttactgaacacaatagtgatcatttatatgagagataagcagaagtaaactggaatgatttggcaatagaccagcagtgctgagtttgcttggcg

SEQ ID NO: 632 - DNA, 4421 bp, Aedes aegypti; identical to SEQ ID NO: 292

SEQ ID NO: 633 - DNA, 2910 bp, Aedes aegypti
atggaaaaggcgaaagcctacatcaaaaacgaattacgtgggggctccttgacatcgcattcggagcccccggcaaccagtcagcaacagcatcatccagcacaatccctgcaccaccaaccgtcgccaacacctcaacagcaagctgccaattacgatgatccctccacaatctgctacgtatgcggtgcccgtggtgcccaggatcagttctacctccgggtgcggtcaaatccggagcgcccaaatgagccatactttcccctgctcgaaacgcacacccctccgaatggcgttccccagtggacacccgcccagctaggggtgcgtgcgtgcaatctctgcttcacagccctggtcaaacaatgggaataccacgaacgggagggtaaacccatcacagagagattgtactggctcaaaaggaacgatggaaaaagtttcattggtgccgaaatgtccacccagggcgaatatgccactcaggtgctcggtctaaatccggaacacgtgcctaccagtggccgatcgctaacgcctcagtcgcaacatatgagttcttatggtagaatcgaaagtcccaatagtttagcaaggcctcggtcacaggaccatcccggagcggttggtcctctgcctcaacattaccaagtagctagaaatgaaagtccaatccggtctagctcgcggaacgaatcaccgcagggcaaaaccgaaccataccatccaaccaagcggtacatcgaaaatcacataaacaatagcggaagctgtagtcaacagggttcgaggccttccagtcgaaacgaaaaaagtgtcacaccgaggcctatgtcgagagaaaacccctcaccggtggcggtagttcccagcacaacgacatccgccattactcagccggcaacggcgtcaccagtgctggctggtcggttcgatggcatgaaaatgtcctcgttcgcccaccacaaactgaaaattggtaattacgccaactcactggcagcatcggtaccggtctcctcggttgccacaccgtctgccaacaacgcgaacgataacaaatcaacttcgtccacatcgtcatcgacgcatcggttggaggaggaaagtgcactggatttgcggaacctcccgatgcccggcgcgaccgatattctggacctgtcgatgccggacaaaaactcggtgacggaagtgtgctacgtgtgcggggatgaacagaggcggggcagcttggtggaaatttccaccgtcaagccaaaggatggcaaggaccaggagaaaccgtactttccgattttcgacgagacgcatgctagacccgcccgttcgcgaccgaaagatccaaagggtatggtgcaagcgtgcaaaacttgccacaactatctgatcaaccagtggcatgcgtttaataaacagtgcgtaccggaggcccagcggaagtaccagatccggaagcggcaacccacccaggaacgggcggccacattcgtctgctacacgtgcggcgccgatacgctctcctcgcagctgaggctggtctactgctgtcccaatgccgaacgggaaccatacttccctttcataaaaacgatgaaagcaccgaccaatgctagtccgataagtcctcagggtatggtgcaaatctgttcaacgtgcaataagaagaacgaacatcggtccgaaggtggcaccgtaagcaatgtcgaggaaaggtatccgtctccgtcaaaaatgacgtctagtgtgataaacgaggttgtacgatttaagccttatgaatctccttccgctctgcctggaccgctacgggatcagaaagacttccggagggattcaagaccaaatacaccgcctcactctcaaggacctgttgaaaacggtcatgttttttcgtgttacatttgtaagaataactttcccccgcaatcgatggagtggctgtcaacgagtgccgaacatatgaattcgcatgcaatgcattttccctgcctcaaaggcaacaacgatcagggtccgggtcgggtgctggcgtgtaaggcctgcgtacaaaacctcaccgtccagtgggagacgatggatgccgaacgggtgccgctcgagcaccgcaagtacatcattccttcgccgacaccaaactcgatatcgcccggcggcggtggcgtcgtcgtcgggcagtatcgaccaccgatagccctggccacgccgcccaccacgccggcgggctcaaacgcacccagtacctcggtgtactgcttcgtctgtggcctacattcagagttaaactttgctaggttaatatatgccaataaagagggttctagaccttattttccttttctgttaaaacacaagtcacctcccaatgcggaacagttacgaagtgatagttctgcgttggtttgtacattttgttatcactcgctgttgaatcaatggcggaaatatgaagctcaaaatacggttcctccgggcaaccgggagtacaacttccacgactactgctgccacctgtgcgggatcacaacctatcggaagcgagtgcgtgcgttgcccatccgggaataccccttcgtggcgaatcgaaaaagcgacggactgctgctggagaacggcgactacgcagtggtctgtctcgattgctacgaaggcctgaggcaacaatcagccgaatacgatcggtggggtgtggcgatcgagaagcgggagtacaactgggtggcacaaccaccaccaccggaggacagtccggatgtgtctgtcgcccgcctaccgagcggggaacggactgataaagtcaataaaaattctcaagtaggtctacgtccaataccaaataagaagaactgttctccaaagcaagttagtaacgataagcagcgagatgcaactcgaagcggtatcgcttag

SEQ ID NO: 634 - DNA, 858 bp, Aedes aegypti
atgcataacatcaaatctctcagtctatggcaactatcagacggcaaaagcttcatccaaatgatctacaccagcgacggtcagctcatggattgcgaatacatacggcagaagaagcttgtcttttcatttctgaatcgcttctacgatgagattgaccaggctcgttcccgaaacttcacatcgccgctgacggtaccaaagaagcaccactcgctggtctcggatcacgatttccgggagttcatcgataatggcatcgttacatccgaaatggaagatctccagtacagcgtacaggaattcgctaacggacagtcctccgctgcggacgctccggatgccttcggcctccgaaatctcacctacattcagctcacgagcgaagatgaactgccgaaggatctccacaaacagctaaactaccgaagactgaagcatcagtgcgatcagaggcacgctcagatgcgaaacctcgcccatggattgcagagtagtgatccacaggagcagcagactgccggcgaaaccttgcaaaggcataagcgcgctatcgccgattggttcctatcgccaaacaccaagtggtgcggcaagggacactcagccgaacgttaccatcagctgggaggcgcgtcccgggcggacatgtgctgccggcagcatgactactgtaaattgaatattccgggtatggccaccaagtgggacctgttcaattaccgtccttatacgattagccactgtagctgtgatcaaaggttagtttcacatcgggaggtgggattggtagattttagtcttggggggataattcgagaaccaaacagatacaagagttggtaccagtttttctag

SEQ ID NO: 635 - DNA, 3005 bp, Aedes aegypti
atgctgctgttacataccggcgaaactcccttccagtgctcgtactgtcagaagaaattcacccgcaaagagcatttaacgaatcatgtcagattacatactggagaaaccccctttcagtgtacctattgcgaaaagaaattcacgcgcaaagagcatttaacgaatcatgtcagaatacacactggcgagactccgtaccggtgcacgtattgtgagaagaaatttaccagaaaagagcgtttgacgtatcacataagatggcacaccggagaaactccttatcattgcacatattgcgagaaaaaattcgcacgaaaagaacatttaacaaaccatgtcagattacataccggtgagacgccctatcattgcacctattgcgagaaaaaatttacccgcaaagagcatttaacgaatcatgtcagattgcacactggagagactccctatcagtgcacatattgcgagaagaaattcagtagaagagagcgtttaacgattcacacaagaatacataccggagagaccccttatcgatgcacatattgtgataagaaatttaccagaaaagagcgtttaacgtatcacataagattacatactggagagaccccctatcagtgtacctattgcgagaaaaagtttacccgcaaagagcatttaacgaatcatgtcagattgcacaccggagagactccctatcagtgcacttactgcgagaagaaattcactcgaaaagagcatttaaccaaccacacgagattgcacaccggggaaactccctaccagtgtaactattgccaaaagaagttcaccagaaaagaacacttaacgaaccacgtcagattacacacgggcgagactccttatcagtgctcgtattgccagaagaagtttaccagaaaagagcatttgacgaatcataccagattgcacactggagagactccttatcattgcacctattgcgagaagaaatttatgagaaaagagcatttaacgaaccatgtcaggcttcacaccggtgattcgccgcacaaatgcgagtactgcaacaagacgttcactcggaaggagcatctcaacaatcacatgcgccagcacagcggagacaatccacactgctgcaatgtgtgcaacaagacgtttacacgaaaggagcacctgattaatcacatgagccgatcgcacaccggcgagcgtccgttccagtgcgatgagtgcggcaagtcgttcccgctcaagggcaacctgctgttccaccagcgcagccacacgaaggggcaaccgatggagcggccgttccgctgcgatatgtgcccgaaggacttcatctgcaagggacatctggtgtcccatcaacgatctcataccggcgaaaagaatcaccactgcccgcagtgcagcaagtcgtacgtcgagcggggcaacatgctgcggcacatgaagaagacgcatccggacgcagtgataccggtgctaccgaagctgccgcacataaaggtggaacccaagtccaccggtgagtactcatcaggctcaccagttgcaccaccacatctcgccatcgatgcatctgcccccaccaaacccccaacagctggcagcactcgccctgcatcatcaggtggcccagcaacaacagcaacaacaacaatcctcaccctcaacgggccgagcacagccttctcctcgtacatcacatccgccgccgcagcagcagcagccgcttccacagcaacagcagcagccggtgccgctccaggtcccccaggtgccaccgggccccccggaaaaccaacagcagccccaacagccgcagcagcagggcccgggccaaactggacccctgccaccaccacaccatacggtcccggttactattataacccacgctggcacaattaatccgatgccagacggtctcaataatcgggttggcacgattcagatgcaccacctgaatgcggcccaggcagaagagcacacggtggtttactaaatcaagatcaactctaatcagaactagtagtagagtttgcatgcccaagtctgactccaccaaagactaaccatgcgatccacataaggaaggaaacagtacagatttgcaattagtagtttttagatcagaacaaacacattgtaggaggaacattactcgtaaccagtaatagacataatggaaaaaaatgtatgcgacagaagaaaaaaagtactaaaacaaatatgtaatatatacaattatatatacacgaaaacaacaaaaacaaacaataacaaaaaagatggataacatattggatcggtatcagatatcgataaaaaactaactgaaagtaataagtaaacataaaattaaacaaaaacagttgcaaaacaacagacacacaaaataacggtaatttagtgaaagagtaacaaaattggaaatatgctaaagtgacgtatatattattagtagtgacagcaaatgcaacacaaaaagcaaagaaactgactgtttacaacgttcttttttgttcgatacgtgcaaacagcagcattagcagccagtcgtgatagtaagagaaacccaacagacaccgttataaaaaagcagtgaataaaacataaaaacaaacacaaaacccttaggtaaagctattacaagatgatcatagaaatcaatacttaaacaagtaagcaaattgttgaaaataggtgaaataaacaaatagtaattgattttaccccgcagttgaataaagtaaaacaagttaatcagagaactgaacgcaggagaaaggttgctggacaaactcaagcgaaacactggaacacaaagttttcggcacgggaaataacaagagataggatgcgcaagttcgattcgagcctgaactgaagccaaggatggaaaccaacaacaacatcaactgttgcgaacaaagcaaggcaacactaaatgaatagtacaacattattaaacagtaactattaattaatagagaaacaaacat

SEQ ID NO: 636 - DNA, 1386 bp, Aedes aegypti
atgcctcatggtctcacttcaacccagcagccattcaacaacgagcgggggagttttgaattgctagacaacttgacaacaactcgtctgttcgtttctttttcacttttccgtcctgcagcacagtggagtaaaattcataaatttaaagaggaaaaacttgccgcatccattcatctcccagctgggccaatccggggtgtcgttgccaacggtctgaacttccaggacttgatggtacgtttgggagccatcgattcaccgccaaagactccaaccattctgggcttcgagtgcgccggtgaagtcgaagccgtcggcgaggaagtcgaaggattcaaggttggagaccgcgtggttgcgctaccagaattccgcgcctggtccgaactggtagccgtcccgaccaagtacgtgtatcacattccggacgagatgacattccaggacgccgctgccatcgtcatgaactacctggttgcgtacattctcatcttcgacctgatctcactgcgggagggcaagtccatcctgctgcattccgtcggcggtggtgtgggacaagcaatcgttcagcttgcgcgcaccatcccgaatgtgaccatcttcggtgtgtgttccaagggtaagcacgaagctctggccgccaccggattgatcgatcacctgatcgacagaaccgactacgtcaatgaagtcagaaaaatcacaactgaaggagtcgatgtggttatggattgcctgtgcggagaggagtgcaaccgaggctacgggctattgaaacccatgggcaagtacatcctctacggttcatccaacgttgtcaccggagagaccaagagcttcttcagcgttgctcgttcgtggtggcaagtggacaaagtatcgccgatcaagctgttcgacgaaaacaagagcctggcagggttcaatttgcgacatctgttgtaccaacaggacggttcggcttacgttcgttccacagttgacaaaatcttcgacctgtggaaggatggtaaggttaagcccgtggtagacagtgcctgggctctggaggatgttgccgaagccatgcagaagatgcacgatcgcaagaacatcggcaagctggtgctggacccggctatggaaccgaaaccgaagcctgccaccccggccaagaccaagtccaagaaacaggccagcgaagacaagagcagcaaaaaagacaagtcttcggagaacggtgacgacaaaaaagatgaagaagctaagaccaatggcgaggaaggtgaagcagctgctaccactccggaggcggtgaatggtgacagtgcggaaaagaaggaggagccggtcgccaccaatggggaggccacggaaagcgagaaaaaggaatcgagttga

SEQ ID NO: 637 - DNA, 4789 bp, Aedes aegypti
atagaattaagacttatctatacgccctatccagaaagaactcccgattcgtatccgtccctgacagcaattttccgcattttacttcaactattttacacagccctactcggtaaaaagcgtcgccagcagagaaaacgatgacgcacattttcacacgcttgttcctcagcagccaaacaaagacaacaaatcaagccaacatcgtagcccgttggcgaaaacgagccggcacatgaaattcgatcgccaccagcagagcaagtgcctttcttcatctctcccgtgtcttccgtctcgctccggcgcacacaaattacgaccccatcgtcaacgaccacaaaaaagcagccgtcgtcgtcgtctgtctgtcagttgtcaactagtagtggaagagaacggttcaaaacaagtgaaactcccgtgtcggtcgaaactctgttggtgtatggtggagattttcctcgccccaaaacggtcatttatcgcggtctgcccccttcgggacccggacctatcgctactggagcccagcaggaaccggaaaagggcacccccggaacggaccggatccatccgtggctagattactaccaatcacgccgtgaatcgaagcgaacgggatcatcgcccgccgcgggttctgccacagacgttcctgaggaacgcatgccaaaccgataatcggttcttgtagcacgtgttccgcctggtcgttacatgttcgtaattggtgccagagactcgcggaaggaatgattttgaagtcaccctgcgccgtgccttctactgtaacaacacgtcccacgagagcaacgagaccgagaggacagtctagattgaagcgagacgaaccggaagtagtcgcggtgttattgggaagacgacgagcaggagtgacgtcgtgaaatgaccatcatcctcttcctggtggacacgtcggcgtccatgtgccagaaagcgcacgtcaatggggtccagaaaagctatctggacattgccaagggcgcggtggagacctttctcaagtaccgacagcgttcccaggactgcatgggcgatcggtatatgctgttgacgtttgaagatccaccgaacaatgtgaaggctggttggaaggagaaccatgccacgtttatgaacgagctgaagaatctgcagagcaacggcctgaccacgatgggtgaggcgctgaagaatgcgttcgatctactgaatctgaaccggatgcagagcgggatcgatacgtacggacagggacggtgtccgttctatttggaaccatcggtgatcatcgtgctgaccgatggggggaagtattcgtttaggaacggggtccatcaggagattattctgccgctgcatgctcaaatccccgggacgaagctcacgaaggaaccgttccggtgggaccagcggctgttttcgttggtgctgcggatgagtggaaaccgggcggacgaacgggtcgatgggaaggtgccgcatgacgaatcgatgatcgagaagatgtgtgaggtcacgggtggccgatcgtacaagatccgctcccaatacgtactgaaccagtgcatcgaaagcttggtgcagaaggtccaaccgggagtggtcatccacttcgatcagctgctcacgaccaacaatggcgaaaacggcggcggaggcggagctgatctacagttccagtcgatcaaacgcatgatctacgtacagaagcacccgcagcagaaaacatttccggtgggcttctggcccatcccggaaccgtactggccggaccccaaaacgagtaacctgccgccgcgagatgctcatccgaaaatcaaaataattaccccgtgctgtgatgaaccggttatgctgcggaacttcccgatcgacaagtacgaactggaaccgagtccgctgacgttgcaaatcctgtccaagaaggaaaccaacaaggtgtggccgctgatcgtttccagcgggatgcacgggatcgagatgcctttcggttttctgaaaccgagcagcacgatgaccgtggtgaatctgtacgtcttgccgtacaactatcagacctttctgccactgatcaatgatctgttccacaagtacaacctcaatcccccaaacgattggatctacaagtttagcaattacgtgaaatcgatcccacagtactattgtccgtttctaaggcgggcactggcatcgacaccgaatgtaccttaccaactggtgcaatacatactgccggagaacttggacagctatctgagtccggcggtggcgaactatctgaaacagatgaagaacacggccaaacaggaccaggagaatttgtgtttgagggtgttcaagcagttaaagcaaccgaaaccagcctaccatcagttggagacggtaaagctgaatcctggtctgcagctgaagcgtgatctggtgtcgcatccgatgttgaaggatgcgttcaacaaggtccacgcggacattgctagtttcgataactacacgattgtggtaccgactgtgatgagaccggcttcgacgaagaactaccgcaacccgttcgatatcccccggcgggatctgatcgacgagattgctcgaatgagggagaacttcttccggctgccgaccagtggaattgcggtgttcaccaaggacagtgggcactgcttgccgattgcggacatgggtaactaccaggagtatctgaagaacaaggacgcacccctgagggagctggaaccaacgaacgtgcgacagcacatgttcggcaatccgtacaagaaggacaagaacatggtcatggtggacgaagctgatctgaacgagattgcaccgatgaagggcggacgaggcgaagtggcaggggctttgaagaatagaaccgatccaaatgcaagactgagccggaagcggaaagcgggaccaattaggaaggattacgtcttcaaacggcggtgtttcggactgagcatgagctcttcatccagtgtgacgtcggaaacgagttctctggcagatttcacatccgatgatgatagtgcttccgtgatgagtagcatgggttcggaggcggatctcgatgacgaccaggacggtcgattagtggtagactttgagtttcccaacgacaaggatgaggagagtcctctcaatgcacacgtccgggaattcatcgaaggtccggacgaaggtggcagtattggcgcgggtccacctcctccggattcgataaatatcgccattcccgagtatccgattcctgccccaatgccctatcatcaccttcatcatcacccgccacatccacatcaccaccatctgcaccaggcgattcctccccaggttagcctcgccgtgccctcctcgagcaccacttgtttgccaccactgaccaccggaaacagcagcacctccaccagtagcagcacttccagttccatcagtttagcatccactagcgcggcgtccaacgacatgaacgacgtgttggaaatctccaacatccttaaaacgtgccacaatggcaacaatagttacgctacccctgaggaacctcctcctgaaccggagcccatcaaacctcacaaaccccccaaaccgagtaaaagcgaacacacgacctcaaaaacggacagcacgaccaccacctccgcccctgttagcgaacgtattcttctgaacggaggagaccacttccccccagcgacgtcctcctccaaggcaccttccgctccggtgcggaaagctccccgaccgctctccgaagccgagaaggaacgttgtcgcgaggagaactacgagacgcggaccatcgtcttcaaggacatccggcggcccgggcgaaactactcccaactgctggagcatctccacctcatcaagggcgatctcgcgctcaagcaggagttcatcgaaatgtgcgtccacgaggcgctacggtttcggaggcggaagatggccgacagcatccaggagtggtgggatggccagctggaagcgatgaaacaggaagagaagcttctgctaaaacagcaagctaaggcaaattgtgttaacaatagtagcgcttattcgaatcaccaatccgggagacattcgcgactgtcggccaccggaagtagtagtagtagttctgtcaacagcagcagcagcagcagtagtagtagtagtagcactagtaaaagcagtagtatccttttcccccaccagtcacatccccccaacaagcagcagcaccaccacgggccacacaaacattcgaatcatcagagcggaagcagtcggatatgagaagcgaccggaagtgcacacgtgctgcaactggggcgtgttaaattgtaaatttgtacccgaaacaaaaaacggttagtttcttcttagaattttatttgatcaattgttcaaagtgtagttaaaaaaatgaaaggactgagaacaaaaaggtttagttttttcctgcttccggttagccaagggtgtaaaagtagttcaaaactggctgaaagtgggtgtggccgaaagtggtcgtcgaatgtgcgagcgagagagcctttatataacacaatttgttctacacgaaggagtagtagttttgttaatgtttccccctcccatttttttttttaattttaaaagaaagtatgcaaaaaatgatcacgcaagtaagaaaatttaaaaaatcaaattgaatcactgatgataatggcagaaaaacaaaatgtagcggtaaggacaagagcagttgagtgtaaatagataaatgttaaataaatcgcctacatgataagaaaaa

SEQ ID NO: 638 - DNA, 2172 bp, Aedes aegypti
agctgcaaggtgtgccacaagcagtttgccaacgtgtaccgcctccagcgccacatgatttcccacgacgagtcgacgctgctgcgaaagttcaaatgtaccgactgtgataaggcgttcaaattcaagcaccacctgaaggaacacgtgcgcatccactcgggcgagaaaccgttcggatgcaccaactgcggtaaacgattctcccattccggttcctactccagccacatgacctcgaagaaatgcatcagcatggggctgaagctgaacaacaatagctcttccgtcgctaataacaacggtagtggcagtccaagtggcgcaagtggaaagtccgagaaaagtggacgccgatctggatcttatcttcccggaggaagtccagcagctgccgggctttccaacggacagcttgccaatggtcagaacacgaccaacaatgccaattcgaacacattcttcccaatgcttccaaagtacccgaactacgaaacggctgcattcctggcctcgttcaaccatttgtacccgatcaatccggtcaatcccgcattcagtccctacagtatacagcgtttgatagaattgtctgccggtgcggctgctgacatgatcgaagaggtgaccgagaacgaaaatgaggaagaggaggaaccgaaactggttatggatgttgacgatgatgaggacgaggcaccggagaatgacgaagacgcggagaaaaaagacatcaaagtagatgaagatgacgaggaggacgatgagaaacaaaagtttccaatcgagcggcgttccgttcagccatctccggtcgtccccgagcatcgtctcaccgaagatgaggacatggagaaggtagacgacaagtctccagtgcttcagtgctcacagtgccatgcgaccttcaaccaccaggcggagctcattcagcacgaacaagtcctgtgtcaatcactgctcttccagaaacagatggctgcggcagccgctgcagctgcagccgccagcaactacctaccaatgcacagcggcagcgaagacgatacagacttcgacggctccaaagtatcttcggagcgcagcggtaaggtccgtgtacgaaccgccatctccgaggagcagcaaaacgaactcaaaaagtattacgccatgaacaacaagccaaatcgcgaagaattccaagtgatcgccaaacgcgtcggcatggaagcccgcgttgtgcaggtatggttccagaataatcgatcgcgggaacgaaagatgggcaacctcaccaacaatcgcaccccgatccaaacggaaagctccgcgcctgcgatgttttccgctgatactcccacccctagtcaaccaacggaaaccgatcaaccgctggatctttccgtcaagaagccggaatctatcccttccagttctccacgttacggcacggccccccaatcgcaacccgacgccgctagccttctggacgaagccatgaacctcagcgtcaaatcatcccgaagttccacgcctttcaagggattctatccgtacaaccagttttccactgaaatgatgatccgccaaacgccctcgccgaacgaagccgccgctcctcgtcaaaatcagcagatacgccctccggcagtcgccgccgtctatccccccatacccccaacagatagcgccttcataggaatggatcgcttcctgcagcatttcccctccgaactgacccgcgcaccaatccgcgccgatagtctcagccctggggcggagaagcgggcctggcgcgatctggaacagtacgaagccgccaaactgcttcagatgcaatcgatgctgaacgtgccgaagcgggtgctctactcgacggccaacaccggcaaggagcaaccggacgccgaaggccaatacatttgcgaccagtgcgataaggccttcagcaagcacagctcgctgcagcggcacaagtacgaacattcaggccaacgcccctacaaatgcgtcgagtgtccaaaggccttcaagcacaaacaccatctcacagagcacaagcgactgcacagcggcgagaaaccattccagtgctgcaagtgtctgaagcgattctcgcactcgggttcctacagccagcacatgaaccaccgctactcgtactgcaaaccgtacagggacggcaaataa

SEQ ID NO: 639 - DNA, 3076 bp, Aedes aegypti
gcggtggaggcggaggcagcaacaacaccaacagcaccagcacaaactcaacctcctctagtggtaacagtagtagcaatagtaacaacaacagcagtatgtcctcctatctgtcatcgatggcggcggcggcagcgaggaacagtggcggcagcaacaacaacagtagtgcaaatagttccaactaccctagcagcaatagtgcgaacaccccttccacgacgtcgtcgagcggggccggcagtcatccgcagatgaaggaagagcacgaaccgaacagttttatcaacatcgacgagctgccggtaagtattttgcgacttggctccaactttggcgtcgtcccgggtcactatgacgaccaggaccagtaccactcgctaccgcagccggaaactcagacgccttcgcacggttacctggacaacagcccggagttctactcggcgatccagatggagcagaagtacatggcgccgcactacaaaaccggaccgtacacgagtcgaagtaaccggtaccaccaaccgcacccgcacagtggagtcggaaccgggggaccaggcgctggcgccggttcccagggcagccaccaccaccatcatcaccagcaccaccatccgcaccacgacggctaccacgagtacagctcgccgtacgacactccgccgttccagaccgtgccgagcaacacgacgtccccgcaaggttccggcaacaacaacgacagcaccggtctcggcggccacatggatccctggagccagctgcaccacccgggacaacatccgggccacccgggagcccatccgacgctgctggacttccaacatccggcctacatgggcacgaccatgggcttcgacaagaccatgctcggaagctacggtgcgcagggcggcacgcccttcaccggctccggccccatccagctgtggcagttcctgctggagctgctcaccgacaaaacctgccaaaacttcatctcctggaccggcgacgagtgggagttcaagctgaccgatccggatgaggtggcacgtcggtggggcgtccggaaaaacaagccaaaaatgaactacgagaagctcagccggggcctccgatactactacgataagaacattatccacaaaaccgccggcaagcgctacgtctatcgttttgtatgtgatcttcagactctgttaggatactcagccaagcaggtgcacgaaatggttgacctcaagccggacaagaaggacgacgagtaaactaaagcccccaaagcatgctacttgctcaaagagagaccccccccccccttcacgaatccaaatccaagcgaaagggagaaccagcaatccggcgcttcctgattacgaattgtttccccgtgtgaatcgtgcttccaaaacgaacggcaaaaccgaaaaaccaatcgtgttaccctcattctacctttttgtttaagaacaaacaaacaaaactgtgtttcttcccaaaaaacaaatcgaaaaactatgatcgtacttttacaatgtaccaaaaaaacgcaacacaaatcatcctagcaggctgagacgagcgcggtcggtggagcgcagcaagcgcgtgtgccttaacggatccagaacgagtcaacctctctatctagtagaccaaccctgaacgtcagtcatcctagtaggcgcttgatatggcgcgctcagtggcatccatggcgaccaacagatttccccttcaaagcaaaaccaatcaaatcaaatcgtactctcaaaaaatcaagatcaagatcggctcccccagtcggacaaggatcggaaaggtaagcgaaacttaagtctacttaatcacacacaaacacacaagcgagaaaacaatctgtgagagatcgcgagtcgaattcgctgcagaacagagagctgtctgcagcggagaaacaatagaaaaaatatcaaacaaacgtaaaacaaaaatcgaggtgaagcttcgcgctgttgtgcgtaggaagaaggaacaaagcaaaacaacaaaattttattttattttttcccccctgtagttaaaataattatttgtgaagcttttgtgataagttttttttctttatttctatatatttttagtagaacatacttgcttttatatatgtatgtgtaattattagaacctatccccttagattactcgatagaaaatgtaaaaatcattcaaccgaaaaaaaaatcaatgaaaaaaaaaacggaaattcagcagtataaaaatcatgtgaatgttcttcgtagtgtaatattgttcagtgatcgcgtgaaagagaaactcaaaagagtgactgagcggtgtgtcgttaaatttgagtgaccgagctcgctagttccccgtcgaccgccccctggtaacggttgctatggatatcttttcatcttattttattacttctctacaaatcagcaccccgggagggcggcgacggcggcggaaacagctgatctccacaagttaaaacaaataatcagagtactattactagagcttagtttgcgcgcgattcgtgtttattaaatatgcgtgtgtgtgaaagcgagagagaacgcgagcgaacgagtttgtcccacgaatgcgaagctgtgtagtaaaatctaagtgattatcaactaggaagcagaaatattattgtaaacagccaaggaaaagtatcaaacaaacaaaaaaaagaagtcggatcagaataaaagtgtaaaaaagcaaattgtaaatcaaggatgggttcctcagacaatcgcgcggccagaagcaaagcacgtccgtcccgcgccatcactcacacagatccacccccaaacagggggggtttcacgttggtgcgatgcattttttctaaacgcacacacaaaatggaggaaaacgacggatttcatcaaagtatttatgtatatcgatcaaagtaggtttttagttgctgtcagtgtcatgagatgtgtgagagcgatggtaagggaccggcccacgtgtcgtcatggtaactgtctattgttggctgacggtgttctgaaaaaagggaatcctcttctgttttatgatgtttaaaaaa

SEQ ID NO: 640 - DNA, 576 bp, Aedes aegypti
atcatcagtttgtgctggctggccggttccatcatcgggtttcttccgctattcggatggcacgaaacgccccaagtcgacacctgtctgttcctcaaagtcatggactatgactatttagttttcctctacttttcgacaatcatcacgccggcacttatcatgctggcattctacgcacacatatatcgagtaataattaagcaactccgtcaaatcgttacgatgaatccatccggagggctttcatcggaaagccgtcgttcttcagagagcagccgcatccgaatatcggccataaaacctggccgctgtaaatctaatggacacgggggtacgatgctgagagttttgggcgccgcgcagaaacgagaagtgaaggcaacccagaacctatcgatcattgtgctgttcttcatgatctgctggattccactgtacaccataaactgtgtcgtggctttctgccgcgactgtacaattccacccacgttgatgttgttttgcatcatcctttctcatcttaactcggccgtgaatcctttgctgtacgcttatcatctgaaggatttccgg

SEQ ID NO: 641 - DNA, 1923 bp, Aedes aegypti
ccattcaatcgcggtcgtggagaaatataatcagtgaatgctatatttatactcaatttggcgatagctgttccgatcggtttgtaatgatatgaggatgtgtagcatatttcggcgacggagaggacagtacaaaaatcagtgccttacgattgtgattcataccaacgagttgtgagagcagatattcgcttcacctgttcgattgtgatatgcactaccaatgctttctgcatgattcatcggtgtcctatgttgcacggtagttgtttttttatcgtatggaatttacaagcatcttcgtcacatcaggaacgaagaattcatttttaagattgtatgactaataacccacacagagagccacgtttctgagtcacatgcgtcgctgaaatcaaaacggtgaaacttacttttatctgcgactgtgtatgaagaggtgtatcgtgtgtcgttatctcaagtgtgcattgtgagcggaatacggaaattattgtgtgtaactcttcggaggttgataagtgataaatgagtgtttcaggggtagcgccaaccgaagcgacaccgttgaagagaaacgtgcagacacaactcgtcggtgacaatcatcaaacgcaaacggtagttgtgcatgttggcagtaatagtaccgggagcaacaatagtaacagtggaacctcaaatcccagtagtgaagtgccaattattggaaacgatcaaaacgaaaacatggatgacaccaaacgaatattgatccgtgttgggattgactttgtcattttgtgttgcgttgggttcccaattttgatctttttcctcgtgggccaaccttatgagcgaggatttttctgcgacgatgaatcactcatgcacccgtttcacgattcgaccgtcacgaactggatgctgtacatcataggcatagctgtgcccatattggtgatacttggaacagagctggtacgagctcacgtgaaaaaatcgaatgccctgccgcttaaggtatacagcgtcaccataccatactggatagtggaagcatacaaatcaatcggaatgttcggttttggagccgcctgcagccagctgttgaccgacgtggggaaatataccatcggtcggttacggccacatttctttgatgtttgtaatcccagattgcctgatggtaccacttgtaaagatccacaaaatcatggtcgttacatcgaagatttcatttgtaccagcgaaaaatcatcggctcgtatgttaaaagaaatgcgcctatcattccctagcggtcattccagtttttccatgtacactctcgtttattgtgcgatctatctacaatccagaatgaactggcgaggatccaagttattgaaacactttctgcaatttctgcttatactactagcgtggtacacatgtctaagccgaatttccgattataaacatcactggtcagatgtactggctggagcagttctgggttccacagtggcaatcgttgtctccaactactgttcggatctctttgatgcacgcgcgaaacgcacaaatattttgccacagacacgctatgaactcagcccaaaccacactatttccaacggaaaccagcagtagttgatagtgatagagcttacgtagcatatgtgatttttttaaatctattacctttcatgtcgaaaggacagtcgacctacatatttactatatttattatatagtaatggattaatttattttacgtaacaaacctttcaagaagagacagctatttattgattgaaactgctgcatcctgtaagataagatgttgttttaagaaaatgccgaaaatcttccgtttttttttttgttttatgtcattggcaattgctaagcgtgctacaaaattgtattaataaatataatatttttaaacttcatgat

SEQ ID NO: 642 - DNA, 954 bp, Aedes aegypti
atggcttcgtcaggtggagtggatattcaaatagtatcgatgccaaacctgcagaaaattgaaaactatatgcgagattcgacctatcgggaaacgttagaagtcagtgcatcgttcaacaccagattatgcctagaacggaggatgcggttaccattcttcgattcgcaaactggggtagcgcagaatcacagtactctgtacatgaagcactgtagacggatgcccgggcaccgggaaggtcaactctacacatatccatcatcacggtggcgaaagtccaagcgacagtatctgaccaaaatccaaaacctgcggccgtttagcaattttaaaacaagcggaacctccaacatacctctaggggatactgtagaggtggcagcgactaccgagccagacttcaatgcatcacttctggaggaatcctcgctgggagcgactatggacgccgacagcaaggatagccaccagaatcaacccgcccctaaggaagagcctctacccaaggattggtactacgatgagatggccctgaatgatgatgatctggacgacccggaaggcggagactcggattacgactataacgtgaacgggtacaagcgaaagaccaagaagagcaggcgctcgaacgccggaggaagaaaatccaaggctagtcaagcggcggcagccgctgccggagattacgatgccgtggcatcgccaggcggttcatcccgaaaaggtcgaccaccggggggtagttccggcaaacggggcaggaagcgcaaccagaaggaaacggtttcgtccatcgagaaggagttggagagcagcctgaacgacagcctggtggaaccgccctcgttcgaatcggtggccgctgcggtggatctgaacgagaacggcgagaatggggccggctacggaggtagcgcagatttgaggaactaccggaagtacctgtaa

SEQ ID NO: 643 - DNA, 1849 bp, Aedes aegypti
agttaccccgttttacggtacttctattttggctgctttgatacttcccttttgccctgacatttgggtccagccgtgaagtgtccgttgtctgctttgtcgacacttaaatcaaacttcaggaggctgttgtatgctatccaaaccgtgtagatactaccagtcaagttaaaatgttttctcattctcagcacgaaaaagaaaagctgcaaataaacatctgttcgcattgaaagatgcaaaaggcgaaatagcacagaatacactgtgtaacgcaaaccttgtaggtgataattcaacaacatatttataatcttacatacaacacaaataaagtgaaactttaatcgccccatcctgtatgtgtcatctatctttaacgtttcgttttagaccatcatcgaactgtcggaacgcggaggtggcggcttcgaaccgtccgccttctgctcggcttgcctggtgcgccgtccggtccgatcgaagcactgctccgtttgcgatcgctgtgtggcccgtttcgatcatcactgcccgtgggttggcaactgcatcggcgccaaaaatcacaaatactttatgggattcctctggatgttgatgatcatgtgcgcatggatgttgtacggaggagcaaacttctacgttcaggcgtgcagtgtcaatatggaagaaggtctgtggaacgccattgtcgcgatcgggtcctgtaatccgtgggttggctgggtaatggcgaacgccctgctgcacatgtcctgggtgacagtgctgacgatttgccagacctaccaggtcgtgtgtctgggaatgacaacgaatgagcgtatgaatcgaggtcgttatcgtcacttccaggccaagggtggcaagagtccgttcactcgaggtcccatcaaaaatctgttcgatttcatggaatgcagctgctttggcctggtacagccactgaaaacagattggatgcagtatttcgacttcgacaagcacgtggaacacgaaccactgcttcgaccggataactttcagtacgtctgaagaaagcgaacggaaactgcggcgggagagaacgaaaccgaaaagaaagcaaacgaagaaatcacaactggaacagagcttggagtcggatctgaaacgactggtaatcgacaggatgctccagaacggtttgaagcgcaaactgatctgacaattgcagttgctgatgaaatagcgatggtttgagggtatagagaaggcatttcgttaaagattcttttttccttcacgattgcttctcgctgcttggttttccatttaagattgtgattttaagttgtatcaggtgaatgaaagaacaaagaaaggctttagatagtatagtagggtaaagttaattgaatgtgcttaaatgtgtagaaatctgtattgagaaaagccgatcaaccaaaaaggcgacaaaaagacacgaagtatatatttggtatatatttatcgtaaatgatagtacagatgtttaagcaatagaaatttagttgtagcacgttagatagattgtaaatgttttcccaaaaagtagttttattagaaataaagacgtactagttttcagtttctctcagaattgatcacagtactatcgttttgaaatacatgtattatgtagaaaccggcatatagatacagatacctttccaagagtgaccattctaaatgcaatatacatatgtaaatctgattgacaaaccatagcaacagtcaagtgactgattatttgtttcggatgaatgttttattttttactatgcaatgatagttgctttggcttggtaaaccattaacggttttgcgaataaaatccttgaacacc

SEQ ID NO: 644 - DNA, 3258 bp, Aedes aegypti; identical to SEQ ID NO: 341

SEQ ID NO: 645 - DNA, 3676 bp, Aedes aegypti
actcctccggtcattgtcgccaatgctgtaggggacggcactccgaatgtgcaatcaccggagaaccgcgtcggacagtcggtgttctatgattgtctggacgctagcccaatggtggagaagagaatggacaaatcaccctgcctagcgtcggaaacggatgaggatttgtccgacatcgatcaggagtgtacgattttcagcggagtaacgtatttgggggctactcgtatcaacgctcccaagtcagagaaggaaatcttgcagaaggtttcggagatgaatggtagtgcgagcacatcgcctctcggaatgaaggtgtccgttagtattccaacccggtcggagggattggttgtgctgtacgatggagagtcgaatacagttgtggcaacttacgaggttcatcggattttgttcttcgctcgtggcccagtgaagaccaccaatcaagcgtgctttgcctttacctggtcccacggagaatcgcaggaaactgccgcgcatcagtgccatgtgtttagatgcaacatcccggaagcggtctcacaagttagcgcttgcttcgccaaagccttccagcgggttcttccgccgagcgttccggccagtatgaccacttcgctggcggacagcagcgccaacgctatgctgtcctccatcacgtcggacagcgcaggcaatccgatccagtcggccatgtacgagttcggcatttcgttggagatcaaagagaaggacaagagtagctacacaaccgtcccgcgcgatgccaagtccagctttcggctacgatgcaacaccgacaaggaggtgtgcatcgtggtcaaacagattccctcggagcagtttcccccgttgttcatcgagcggtgcttcggcgttctgctgagccctgggaagattgtacggcaagccgatatgcaactactggatatggtattcgcgccgccaccggtgccaaatccgatgacggcttcgatcacatcccttgccactgcagccagttacgcccagttgccgtaccagatccgtgcggagtggaaagccaacgacaaggcgttcgaacaactcaatacggaaacgcagaagaaatcactgaccgttgcggtcgatctagtcatcaagggtatccaggaaccggtgcgatttgtaatcgaaacatccgtgatgattctgtcgcaaagcgaacttcggatcatgcaaaatctgttcaccaacaaaaggcttctggtgatgcactactatctaaccctgaaggaaagtggcgaaggcaattggaaggtggaatcaatcgatcattcggatgaaatcgttgagcctacgccaccggcatcactttcgttgaacttgaacttcaaaacgtggacgttcaaaacgtccgccagtgtgcaatcgatggagttcgacgactccagtccggactatagttcggatggcgatgaaccgcttctgagtggtaccggcgaagtatccaaagaatgttccagcgcgctgctggaagattggaacgagatcttggtggaatgggatcgtgacaacccggacaagcgaccaaagaatctggcgtacttggttcgcagcggcatcccggatatactgcgagggacgatttggcagaagttggccaacgtggagaacaaaacggatatggctgattcgtaccgtatactgattaccaaagaaaccagctgtgagaatgtgattcaacgggacatcaacaggacattcccggcgcataggtacttcaaggataccggtggcatgggccaggatagtttgtacaaagtgtcgaaggcgtacgcggtgtacgacacggaggttggctactgccaggggttgagctttatagcggccagcttgttgcttcatatgcccgaagaggaggctttttgcgtcctggtagccctgatgtacaactacggccttcgcgatatgtacaaaatgggcttcgaatcgttgtacctccgcctgtatcagctgaatcggctgatgaaggatcagctgccggatttgtatgagcacttcctcaacactggagtcgagtcgcacatgtttgccagccagtggtttctgacgctgttcacggcacgcttcccactgtacttcgtattttccattctggatgcgttcctcctcgacggagtcacggtgctctttcaggtggcgctaacattgctctctgtgtgcaaaaaagatctcctggaactggacttcgagggaattctgaagtacttccgtgtgacactgccgaagaagtgtcgcagcgagaatcaagccaagaagctgatgaagctcgcgttcgagtgcaaggtgaagaagctgaagaaatacgaactggaatatctggccaagaaggaggaaaacgagcgcaaagaacgggaactgaagcagtacgagttgcgtttccacgaggaaaggagcaaactgcagcaggagattgtgacgttgaacgaaaaaatggaagccctcgcgaaggtggacaaaaagaacaacgggatcattggagactacaagcagataatacagcgacaagagaatgagaacaacaagcttcaccaaatgttggaggacttgacaaaaaccgtatccggctgttccaaatgttcgtccagtataccgaagtcttccccgttgcataaatcgtacggcaagaatctgcagaatgccaacaatgagaacaacaatgatcaaacttcgacccaaacggagagcaatctcggtccgctggatccgctgctgattgcgaaacagaggatattggaactggagcaggagttggcacaaaccaagctagcccaggtagaagcggagtgtaagaatcaggatctccatcatcagctcaccgcaactttgaccgagctgcagacaaatcgcagcagttggcagccatggttttccaaaacgctgaactccattcaggagaaggtggtaacgaggcgcgatgtcaacgctccgatggccacgttccaatcttacaccgattcaagtgtaaaacatcgtgaacattcccataccttgccggcgcagacacaactgcgcaacaagctgaaccaacgccacagtctgggccaggttggattcgaagcggcatgtggcgatgatctcgttcgtccgttgaaaaccggaagcagtggtgccgccggagatgccagaggcggatcagattcgtacctttttctaaactggtacaaacgacatagaacatcaaatccagcagaagtattttcaaagattcgagatttttcttccggtcggcaaagccaattgaacatcacactggtttccctggaagagatttaccatatcagcgaaagtgtctcccatgtcaagctatggtaaaacatcttcttctccttggcattgcgtcctcactaggacagaacctgcttctcagcttagtgttctaatgagtacattcatagttaataactgagagtatatcgtgtggcaggaacgatgatactctatgccccagggacgtcaaggaaatttccattacgaagagatcctggactgaccgggaatcgcattgctttgctttgtagccgcggactctaaccactcggctaaggaaggccccatggcaaaacatgctttttattatatcattatatatgtatataaaattggtgtgaatattggaataaaaataataaaacttgaatatgtagta

SEQ ID NO: 646 - DNA, 2591 bp, Aedes aegypti
gtatcgttttattcatatggttttaagtaaatgctcaaagactttactttgctaaaatctggctgagcatgagcaagtactccggtttattcatatgacctattgcataccgtcctgcctttcaaatcgatcaccctcgcaccgatggatcgcgttcacgcaaaccgttatcttttcgccgtccgtcaagcagctgagtcatcagctgatcgttgcgcctgtgttggttcctgcctgcctgacagctgtttgcactcggtcggtctttgtcgcactcgcagtccagtcgtcagtttcactctagcgttcactctttgcagtcgatcagtccgtcagtctgtcagtgtgtaaataaataacaagccttttgctcttttgcttctggtgcgcgacgaaaaaatctaataaaacgtagtttagtagctagtggtttattattagtgattctctcgttcaattatgcgcgtttagttttcgaaaacggatcaatcgcgtcacaaagagacgcgataaagtgaaaaacaatttgacgagacgggaaaaacattgtgcttgataggagaagggtagtttctgcttctccgaagtttaattgcaaggaaccacagtaaatcagctcgagcgcaataattttgcgcagtttcatcatcccgcgggcagtaaatggccatcagtctgatgtcggatggcggggctccggagaatttccacatttcctacaccaacgatgacgacgattccaatctgagcgctagcgctatgcgatgtcccctgtgcaactactcgaaacggcacttccattgcaaatcatgcatccggaagggggacttcatacactcaacccatcacatactggagagattctccgagaagcaactacgccacatgaatctgaagtccgcccatgccactttggaaggcaaatgcgtaaaactgttggaacgccggaggctcagctgccagctgcgagcggagataaagcagcggaccgagaacattgacaacattcgcaagctgatggccctgaagcgagagaacgtcgggcgcctgcaggctctgaggaaggaactttacgaatcgaatcgactactgcggatgaagcttccgcgttgcgacgaccaggtcaaacggattagctcctacgtgctctcgaagctggaggaaagcgaacggcgtagggctagtatcaatgagctgcaagatgaaataaagcagtttcgacgggatcagattgggaaattgattcgatacatctttcccatttcacgagctatcagtaaccggagtggtttctcgagcagtgacggagaaagcaagcatacgattagtgaaatctccgacgctacccggacggcatatgtccgaggaaaatgggtcctgcaggatagcttcggagagatccaacacattatcgtagctccggctttgccaggaaatgggaactattcggcgtacaacgactgggccacggtaaacccagcaacggacgtcagttccacgggaagaagcgaagacggcgttcgcaacgtggccagtagaaatcctgcgcacacaatcgctgctgcactgacctataccgcccagctagtgcacattgtatgcttctatctggacattcgtgcaccgtataaagtatcgtacagtgatttttgcacaacggctctctcggaggcacagttcaaccggaaggttgcgcgcctcaacgccaacattctgtatctctgctacacccagggctgccagttgaacgaattgcggcccacccatacgcttgagaacatccaaaggctgatgaactcgacccatgcggatttgggtcggttcggaccggtggacagaaacttctgtctcaatgaaccgaccgatgctgcgctgatacagcatctcggaatcggcgaagactcggattctgacggtaagactacttctcatggcgtgtatacggcaaaggttgattacaaaaaataggcatcgtcaaatctctcagtactcgaaaatatgggggtttatgcgatgtcgtttatttttgtgataatattgttctatcaggcacggcgtgacgtctgtgcactgttcaacaatcacgttacgcacgatcacacatgtttccctctttttagacgaatccaacatccaccaggagtgggaagcggtggcggtacctccggcggaagccaacatgcttttactgaccggaacggctggcggaaacccactgctctacggcaatactcatcattaccaaacgcagcaacagcagcatccttaccatcatcaccatcaccaccacaatcaaccggcgacgaccagtttgatgacgagtgcggtcgcttcggtcacgtccttctggaagggttggaccggtgggaaatgaacggtcctccgtgagacactgttcctctcggaacattgaagtgataggcgactggacatggacgttatggtgatgagaatcgatagcttacgaggacgaataaaaagtgattttcatttcttcacagttttagccgccaaaatataacttttatttttgtacaccgcatagattctaataaatttgcattatttgcattttctaatattcaaagcaa

SEQ ID NO: 647 - DNA, 1626 bp, Aedes aegypti
atgtatctcacgagcaaaaggttggacgtgaaactgttcctatggggcctgtttctgctgcagatattcctgatatcagtcttcctggcgttcgggtccctgctggccgccagcagctcgatccagcaggatgaccaatcgtccggggctcggaaccgttcgcagtcccggtcaacggcctggttcgacgtgaaattcgtcaacaatcagagctcttccgaatctccgtcgcaaacggcggccatcgagggacggcagaaagtggtgggcggaggacatatcagacacccacggttccggccgcttcagctgaagacagtcgccaagccggacgattacaccaagtattataggcccatccactatcacgatggctaccgagagcacactcatctgtgctttatcgagggaacccatttcccgaccgcgaaaccaaaaaagaaaacacctcccacggcaccgggacggcaacccgtgggacctatcaccaatgagactgacttcgaagcaggagagttagatgtagtagtagtaacagaaggaacggaagacgaggaagataatgacatggacaatgaagtcctagtggacgggcgctgtcgctgtcggccggaatggcacggtccggattgtggcctgccggaagtgctctggcgtgcgttcattgcctctcgtatcccaccgaggaatcaaacggcagcaccgcggaaggtgccgaagaatgtgttctacattatcgacgccaacttcatcagtgtggaactgctggagattcagatcatggaactgctggatgtggtgagtttgttcgtgctgtgcgatcggcaactgccggtcgccgatggagtgaagagtgagacctatacaataggaccgcatgtgatgagtactgattttttgaaggcaaacctagacaagattctcctgttggaggatccgacgtgtagcggaaggaacgtttttcggaaaatgaaaaagtttgtccgcaaaagtgatatgcatgtggaagacgtgctgctgtacagccaaacggatgaaattctgaatcgaagggcagtgaactacttccggtggtacgacaactggccgcatccggtacggttccgactgaagtataccgtctttggcttcttctggcagcatccgaagagcaccttcatcggaggggccgcctgtcaattaagtactgtggacgaagctttccgatccgacccggaagccctgctaaggatcgaaaagccggtgatgctaattggtgatctgaatcattatggcggttggtactgccgacactgctaccaactgatagatatagtaaaatatttagagtttataaccttagtcaatactaatactagcgctagcatcattagagccaaccaatcgtcatcgtatcttcccgatccgaaaaagagtaccgttatgaatgtggaatacattcagaatctcattgccagcggaaagtatttcgatgacaaaaccattctcactaagctacagcgccacgtggacaagtactacgcgccagagtatgtgcacaaaaacagctggcggttcgataacatcgtcatcaatctgtttgcccgctgggaagatagcgtcatcgatgacgagtactttagttag

SEQ ID NO: 648 - DNA, 1778 bp, Aedes aegypti
tgaagatcagcctgccgtaagtgagtgagtgtttagatttcaataatggcaacgaagaaaatcggtttataacttttttttctgcttcccaaagcggaaaattcccggcttgcgtctttttacgtaaaaagtagtgccccgcgaagacgcagcaagtgttattccaagcgttctgcatttactttgttagataagattttcatttgcgcaaacagtgaatttgtggatatttggcgaaattttcaagtgcggcattagcatctacctgagcgatacagtaaccaaatctacatagcaaaatgcgtctatttccggtgcggatgtccaacatcaataagatgttggatttctattcccagttcaacccttcacctttaagtatcaaacagttcatagactttggtctcaatgcatgtcccacgaagtcgtacatatttctacgtaaggagttaccagtcagattggccaacataatgaaggaaatcacacttttaccagaaggtctgctaaggatgccttcggtgggtttggtcagtgcatggtacgtgaaaagttttgaggaagtccttgagtttgagaaaacagaacccactggtgacaatctagacaaattctgcaaatctctcatacaaatccgtgaccggcattcagatgtcgtgcaaaccatggcgcagggaattctagagctgaaagaatcgcgaaatggacaaatcgaaccatcgaccgagctctcaatgcagtacttcctagaccggctgtacatgtcacgtattagcattcgaatgctaatcaaccaacacacgattttattcggagagattccgcaatcaggcagacatgttggatgtattgatccattgtgtgatccgcacatggtcgttcgagacgcttacgagaatgcacgctttctatgtgaccaatactatcttgctagtcctgaattagaagtgatagaacacaacgatctggaaaagggtaaacctatcaaaatagtgtacgtaccttctcacctgtatcatatgctcttcgagctattcaaaaactcaatgcgtgccgtaatggaataccatggtgccgaagatgatattccacccatcaaggtcaccattgtcaagggcaaagaggacatctgcgtcaaaatgtctgaccgtggcggtggcattcccagatcccatgtcgatcaactgttcaagtacatgtacagcacagcaccgcaaccgccaaaatcaaagtccgacctcccgcttgtccccttggccggttatggctacggtttacctatttcgaggctgtatgcacgctatttccatggagatttggtactatactcatgtgaaggatacgggtctgatgctgtgatatatttgaaggcactttctgacgaggcaaacgagctgttgccaatcttcaacaagaccagctctcgtttttacaaggccaccgtgccaaccggagattggtcaaatcagaactcggatatgaactctaagcagatgaacgcccaaaccagacgcaacacgacagtatccaattgaattcaactgagtgtgcttcacagtcatcgtttttttatatattcaccaaaaatgtctcatgattacataacacacctatgttattcagcaagtagttttttgactagcaaatcaatgttgctcttatcatggtgattagtgggttacagatctaataaaaaaatatcatatcaccataagcatctctgttataaactactatggccaataaacgcaactatggattcgttatataatatagag

SEQ ID NO: 649 - DNA, 2150 bp, Aedes aegypti
aatatcccagtcgtcggtggaggagacgataatgtgtttgcggtgcttaatccaatatttatgcctgtgcaaaaattgcggctgcggcatttggcctacttctgcagactgatgttgaggcaagcttgtgctctaaatgcaattactctttactactttgaatttcgccaagctctggaagcatccacgaccgcttcgcagatcgagctggaagccgaagaggagcccacgatcgagctgccaccgcccatgaaaccgatccaggatacaaccacgacgttgtctggtaccccgtctattggtgaggggggtagtagtagtagtatgggcggaatcggtcctggagggctggacgattctaccattggggtgccatcagttagtaacggagggggaggtagcagttgtgcagctagttcaatcggtggaagcggggctgccctgattaaagcgcccacatcgccacagtattttgaggttgagaatctggacgagaacttagctgacgagcagggtatcgatgatattctccggaagcggatgtttgctctgaaagaactcgtaaccacggaggaggcatacgtaaacgacctgtcgcagatagtcaatggctacattgccgagattcgaaatcccagcagcagtgtgccaatcccagatgacctaaagggtggcaaggagcggatggtgttcggcaatatagaagcaatctacgagtggcatcgagaccactttttgaaatcgctacaaaagtgtcagctaaacccgcacgagctgggaccgctaataaagcgaagcgaacggaagctgcacatgtatgtcgtgtattgccagaacaagccggtgtcggaacacatcgtgcaggagcatatgagttacttcgatgaattacgcttaaaattaaaatataaattatgtttaggagatatgctcattaaacctgtccaaagaattatgaagtacgagttactgttgaaagatatcctgaagcatactcagcgggccggtctcaccgaggaaattccaggattgaaagatgcaatgcatataatgcgagtagttcctaaggcagccaacgacatgatggatgtcggtcggttgcagaaatttgagggtaagataacggcacagggcaagctgctgctgcacggtccgctttactgtgtcgaaggtgccagtagtagcgataagaattcgtataacgcccagaagccgaaagaactgcacgtgttcctgtttgagcagaacatcatctttgcggaaatcgttggcaagaagacgcagttcacgagccctagctacatctacaaggcacacatacaggtgaacaaaatgaccctgcaggacttatccgaccaaaccaatggaaatcggttctcgctttgctcaatcgatccgcagcgctccagtctcagctttatctgcacagcgccaacgatcgagctgcacaacgagtggctcaacacaattcgcaacattttgcagacgcagaatgactttctaaaagcaatacaaagtcctatcgcctaccagaaggaactaacaaaggactcataaataccaaccaacaaaacaaccaaactgtaacaagcaaaacatacacaatcatgctgtaggaagcgtgatgactttaaaaagcgaagcgaaaagcatctgtttacaatcaacattcggcgaaccatggggaaggaacgcaaaccatctaggacgacgacccgggtgaacggtaaggtacacgagtttcaaacggtttgattttatactaaagctcccagccgccgcatcgttcgaagcagtgatgacaccagccagcagcggatataggctcacattttaaacccaatgtgagggattgacatcaaattttaagaacaacaacctacaaatcttaggtaagccacaaagtatgaacaatttgtaattaaagtaaattattatacagaaaacgagtatgacaaacatcaatatacagacaaaaaagtgatgatcaaaaagtaaatcattgaacaatgagaacccttaccaaaaaataatggtttgtgaaaatcgcgcacgtggagcgtttaatatggataacataacataaaacaaattctacatttatattgcattcatgagtaaaacagcgagaaattacaaaactgcagccg

SEQ ID NO: 650 - DNA, 4413 bp, Aedes aegypti
atgaagcagatcaatctggaggacactccactgacgatggcggcgatcgtgcgccgtcgggcggaagccatcaagcacaacagcgagtgcgaaacggacgaccagcgacacaatcaaacgtttccgccactcggtacgggtaccatcgcggcatcggactcgggagtgttcatgtctacctcggatatcgaccggacgcatagtgcgagcaccagcacgcaacacctgagtgccgtcgaagaatacacggaaggtcaaacggcaccgaccaagtccagttacgtaatcggcgaacaggacgaagatgaagacgaatgtcaagtggacgacgaaggcgacgaggacgagggagaagaggaggacgtcatcgaactggatcaatcacacgagagcaagactgataggaaattgagtaaacgagcttgccagagtctaccggacgtgaacagtcctcggccaaacgctttgaaagctaaaggaaccacctgtgatagtagtagtgatatacacgtagcacctaagaaggatgagattgagctgcgggcctcgtcggatgctgccaaaccctgcgatacggggggccacggcaagcaagcgacggccccggtagcgccggctctggccacttcccagcgaaagcccgtcgatccgagcctgctgcaggcgttctccatcgatccgaagctgatcaacaagttcgacgggctcgagcacacgctgtactacatcgacgagaacggcagcccgaagctgcgggacaagttctcggtccagcagcagctggcggacgagaagaagcgccggaagaaggcgaagaagctggagaagtacggcccggacggggaggacgatatggcccagtgtacctgctttagctttagtaggctatcgaaaaagttccgggatatgtgtaaagatggttcaaaagtgacaacggttgtggcaacagccggccagggaccagacagaccacaggaagtatcatacacagataccaaggtgatcggcaatggaagcttcggcgttgtcttccaggcgacgctctgtgatacgggcgagctagtcgcaattaagaaggtgttacaggacaaaagatttaagaaccgcgaactacaaattatgcgacggctagaacactgtaatattgttaaactaaaatatttcttttactccagcggcgataagaaagacgaagtttatctcaacctagtgctcgaatatattccagaaaccgtatacaaagtggcacgttattatgctaaaaacaaacaaacgataccaatcaattttatcaggctctatatgtaccagctgttccggagtctcgcctacatccactcgctcggtatctgccatcgtgacatcaaaccccagaacctgctgctagacccggagacggccgtactgaagctgtgcgactttggcagtgccaaacagttgctgcatggggagccgaacgtgtcgtacatctgctcgcgatactaccgggcaccggagttgatatttggtgccataaactataccacaaagatcgacgtctggagtgcgggatgcgtactagccgaattactccttggacagcccatcttccccggcgactccggcgtcgaccagttggtagaaatcatcaaggtcctcggcactccaacccgggaacagatcaaggaaatgaaccccaactatacggaattcaaattcccccagatcaaaagtcatccatggcagaaggtattccgagcgcgtaccccaccagatgcgatcgcactggtgtcccggttgctagagtacacgccgggatccagaataacgccgatccaagcatgtgcgcatccattcttcaacgagctacgagagggcaacaagacactaccgaacggacgcgagtttccgccactgttcaacttcacagagcaagagctagcgattcaaccaaacctaaatctgatactgaggccccggaacccgaacgacgcgaaagccggtcaatcgtccagctcgacggacggtggcaacagtggcagcggcggaaacggtgccggagccaacagcagcacagtggccggtagcaacagcagcaacaatagcggcacaggtaacggtggcagtagcaatagtggcgtcgcgcccgacagcacccaggggcaggggggcggcgccagcggtagcagccagggggtgggagctggggcgcagtccgtcggcggtgcggaggatattacgtcatcacagtccgtacccggcgtcgacagtagttccagtcaaggagctatagcgtcagcggcaacttctacgatgggttagctttaattcttacacataaaatattatattatatattttttttaattttaaaattattaatttaatgcgaggatggaaataaaaaaacagaagaacccacggcaagagatggaaaataaggcaaaatcgtgaaacaaaagttaataaaattactagcaaggtaaaaaccacaattcagcaaaaaaacagaattacatattaatacacatagacgaattaattaatattgaaacacccacacagaagaaaaaggaacaacaatactaatcgagcagcaccttgcgcatagccggaatacgcgcaaggttctaaatcaagtaaatcacaaatttaccttcaacgagaaaagataaattctgagagtaataaatatttcaaatcaatattattctaactaatgaacaatttaaaacacacccacacaaacacaaaaacacacatacactctcacacaccaaactactagaggatcaaaagtcagtcaccgtaagtaaaaaaaaagaaacacagacttatacgttctgaatgaaaaaagtagtttcaattcgctagttatagttattgaaaaagagcaagtttagtttttcgttctcttgtgactgttgtgcaaactgaaaaaaaaataattataatcgtaagccgactaaaaaatatatccaaaattgtcaacaaaaacggatacggaaccgttttgcatgtgagagctataaattcgtgtccgccaagccgcgctaagagtcttctattgaagcggagacccgtgcggcaacgcgatggtgtatatgttgcttttgtttctgctttcggttagtcctcttttctttaatcggttcttcgtttgtttatctgtttctttttttgtgtcgttttacccccggcacccacagcatagatgctcgggcaaggctggagaatctagtttcttcttttatttaagtcaactttgaggaaagggaagtgtataatgttgcataaaataatgaagtaaataaaaaaaatcaaagtgttatacccccgaaactaagcaagaagcaaaacatattcgttagaaattgtgcgcgaagcgcgtgcgatttttttaagaaaagtgaaaattgtgtacgtgcatcgatttctattatttcattaaataaataaaaaacgggaaaattgatgaaagcgagtcgagcgttgtacgtatatatcttgtgtagtagtgtgaaaaaattgtttatattactattaacgaagtaaaggaaatttagctactagaaggatacacactcacactcgtagaaaatggaagaaaaaatacacaagtaccactaaaattacaagtacagatagcagacttgagagagagcgagcgagcattgtaaaatggtgaggcaagcagcaggagaacatagcaagaaaataaatacaaaccagcattattcaaacttcttctaatctttgcaaatttgtcaactgatccacacagaacaaaaaaaaaacagtctctccaatcagctgtgtctactagtgaatgaactctacgccagagacaagcataattataataatcaaacaataaattattttaaataaaaggaaatacagagaaatcaatgaaaaaaaacaaatggaaaaacctgtttttgtagcataaagaaagtatatatatattaatgcataagtaatttaaatttgaatctaaaagaagcacagagaaaagaaacaaaaaaaaaacaacaaggaatgtagatcttcacttatgattgaacatactgcggaaaagaatcgagtgcgcacttgtttgcgagaaccttgtggtgaagagaaaaaggaactagccgaaaaatgtaattagcgtaaaaacacacacagtacccaattggaaaatatcgttgtcgccctagagcaagtaacacagtaaaggaaaaaacaacagaaacaaaccaacacccgcatactttcactgttggattaggtgaaagaagtaatattgaaaacagcaacaacaacaaaagaaaaaaaaacaacacacacatagtaactgctacaatttttagctattagatattttaatcagctagaaaaaaagtaaataaaggaaaaaatgttaagagatttcgctgtcatctatgatat

SEQ ID NO: 651 - DNA, 2128 bp, Aedes aegypti
aagttgtaacaagtttaataaatgtacaatttgtagttgcttgattccttcatggacaaaaataaccgaaattgcataggaaatcaatagatgtaccttggtagcttggcagtctgtcatcttcaatgtcaatttgttactagagatcgagtatctatacctctgcatttccattgttatcacaggaagttttttaaggggggggggagagtccaaagctttatggtctggattcaccttatataggtgatgagatttgtgcaacctcaatataaaaagtcatttttcctttatggaaagcatcaagtataaactgtttaacccacattgttgtttcttaactcgtacctaccattcattgagggaatatttgtttaatgatgattgcccgtctcttatatactggtcctgccaggtgaactcataaacctaacctaccaatagttacagctcaatttcatcatatcctttttcccacttttctcttttcctttccaggcatcaaatgtccagtgtgcagcaagtttgtcatgcccgacgacatagagtgtcatttagtaatgtgcctaacgaaacctcgtttgtcttacaatgaggactgcttaacggatgccaagggtgaatgtgttatatgcttagaagatttatgtcccggtgatatcattgctagattaccatgcttatgcatctatcataaaggatgtatcgacaaatggttcgaggtgaatcgcagctgtccggaacatccgggtgactagtgaagctaattcggtacgcgtcacgttcggtttcctgtttcgtttttgtactagttatagcggagcaatccggcaggtaggaacgggtcatccgagccaggacgtggcaacgaggggctcacgcacgggggacgggacgagtctacactagtggttagtagtaatagttgtagtagtaattaaacaattgaaacacactgcaagagagatcgagcaactgtggagtgatgacggtgatggacgtcgcgaggagggtgtgcacgagagggggttacgatttgctgggcaaatcgagaccctcgggaaagtggaatcgtcagctagcagcatcgaggccaccaacgcggcccagaccggagagatgattgtaccaggacggacgatttcgcttgttttatagtgaacgtttattacctgatttaaatatataccgaaggcaaacagacacgcaatataatcttcacctggaagccacctaggtgcaaaggtggccacgacgaaaaggacagcataactgggcaagcttttttactgcaataaatcgataagtagatgcaaacgtaaactaagctcacgttttggagagttgaatttgttttttttctgcgtgtaaagccaacattagaatctaccaaaaaaaaaatcaaccggaagaagagaatacgcgcgattaaactaaaatagctaatatcaaaacgaacctgtaggcatctatttaggcaaattatacttttaaccaactctatccgaggattaccttttgaacgtttcaccaatcgaacaacaaatggttttaattttctattctcctaccgctcttgactgtcgattgttagctgacgttagtgtgagagcataaaaacgaatcatatatatactaataattaaaatgtggaagaatgcagtgttgctcgcgaaacacatcgctttgtaaatattaaagaataagcaaacggaagcaagagacgacgttgaaaaactagatctaaataaaaaaaacaaatctaactgattaaaaatagtgatccaaacaaagaaaacagaacaaaaaatgacagatttgattaacgcgaaagaagaggaagagatcataacgataactgtaagtgaaattatgtagtgatcttattatgattgacaacaaacagactaaaaacaaaaggaagatcgagagaatactgttaacaatccgctacagtcttaaacacatacaaacacacacaaccacacacagatacacagaaacgaaacaaaacaaatagaaacaataactacattaaaacaatttattaacggcaacagtatgttatgtgtatgaagcaaaaaaataatacaataaacagagcaattttctcaatattttcaatttc

SEQ ID NO: 652 - DNA, 915 bp, Aedes aegypti
atggctgaccagcaggcacaaaaggaagtgattgctaccaaggttaccggtgtggtaaaatggttcaatgtaaagagcggttatggtttcatcaatcgtggcgatacgcaagaagatgtcttcgttcatcagtcagctatcgcacgtaacaaccccaaaaaagccgtccgttctgtcggtgatggtgaagtggttgaatttgacgttgtcatcggagaaaagggtaacgaggcagccaacgtaaccggtccccagggtgaaccggtgaagggaagtccatatgccgccgaaaaacgtcgtggataccgacagtggtggcagaagcgtggccaacgccgaccacactccaaggacggcgaaccactggaggaacacaatgaaatggaagggcaaaatggtgaaccccaacagcagcaacaacaacaacctccacagcatcagatgaagcagcaaccacttcaacagcgccgtggattccgtcctcgtggacgtggaggttatgcctactcgtatcgtccacctccgcgaggtccacgtcgtgatggtcccccaatgaacgacaatggacacatggaccaaaatcaaatgatggacggtcaaaacggacctcgtcaaggtggacgtggtggcggtggcccgagacgtttcttccgccgtaactatcacaacggtggacgaggtatgggtggccccggaggacccccacgacgaggtggatatcgtaacgattatcagaacgactaccaacagaacggaccggaacaacctcgccgtatgaacccagtacgcggtggcggcggtcgtggtcgcttcccgcgtcgaggtggacgaggtggtcagagacccaggaccgatgcaggagctggcggaaacaacaacgctgtccagaataccactaccgaaagctccgcataa

SEQ ID NO: 653 - DNA, 5562 bp, Aedes aegypti
cgtgtgtctgtaatgcgaggccaagtggtaacaccgcagggacttggtatcatcgggatccgagtatcagtggaccgtgattcaagatttggtttcactttaacacgacaaggcggatggtttgatgtcttggtaaacggaggtggcgccgtaacactgcaatttcaaagatcaccatttcgtccattaacacgcacagttttcgtcccatggaatcaggtaaatttgaattcatacagctttttaagtacgtctcagtatcgtttcctcgaagacaacccatcgcctgtgacaatttgtctcgaacatgatcacgaattacttagaccacagcttaccagtacttggatgcccaatggtgtagggtctgttccaggaaaaagtataatttttgctgaaacacagattatacaagaatctatacagattcccggttctgaccttcatctaacatatcaaacatcacaggcctccggatataaaagcatagtgcggatgcagttaacacacgacaaaattcctgaaactcttacccacgtacacattggcgtacagatagaagggtctctacatgtgaaaacatacgaagctgatcccaatttgagctacatttttgcatggaacaaaagaaatgtttacaaacaaaaagtgtacggaacggcagtagccagaatttctattggctatcagcattctacatgtaaagacataatatgggaaactcaaacggcaaaacttcagggttttgaggttgatatatctgacattggcgggtggggtttagatattcatcaccattataatttccatgaaggaatcttgcagaaaggagatggagctacattgcatatgaaagagtatcctagaattgttagacaagtaatgggagatggtcagcaacgccaactaagttgtaaagaatattgcaatggtttatctaagcatgccagactgctcactccagtagcacttactgcaggccccgatggaagtctttacgtaggagatttcaaccttgtacgacgcattaccacaaatggcagtgtgtttactgttcttgaactagaaacaactcaggttgcttatcaatattacctgagtgtgtcccctgcagatggacacctctatatttctgatccagagaaacataaaatcttgagagttgtgcaactcgaaaatgtacccgaccccgcggcaaacagtgatgtagtagttggaagtggccagcgctgtattcctggagacgaggaaaattgtggcgatggaggaccggccaagcaagcacgattatcacacccaaaaggaatagctatagctgctgataaaaccatgtatattgcggatggaactaatataagggctgttgatcctaaagggattattcatacccttattggacatcacggacatcacaaccattggagtccagcgccatgccggggagctttgcttgccaccagagcccaattacaatggcccactggccttgctctcaatcctcttgacggttcgctgcacttcatagatgatcgactagtattgaaactaacagccgacatgaaaataaaagttgtggctggcgttcctttgcattgtaatagcaatgaagagcataacaaaacaaattctgatgatgttcttggtacggtagtggctatggcttttgcaccttttggagatctatacattgcagacaccgattcgaggcgaataaactctatacgggttgttgattctactggttatatgcgcactttcgctggcagatcggaaaatggaatgaaggaagacatgtctgcaatgcaatcggaaaccattttatcttccaatgtgagattccaagcagtatcagccattgcgattgcacaagatggagtcatcaacatagcagatcaaggttcgcttcgaattgttgcacttcagcattatttgccacaacatgacacaaacggagagtttcaaataccttacacaccgacaaacgaaatgtatgttttcaatcgttatggccaacacgtcgctacaaaggatttatcttctggcaaaactcggtattcatttctgtactcaaaaaataccagttttggaaagctatcgaccgttaccgacagctcaggcaataaaatacaattcttgcgagattacagtaacgtggtgagttcaattgagaattcgcaagaccataagtcggagttgaaaatttcatcaaacggaatgctgacaaaaataattgaacgaaaaggaaaatctgaacttcaattcgattacgatagtaataatggtttgcttctgagccgaacaggaaatggagaaacattcatctatcagtacgacgaatacggacgcgtaacaaaagccattttaccaagtggtgaagcattcctaatcacaacagtattgggagagaaatcctatgatttaggagtacaaattaacgaaagcatttattcgcactttgctcaggagccggcgacgccaacagtattttctttgaccatgactaatgccaaaatcagtcatgctaacagcactctaacgattatgcgaagtgatgggatcgttattgaatcatccgcggtagctgcccacccgtacttggagaaaataatgccaattgaggcggaaatgttaccaatgtggtctcaccaaactgttaaaatgggtgaaaacctcatcaatacgatgtattctaagtatgactacaaaggcaatgaaaataatcgtttgccacaacaaagactcagtcatgaaatttttgtaaataatagccgagcaatccgaattgactacgagcagttgcagaatagagaaacattttataacaaatacgacgaaattattttaacagtattatacgatcaatctggtttacccatttcctattacccaggcggagaagacagcaaattccatccacttaacataacatacgaccgtttcaatcgtgtagaaggatggcaatggggaccagcagaaatgaaatataattatgatatgaatgggttactatcagaagtaacaagccaacaagatggcatcatattgtattcatacaacgaattgaatttgttgtcggaaatttcactaggaagtcaacgtaaatttaaactttcatacgatgcaaacggtggactacgtcacatcacactcccgagtggtacaaaacattccttcagtatgcaaccatccatcggtttcataagattcacatataccccgcctggtaacaataaaccttaccttcaacactattcctattctggcgcactattgcaaacaatatatcccggtgatggagcacgcgtagtttatcgatacagcgctgctaatctagtatcagaaatcatccacggagacggccacagtgagttcagttatgcagcgagttccagtatgccttcggcagtcgttcatacagaacgagatttagaatatcgttgggattttgactacgttggaggtctgcttatggaagaaagaatcgatttctcggctaaaacaggattatcgaatgctaagtttagttacgaatatgataactatttccgtttgatatctattcaaggaaggatcggtggacaaaatcttcagaatcaaattctggagtatagtgataaaactggcggtttatctcagataggacaatttaaggtgtccaatccaaccgctaatcaaactactgttggagatggtactgctacgttttctcgtacgattaatggtcgattcttggaaacgttaattacggtaatgatccatcgaatggcagtattccgaatggaatttgtgcacgatatgcacggaaggatttcccaaacacgtacatacactcgcaatgtgggggtcaatacatataccaacgtgaaaaactacacttgggactgcgatggccaactgattggcgtagaagcacaagagccctggggattccgatatgatgataacggaaacatgctttcattgacttacagaggaaacacaatcccaatggagtacagtagtacagatcgaattttgaagttcggggaaggtccatacaaatatgaagcacgtggtttggtagcacaaaatgcccgtgaagaacgcttccactacaatacacaaggacttcttataagagctactaagagaggacgttttgatgtgcgttactattatgatcatctaaatcggctgattaccagaaaagataattttgggaacgtcactcaattcttctacaataaccaagaccgtatgaatgaagttagccaaatctattctccacgagatggtaagctaatgtcacttacctacgacgatcgtggacatttaatatttgctcaggtgtatcgtcataagtactacatagcaacggatcaatgcggcacgccagtaatgatgttcaatcaatacggggaaggaattcgagaaattatgcgatcaccctacggacatatcgtttatgattcgaacccttatttgtacatgccgatcgatttttgtggaggagtattagatcaggttacatctcttgttcatatgcccgacggaaaagtatacgatcctttaataggacaatggatgacccccaattgggaaaatgttgacgaacgcattaacaacccaacccgactgcatctttatcgctacaatggaaacgatcctatcaaccgagatcatacacggaatcaccccaataaccaattggaatggttgaaattattaggatacaatatccagagtttgatcccacaaaccaatgatcgtctctacacgcaaaataatccatggagaaaaacgcaaacatctctcctaacaccacaaataatgcaacaatctgggtttttgtcatatctcgcaacacggaaaatgaaaacagcttatgatctaactagttcacctaaatcatcactgaaatcgaatgcaatggacataaggccacatagaatcggtgctgcatccgatccgccatttggtaaaggcattattgtgtcgcgttctcttgaaggccaggcgattgtatctagtgttccagctgctaatccaatatatcgtgatgtctatacatctgtcttcaatagaactcgcttattaccgttcacatttgttgtgcataactcccttcaagatgccttctttttcgtaaaagaagattcgtggcgatcgacagaagatcgtcaacagcttaaacggctgcagggacaagtcaacactacattccatgaaggatcgcgtgagaatggtagtggaaacaatcaattggatgtcaagctacacattcaaaatgccataattaatcttaagtatggcactactgccgaaaaagaacatcaaagacttatgcatcatgcaaaacttcaagccgtcaggaaagcttggcatcgcgaaaaggagcttcttcgtgttgggcttattagtagctacgattggacacaacaggaaactgatgatattattaaaaatggttatgctaatctctacgaaggcgaatacatccatgatattattgagtatccagaaatgctcgaagatcctttcaatataagatttgtgaaaaagaaaattaaccaaacacgaaaa

SEQ ID NO: 654 - DNA, 2604 bp, Aedes aegypti
gagggcatcgattccgactctttcgatagcgatgaaagtgacgaagatcgccgaaacgacacctacgtacactcaaacgatatcaacagcgccaaacagctgccagatccgccaccctccaacaaccagatgtacgccttgatgcagaaaattcgcaacatcgggacgctctccaagtcggaactcgccaaaggattcaacaagttttccaaaaagaaaattagctcctccaagtcgccaaagatcttcaccggtgaaaatctaacctacccgtccggtccggatgataataatgcagctagctacgaaaacactccgctcccgaaaactcccaaacacaacagcgactccagcaatgtctcaaccttccgcaaaaagtccaaaaccggcaaatctctgcgctccaagcttcgcaagagcctccaatcggactctagtctcaacatccacagttcgttcaacgcctcccgcagtacgttctacgtaacggactcgctggacgtcgactctggcattttcaacggcagtgaacccaacagttcgtcctcgaatctgaacgtagcctccgtggggaaggacacggcctctcctctgaagcttgccccgcacaaaactcccgatgccgatcgacggaagtccatgaacggtggaagcccagctagtcgacccactattccaccaccaccgccacccatcagcgcacccatcggggacaaaaagtttctaaagaaccgaaagctgggcgctacttcgtggtacgccgaatgcggagttttcaaagcggatagcctaaagcaggcctcgttcgaaaacgaactcaagaacaaggagcgcagtacgacgtcctggtacgctgaagctgggctgtatcaaaccagtgatgtttccgtggcaagctctagcgaaagttccggggtgtcgaccggaggcgaaggcggcggagaggacgaccactcgcacagcatgttcgtcaacgagccgctctatcagatctacaacgcggccaagctggaatcgttgacgcgggatatcgacgcggagattactggcgacggagacaccgagcttggtgctggttccggcagcgatgaggacgttgtgggccggaaattgcgccccagtgcgttcgagctgatcgaaccgaacgtgggcaagctgcggactctctggtgcgagattccggaggtgatcaactcggagatattgctgaccctaactccaacggagaaacgcctccaggaggccaagttcgagatcctcacgtcagaagcctcctacctgaaatcgctcaacttgctcaaaacccacttcatcaaccatccggccttccgggacgtcaaggtgctaacgtcctccgagcgcaagacgctcttctccaacatcattcccgtgcaagagtgctccgatcggttactctgcgatctggaaaactgctggcaggacaacatcatgctcctgggcctcagccacagcatctacaagcacgccgagaaacacttccacgtgtacgttaactattgcgagcaccaggcgaagatcgatcgcaccctaaagaacctcaaagcgaacaaaaccgagttcaccaaaacgttgctggagctggaatcggacccgatttgctgtggcctcagtctatcatccttcctgatgcttcccatgcagcggataacacggatgcgcctcctgctggacgctgtccttcaacgactcaaatcggacgacgacgaattcatcagctgggaaaagaccttcgtactgatcaaccagatcctgaaacagtgcaatgatgcggcccatcgaagcgagcagatgtacgagatggagatgatttcgcggcagattgaattcccgtcgcacatccggccactcgctatcgtcccttgcggaatcggtcccccaggcagcgtgatgcgtaagctggagaagaagggcgaactggtgcacttgctgtggcgcggtgacgacgccaagctcaccttcggcaagaagttcagcaaaagcagcatctacgcgtttctgttcaccgatctgattgtgctgaccaagaagaagggcgacgaaacctacctagtcacggactactgtccacgtgccctgttgacggtcaactccggagacattgtgcctcagctgccgaccaaggagatgcaagccatcgggaagcacctgatcatcatgacgctgctggagaaccacgagggaaaaactatcgaaatgatcatcagctgtccatcggaaacggaacgcgagcgttggctcaaggtgaccgaacccttgtcttcggaaaatcccgacgaaaaaatctacgagcagtgggactgccctcaggtggtggccatccatccctaccaggccctacaaccggacgaactggatctggacatcacggaagtggtcaacgtgcaccgcaaaatggcggacggctggtacgaaggcgagcggatccgggatggggccgtcgggtggttccccagcaactacaccaaggagatcccgtcggcacatgtccgcgccaagcacatcaagcagcgccacgtgctcctatcgtacacgtccaaatatatcgacacgacgacgcgaacgctgcagcacagcaaaaagtga

SEQ ID NO: 655 - DNA, 2280 bp, Aedes aegypti
atgagcggtatcggaaacgctcaaggcactaatgttggcttctccaccatatcggagttttatgatcagtccagcgtgagcagtagcagcaccatcaaactagagtccgtttctcccagtccgtcctccagcagcacatccatgatggacgcactgagtaacaatccgatcctgaccacggcttccgtacccattccttctcggcatgcaaaccaacggatgattaccgatccgacagactacttcatcgaaatcgaccaatctcagtcaccccatatgctgcaggatatcagctttataaccacatccgccaattccaatcttagtgcttcgactccagtggacacaatttttactcttcagaatattacggacgctggtctcgtaggtgaaggaatccaaattggcacaattaacatcaacgggtttgcaaacccggaaacatggaatgtggattcattcggacagattatctcaccctcgtcaacggtctcttccgcggcaaacgcacttggtcagcaaggtcaatttcacatggatgaagacgatatctatcagctcgataaggacgagctcattggtgatccaacgctaggcgatatctttgcccatgatctactgcatgaggacttgatgctgttgaatcctcctctgagtcaaccatcgccgaacctcagcgccgacagtggcagtggcagtgcaatacatctctcacctagtttaccacagcaaattcttcggtccaatccaaattcaaatgctaacaacaacatgataatgatgattggaaccaacatgcaacaaactaacgacttacacgttccaaatatgggcgaactctacgatgaacaaactcgaatttcaacttctccttacgctaccaataccaacatcagttcgcctgcaactttctctcctggtagccacagttccagtccttcgctggggtattctcaagcgcaaacccctccactccaaaaccggctccatcagcagctacaaatgaatgctatgaataacaacaatcgtttgctgaagatggaccatactgacaagactaagaatcaaaatgtgacgaacaacaatttcagcagaaacactggcaacgttggccaggtgcagtacaacccgaagtactccacattgcagcagctgctgatgacgaatacggctgacaggagtggaatgatgcttggacaatcggtgcctggaaactcttccgtgctgatgagtggtgcttccctgagcccgggcagtttcagcggacgtaggatgctgcatcacatgcatgcccaagccggttctagtcactcgggcattggtggtgctggcagtggtggcggcacgagcggtggtaccatgtcacggctgtcctcttcggcaccgacccacatgggaatggacgtattgatgtggcaacgtcgggagccacggccccatttgctgtccaccggaagcttggcggaagctggatcgacttcgtcgcttagcaccggaagcgttctcagtccggaggcgccggacttttcgcacgatgaaggatattctgacgacagcgatcattacgaggacttttccagcggtgacgagggatctgacacagaggatatgggacaagcatcaggcggtggtccaagcagctccaaggcgaagcgatacttctggcagtacaacgtacaggccaagggtccgaaaggtcagcggctggtcatcaagacccacaccgaggatccgcacttcctgaacgaggtcaccgatccggtcttcagcccgaattgctccgtacgcggcataaagcacagtggaaaggcacgcaaaggtgacggcaacgatctgacgcccaatccgaaaaagctgcacagcatcggcaaggagttggacaaactgggccgggtgatcaacgacatgactccggtcagcgagcttccgttcaacgcacgaccgaagacaaggaaggagaagaacaagttggcttccagggcttgccgcttgaagaagaaggctcagcacgaagccaacaagatcaaactatacggactggaaacagaacataagcgtttgatgaatggcatcaagcagatgaagcaaatacttgtgaccaaatgcagtcaggttccctcagagcccacagaggatcagaagcaaaatatggaaacgctagtcagctctgcaacaaagctgaaaattgccggaaactctacggaattcgtcaacagaatattagatgttatcaaagctggtaatagcgtcaatatcgacaaagtgctggaagaattctaa

SEQ ID NO: 656 - DNA, 2903 bp, Aedes aegypti
atgaagtgcatcaaattgaatttaccgtaccaaaccgctgcgctgctgaatgtaacgggcatctcgcaaaagtggaacaaactccgccgccgctgtgcatcgttcaaaacagtctcaggcccagcgtcactcgattcggacaccaactttattctggccgaacatccagcccattatcagatcatagcggcaggtccagttccagttcaagttcaacagcaacatcagccccaccatcatcatcaccaccatggtcatcatcgacatcatcatcatcaccacattcagcatgaccacgagcgacatctagctgatcaagcacatttcgcacatctccacgacccaaactgggaactccgacattccagctccagctcaacctccacatcttcctccacgattggacctcctccaatctatgctgctgaagagtactggcaaattcacgaacgagatgtcaaactgtggcggctcggtgctcatcaaacatacgcccataggatccgtgtgacccctaatcaacgacgcagtgcccacagcatcgactgggagtataacgtgcacaaatacgaaaatatggtcgaccacacccaagtgtcccctgctcgacttttccgacacgaaaagctccagtattacgacgaagtatccagtgttaagaagaaaaactccctcggtgctagtgaaagtgagagtggaataaaaattgccaaagagatcaagctgcctagtctgaaaaatttcaaatcagcttccatgcgactgccgggacagaagtcttccatcaatgaggtgcaacaactgcttagaagtaagttcaaccgaatacatgccggtcttcgcaaaaggcgggcactctccgtgcaagaagtgttccaaatgcccgcgcagaccaccccaacgaaacctaccttctacgttccatcaccgctggtcggtgaacgaaaacctcacaatccatcccgatacgaagaggagctcaacgaagacgaagatggccctcttagcttaccatacatcaacgaaaacctcctcaaagtggacgatgcccacgttaaactgcgagatcgatcactcagcccccgaaaagaacgcaccaagacttggtaccgcaacatcgacctcagcgcagttcgaaaattcgatcaaaacactccaaagcctaaaccatccgttcccgtcaccgaagacgaacaaccggaaacgcccaaagaaaaaccaaacttcgtgatcggaggtcgcgtgtcgctgcgcgaacgcgtcgaaaacatgaacctcaatcgacttcgatcgaaaacctccaccaccggcccatcgccaagtcctgtccccaggaagtccaacgagcagcgcaaaatccgtccccgtagccattccccgcttaaaaacctcaagatcaacctttccagcatcggaatcggaacgccaaccggtgaatcgacgcccaaacccaaacgggactcgtttggcctgtttggccgactgaaccgtatgatgcacggtagcagtccatcgccggaaaagtccaatcgtgtggcggccaaagatggcaccgccgtaaatggaaccagcagcccggtgcgttcgaaagccgacacaagcggaggtgctaacggttcggctgccaaggcggggtcttccgttagctacagcggtaatgttagtaaacagtccaccattcagaagctgacccaacttagcagcgggaatcgacgggactcggcggcgacggcggccaaggcggaaacgaacggcatcgaacgtgaccggaaatctaagcagatttccgacagctcacacaaaacgtccgtttcggtcaacggtctttcgaagccaacatcagtaacgtttatcaaggtaccggacacgcagcataatggaaccagtcccgacgataaagacgattatgacgatgaggaaatcgaagagagcaaattctgtactctgccacgaagtggccccaatgcatttacaattcggcaggcacgattcgtcaagggaaacggcgccaaagcgctagggttctcaatagtcggcggtaaggactcccccaaaggatcgatgggcatctacgtgaaaacgatctatcccaacggacaagcagcggagaagggaacacttcaggaaggcgacgaaatcctttcggtcaacggaactgcattccagggtttgtcccaccaggaggcgattaacgttttcaaatcgatcaaaactggcgacgtggtcattttgcttggcaggagaaacaaccgacgaaagttggacactccttcgccgcagtgaagcggcttttcgcggtgtaaaaatgcttagtggaatgtttattttttaccaaataaggatttctaataacatttgcaattattagcttagtaagaaccatacgcacagtttgaattgaatcgaaaatcacaacggaaagtgcacaattgctgtaacactcctgaccacgtagaaatcacggcagctcgaaccaaatgaaaaattcaaacaatttaccttttacttaccagtttgtttgatgttattttttattatgaaacaatgtcgaatcaacgcgcagacataactagtccaagattctttaaataaaatgtgtaaaaatttgacgaatccaaaccaagctttcatttgagcgagacagaaaaaataccaatatattcattaaaatacagttagtgtttaaccataccaaaggattgtcatcaaatgaaagaagtaaaatgcgtgcgattattagagaaaaacgctttttttgttagatacattgcttaattctgtccgggtaaagcacgcgagcgcgttcgtatttgtattaccgactttgaatttatttgcagttaattacaccacgttcttcgtgcatttaccagtaagtcatgcgaatataatatatgcagtat

SEQ ID NO: 657 - DNA, 3018 bp, Aedes aegypti
atggccgacgcattgaagttggccgacatgcaacgggccagtgtcgaatttgaacggcaacgccatttagccaactggctaatcgaatccagccctcacatgccgaaacccacgccccaacaacagaagcagctgcaacagcaacttggcaagaagggtaaattcaagcagaatccaatgttcttccttgcgaaaataggccacaatatgaacattgccagcagcaacaatccacccccacttggtaccaatttgataagcagcaattcgatagcgtctaccttcaactcgcaaaccaacctaccactggcaatcgtgtcatcttccggtcgggatggccacaagcctaaattaagacgattcaattcgcacgacaccagcgccaacatgttctcggtggcggagtttgaaaatgcccgcctagcgcgaagaaacgaaatcgagagcgccgccctgctaaggcaacggcaacgatataagctgaactccctttcatccggtggagactgctccacgggggaaagcaagggatccaaactcagcagcgaatcgacctcggaaccattgctggccgagcagttcctggagaagttttccctcccacgtgtggtacggctgtcgtacacctcggatggggccagcggaagcagttccggtgaccaaacgatgacctcgtctagttcagccgaatcatccagtacgtccgagaggaaaaagaagaagaaatctgccatttccagtccttccaacggagagctttttctactgtatcggcttatgcgtagcttcaaaatctaccacgtattcaacacaaagtcggggcataatcgcaaaaaaggatacaaaataccgcaggattatcccggatatttctcatttctcaatgagaaaggagctcaaacggctgtcatctacaccaccattgttcaactggtccgagagcgtgtatataaatttctttcgttggaaaacatctccgcctacaccgaatcccatgacaattttaaccacaaaacgcattacgttaaggcaactgctaaggcaggtcaggtgtaccgtttgctagccgttttccaggatggagatcacaagtcatcatctagtcagaaggactctgcatctgtgagcggaaatgttggtggtgcagagaaagaacgcggcaaatatgcccaattgctgggagacaaccgacagatatactacgtttcgttatcggccaaaggaaagttctacgaaattgaacagcacacggcgccagtgatgcaaaaaagcagcagcctcgggcatccaaacagtagcagcaaagcgccgaaacaactgaaccgggaatgcgtgcaccgaattgggttcatcatgcaatcggaggtcaatatgccattgaacctaaagctgatagccagtatgaacacaagttccggtggcacccaaaataacgtgcctgagtacatcaccatcgccaaaatcagcaacgaaaacttcattgtggcatgcccccttgatgaacaggatctgacgtcgtcgctcagcctcactaaactacacataaccccccagatgaaattcaccaaatgctcgctgggtttcgataacgaacagcggatgttcctcaatggaaacgttcaaacggttcttaaattttgccaattcaactgtgaaaatttcacccgtgtagttgacaacgatacgaactgggtagagctccagcaaatgatcaacgctgttcagcagcagcagtcgtctaacagtctaaatcatctaaccatttccgtcaacggtggttttggacccaaaagcgaagttctcaaaagactcagactaactcgactgtttggcagcagcgatcggaatcaaaactcctcttccgggcacgagaaagaggactcgatcatatttttcagtaaaaatgatctggagaacctcgaatgtagtcaacaacagcaacagccagaacacatgcaacagaacgatccggagcagcagccgatgtccttagcatctggaataagcgataaaatgaaagtgtttactccgagcaagaaaaaatggttcaaaggcttccgatcacatgaaagtccatcacaggaaaatgcagttgacgaacaggaaaagaaacaagccagtattgatcgttaccaggacatgtccagattgatacaggaaagattcggagacatcgatatcaacggcaccaataccagtatcagcagagctaattcggacattggattcgatgatatggttagtggaatccctggcgagacaagtaacggaaatggtttgcagaagtgtctttctttacagcacattgagttgaaaggtggcagcagtagtatggatatccgaagtacagaaaaaccagacttggttaaccatcttaatatgatcgagagaaacaattccgaagaaattctctcggattcggaagataccatattcttccctataagaagcagcgccaaacaacagtctttcatgactgaaaagctctacagtgagttccatgtgaaaactaaacagcatagcaaatcacactccagtatacaacatttgctcaacctggctagtcctcagcgattaaacgacagcaagaacaaatccaaggcaaatgataaaaagcggtcggaaatcatactatcattcgaagatttacagagtctcaacagagaagaagatctcgctgaaagttcccatcgcactcagtggagcttattggatgatctaccatatagcaacgtacgagactcgatcgttttgcaagaacctgaacgacgaactccatcggaaagtatctacgctgaaatatgcgccgatagtcccggtggatccacatctgtatcgcctcggaaacagccagtttttcccgctccgccacgacccgagaaacgatttacaagcatccgtatcaatgttccctccagcgattcgtgccaaatcgttagtcataaccctgctggcaatcgttgtgcatcaaatgttgctagtcctgtagaagacaacatttacaataccataaaatag

SEQ ID NO: 658 - DNA, 4468 bp, Aedes aegypti
atggatttcaaacagcagaatggtcagcaacagttttcgcgaagtggctcgaagctcaaacatcaatcatccacagcatccagtatctcatcgtcgtcctcgagcgccccacaaaaggtcaccatgcgaagacgatgtcgcagcgagagtcttccgatggcaccgatgtgtgaggtcaaaagtagcaaagcgcgactacatagccactttcaccagcaacagcaccataatgccaagacgaaaggagaaacaccaaccctactgatcgagtccttttctctacaaggacacggccggaagatgcttcccgttattgccagcaacgatttactgccaagcataacaatcaataatgctaaggaaaatgtcgtgcagaatggtctctctcgactggatggcactcttaacgccaaggatgtctacatgaacgatctggacgcgtacaggaaagatcgccgtaacggatactacatccctggagaacggcatttcgagtcacggtttgctcgtaacctcgaaagcacttttaatccacgtaatacgatgtacgataggagcaatcgcaagttacgggcacggagcgagtcggaacctcacgaaatctacactagtgcgtccatgatcagtggaacatccagcagcgggagatctacacctgcttgggcaaatcgggaacacatgcgtgatatatctctgaagcgcgcacgtgataacatctctccaacgctggaaggcgacgaaaccatggaatccactccaatggcccagaaagattcccctccgtcgaaaatgctgaatgcagtcgaaagcacctcactggacgatgggactagcacggctcaacagcgtctgggaaaatcaacgaagatctccggcagtgcgaatggttcgcggattacgaaaactgttagaaaccggtctggggcagccgttaacaagtacaaatcctgtctaaaggctgcaccgacgagtgcttcagctattgttgcttccggtggatcggtcgctcacattgtcggccggaagtcggtttcgcctcctctgctcaaacctttggccggttctacctcaccgactccgtccggtatgtcaacgggaaccagtggtggcgaatcggtccatacccaggatctcgatacggaaaccattgggcactcggatgtgggtgaagacgatgatttggatgccgagtgcgaaggcgaggaggacgatctgatcgacgagctcggcgacgatgacgaagtgctgaatggctcgataacggactccgaggacaactaccaaacccatttggcagcataccaggcgcgtacgaaatcatgctcaacttcgccctcgccctcgctggtcaggggaccggtcacgtcgattgggtgcgttctagggggctgcccaccggaaggtccactgacgcctagcttgtttcctcatgtgccaccctacataacgttttccacccacgaggagaagggtcctcccatgccgcctgccattcacaaagtgctcaaatggaaaatgacgctgattacgccgattgtcgtgcggaaggtgttgatcaatagcgggtttcggctgctgaaaaaaaccaacgattggatcggaatttggggcaagcatatgaaaagtccctgcttcaagacgctgcgtccgtaccagaagttcaaccacctgcccggaagcttccagattggccggaaagatcgcgtctggcgcaatctgcaaaccctgatgaaccggcacggcaaaaaggagttcggcttcatgccccgcacgtacatcatacctcaggatctgaaaattctgcgccaaatgtggcccagatatagtcaacggaatgccaaatggattatcaaaccaccggcgtcggctcgaggaactggaatcaaagtggtaaaccgatggtcgcagattcccaagcggaaacccctcattgtgcaacgttacgtcgaccgtcccctgctcatcaacggtagcaaattcgacctgcggttgtacgttctggtaacgtcgataaaccctcttcgggtttacatgcataccgacgggttggcacgattcgcctcggtcaagtacagcgaaaagtccgataccctcagtgatcgctatatgcatttaaccaactacagtattaacaagctgtcgaacaactacaacgccaacgaagatgccgatgcctgccagggccacaagtggaccatcaaatcgctgtggtcctactttgccgagcagggaataaacaccgatcgactgtggggagcactgcgaaacctagtgttgcgaacgatcctcgccggcgaaggacccatctacgccatgtccaagctgaatgtcgccagcagatataactgctacgagctgttcggaattgacgtgttactagactcggaattggttccctggctgttggaggtgaacatctctccgtcgttgcactccgcctcaacgctggacgcccacgtcaagggaccgctggtcaaagctttgttgaactcggtcatgtatcaggtgccaccaaggatagcgatggctgaacaaaaggaaattttagctgaacaaggcctacaaggtccactttgctatgacaaacggatatatgtgaccgcactatccaaggcggaaagactgaaacataatcaatacattcagaaggatatggccagagatgagtacctaagtaacatcttggaagagttgactccggacgacgtacgttgtctgctgttaaccgaagatgaactagccagaagtgccccgctagagcgtatcctgccagcacccaacagccatcgatacgtttgctttaccgaacaccctcggtattacaatcgattgctggacgcgtgggaacaccggtactgcaacaatcgagccgaaggtattgccctgctgcaatctttgtgccaacagaagattcaccttcaggtaccgcccagtacatttaaaaaggactccaacaatagacagctacccgacattagcagcagcagtagtataaacaacgaaaacgcctcccaggacagtggcatccagtcggatccggccagctcggaacttcagtcgcaagaatctggctctgcattccaatcgcaagagtcgatcgatcaaatcggcgaagaagtggcactgtcaaaaaagtcagcgtctacggatgatgcaatggagttggaaaaggaacattcgcagcatcttcgatcgaatgatgatgagagcgacaatatccgacttagcgacaaaatcaaactgatcctggatgacgcgttgttactgaagcagcagcaatgcggtgataccgaaaatgccattattgtacagcagtgatgtaagtagtttcctagtttcgatttacctacctacttatgattcttcgtatcaaagagcgcaatctggagaaagcggaaaagttgcgcgtttatgcggaaattgatttttcccgtgcgtcagattctgggacgcaactctttttctacttagggaaattacagttcttagcgggtttgtgttaacaagactgatccgatgtgttcttcaacaatacaaaacaaaaaaccggaagcgtgtgaaaaaaatagtcttaaccagactactcgaagcatagatgagtagacgtagctttaacaacgcagattgctggtgtaatagatataatgacaacatcccagtttagtccctttgtaacagcccaaatatcaaagtttagagtcacgacaagtaaaaagcactaattgatttttccctttcaagaaatactccttcattagtttgtagtaaaatacatacaaaacttgtacgcataattttcgtccagacgcgcacgattggtcaactgtgattctcattattaaagtggttagtgttctcaaaattttagttccaccacgttaaggcaaaaggggaacgttaacggttgcatatacgaaaagtaattcgaagtaaagacgactacctacttccagttagtttcacactcattctagctcatatattcctctcacgtaaggggaaatcctctctgactggagaaacccccatctccagcgtgaacatcttcatagtgtccccgatacgggcagtgattacgacaggcggggccagtctggcaaaaacatacacatactttcaaatacttgcgatagttaaaaaaaatgaaccggcaaaactaagattctaattataggattaagccaaaaagaggaaagaaaatagacgagaaataaaagcagtcgtttagtaaatgatgccaatgcgagtgccagtggttttgatccgaactatccatttagtaattatgtgctgtttagaaagttaactactgttgagtttgacttgtgacctttctcattgctgcatttcgggcaataaaaaagcgggctctcttgctaagcatcactcacttagcagtggaagaggacctggcaaccctaatcgttcggggcaactggagaaggttcgcccaagaccgacgaagatg

SEQ ID NO: 659 - DNA, 1649 bp, Aedes aegypti
atgacctcgacggaagctgtggactacttggatgataataatgcgttctgcgagaagatcatcaacgagatctacgccgtgttcctgaaggatccggagctaactggatttgaaataatacctatgccatccaacacgaacaaatcgcccgtcatccacatcgagcacaaccttgggttggagtcatggtgcgtccagtatatctacgtgtacgctcatcgtctgctgctccgacacaaagccgaatgcctcaagctttccggaggaggttcgagttcgaccaatctcgtcggcagcagttccgggacaatgctgatgtccagcagcaccaccggaaacaatgcaatcatcaagtacctgaactgtgccatcttgatcaatccggatgtggcgacattctggaacgtacggaggcaacttttcgctaaaaatcggctagacatcacaaaggaattccaattttctgcgctggtgcttagtaaaaagtccaaatcaaatgaagcgttcgcttatcggcggtggttgtatttgtttcaaagttacgatgccatcgactgggctttcgaaattggattgtgtgagaagtgtgccgacaagagcacaaccaactatcacgcctggtgccatcgacagtgggtcatcatgaaggctcctcagttgctgaaatttgagatctacaaaacggaaaagttcatccgtaagcacatccacgactacagttgctacaaccatcgacagtttgttctagcgaaaatgtccgaaacgtcgtttttcgatgagcatgacggaaatgactttgttgagcttatggggtataccagttctttggttgactcacctgttaaaacagtggatgatctgctgcgttggcttgtcccaactgtcgatagagataacttaaacgaattaaagattcgatcgttcttactttgccttaacttagcggcgtacgatttgcgattttgtgacgagctaaaatcaacctacggcgaatcactagcatttgaaaatcatcgtcgatttatgataaagttcatcattgaccgttgtcgaagcgcagccaacatcctaaaacacgacactaacggacaattttccgccacgtgcaatcaaccaatgacgaaaatcacaaaactagacgaacaagacagtgctttcattcgagcgattgcaagtaaagaaaagacgagatccacgcatcaacataaagtatggtgcaaactgttcttaggatttgattttgaataagaaatgctctagtagatcatttgttctgttataggtaacacacacagaccgtagcacatgtttttagtaaagttcctaattctttaagtagcgctccaatgaacaaattcttctcacttttctactccagaaagcttctttcgtacttcacatagcactgtcgagcccgaatgtttgtttttaatattttatttatgttctattaactgtactaggatagaagtgataagacagtctcgaaaaatgtagtgaacaagataaaaaaatagcctgaaatgtgaccagttcagtatggatcctctggaacagtcattatattaatgatagttagtttttgctaaaagtttgattattttgaaagacatcgctgaaagcaataaatttcatattaactgtttttt

SEQ ID NO: 660 - DNA, 4317 bp, Aedes aegypti
atggtggcggtggccatcgggactacggtggtttccggaaacgatgcgaatttcctgttcaccgcgaatcgtcttcccgcaaaagccgtcactcctaccctggccaacgggaacatcgctttcgtagtctacggtgatgccgtgcacatgaacggagtctacaatggtcagcacggcttaagccaccgggcccgtatacccaactacgcaaacctccagatgccgtactgtgcgagcagcatcgccgagccgaccggatgttcctaccagttggacatgaagaacaacatgttccgtacggtgtacgaagacccaaacgggagcttccgcattgtgcatgacgtctatcccaatcggtactttgacaaagcgatcgttaacaaggttcgaatccagcgactaaactctcaaagtgccatcaccctgaatctcgatcgacgagagggactaccgagcgttgatgtcacgttcggtctgccacagatggccgatgttgatggtgaaatctataatcgactgtgtggccaaaccaaccaagtggaagatagccgctaccaacagtacggccacgatgtgtgcgtctactatccttctcttcgacaaatgacgctgactgtcgataaaacagctgaagaattcactttcttcacggtatttgctcactcgacaatcgaggcagaaaccgaacttcgatctatgaaaagaacaaatgtcgaatcgttccacctccgagaaatggaacgcgtgtgggaacggtatggaatcaccgtggaaggaaacgataacctcgatcgagtgctgaaggctagctcgttctacctatccagttcgctaccatccacgtacaccaatcagatcagcagctatccattctacggtctttctccatccggtttgggtcgtggtggagaagaattgaaggaatatcaaggtcacagcttctgggacacagaaatatggatgtatccaccaattttgctaatggatcctcaaaacgctcggaaattactgcgctaccgaaccgtagttcaccaagcggccgttgacattgctaagaaaaacgggtatgaaggttggcagttcccatgggaatccgcattcactggaacggaaacaactccagaatgctgcccggaagtcgttgagtatcaacaccacattaccgctgacatagcgttcgctgctagacagtacttctacgcaaccgaggatttagattggatgcgtacagaaggttgccgtttggcctacgaaaccgcaaagttctggagcagccgtgcagagtacaacaacgccactgacctctacgaaatccaccgtattatgggacccgacgaggatcatcataacgtaagcaacaatcctttcaccaacgtagtggccgctcataatcttatgttcggagagttcgcaagttgcttgtgtgagggaattgtaggagccaccaaagaagatcgcgcgcaattcgctgaagttggtagaggaatgacgttgttgtacgacaaagagaaggacttcttcccgcaattcgaaggctacgtgcaaggaacattgatcaaacaagctgacgtagttcttctcggatatcctctggagttccaaatggaaaactcaacaaaagcgaataacttggagatctatagcagggtaacacgttccaatggcccggctatgacatgggctatgcataccattggtcatcttgaactaggacagttgcaggaggcagaacaaatgttcaccaagagctaccaacagtacatgcgagcaccgtacaatgtttggagcgagaatggcgacggaaccgatggcgccggtaatttcataacaggagccggtggtttcctgcagtccatcatctttggctacgctggtatacgcctacacaatgggcaaatagtgattacgaaaccattactgttgcctagcacgtctcgactctacattccggaaatcaactatttgggaacgaaattctatttggatgtcaagaataataacatcaccttgggactgaaacaggagttgaacacagctactgttcagattatcgttgacaacgaagagctcacagtttgcgactcttgtgctgtttctttcaaggatcaagtagtgatccgcgcgaataggccttcccatttcaacggctgtcagctgaaggaaactacgattggaattaaggttgctgatcagaacaacgccgggcacatgacacgcctagcctcgatttttttcccagatgccaccagcgtgccgacgctctcgaacggaaatctcggattcaccgtatttggtgacagcgtctacctgactggagtttacaatagacgtgaatctcagagtcatcgtgcccgtattccaaactacgccaatatacaattggaaacatgtagccatccggagactaatccaccctattgttcctaccagctggacatcaaattcggctactttcgaacaatatacgacgatcccaatggagcacttcgtctcgtccacaccgtttatccacatagatactacaatcacatcattgttaacaatatccgattccaacgactgaatggtcaaggtacactgtacgcaaacattctacagcctacgatatcgccatccgccgatatttcatttgatcccgctgaaaatgctgtaactccagacaaatcgtatatgagtctatgtggccttactaatgaggttgaagatccagaacttcaaactgaaagaaccaacgtgtgtgtatactacaaagatgtaccgtccactcttgtgttatcggagaatcgcaccgctgaagagtttagtttctttaccgtgtttgcacgaagtagaacagaggcggaagctgatttacggggattgctgttcagtataaagccaaatgaagaaaaatcaagtgtagactggtttcatgagaagcatatgaacgaactttgggatcagtatgggatcaccgttgacggaaacgatgagctagatcgagccatcaaagcgagcgcatttcaactgttcagcaatgttccaaccttgtatactcataataaagtacaaacattcggaatatcgccttcagggatagggcggaacgattttcaaggacacgtcatgtgggatttcgatatgtggatgttccctgtagtgctgctagtagatccaatcgttgcagaagaaatacttacatacagaacaagagctcttaagaacattgcagaagatatgctaacttacgaaacaactattgttcagaaagcaattgaaagaaatgcagcaatgaataaaaatgaaggatggcagtatccatgggcttctgccttcacaggccgagaagtatcatcgactcaagaagcaaccgaaatacagcatcacattacggcagatgtcgcctttgccatccgacagtacttgtatgctacaggaaacaagtactggatgagaacgcaaggctgtgagttggcctacaatactgctcgtttctggaaaagtcgagccgtttataactccgatacggataagtacgatattcgtgatgttacgggacccgacaccatgaatcccaacgtcactaacagcgtgtacacaaacgtcgtagcagctaacaacctgtttctcggcgaatacgcagcatgtgtgtgtaataccgagctgaatgtccacaagaatgattctgatgagatgattagaattgcgaaaagtttacatttgttgtacaacgaaaatgaagacttcaatccgcagtttgaaggctacgtgttagggcaagagatttctcaagcggataccgtgcttcttggatacccacttgaccttccaatgaaaaagtcgacgaaacgacggaatctggacatctatagttcggttacaaaaaattcaacactgacctcggcaatgcacaccattggatggctcgacgtagatgagctagacaaagcagcggacagtcttcgccgtacttatcagccatatctacgttcgccattcaacgtgtggaaccaaggcactgttgaactccccggagcatcgaattacgtctccggtgcggccagttttctgcacactatgataaatggctatgccgggattcgactgcggtacgatgagctggtgctggatagacctagactcccacccggaacgacaaggctcagcattcccgagattatattgagtcactatcagtttgcgctagaaatacatcagaacggaaccttctcaatcacccaaaaaacgggagttttgcctcccttcgatacactagtgactatcgacgaccaaccagctgttaggtgttactatcgcgacggatgtgtttgtgagtaa

SEQ ID NO: 661 - DNA, 3241 bp, Aedes aegypti
atggatccaatattcttctctccgcctaatggagtcccgtcagaaagcaaattggcaacctatatgagtcgacaaaacgtttcgacaccaacgtatgggttgtcaacgggcctcagcaaactaacactagactcccccatatcgattaagaaaactcaggtgaccccccagtcgccagaattcattccaaacaatcgtctcaacacatcatcatcaccaaacttctactcgtcgtactcgatactcgctggcagcaacggaagtggccaagtcgtcggagcttccggcggcgctggcaacggaaacgctgtgataacgtccaacaatggcacaacggtggtggtggcaactccgggaagcaccggaggatcagttcccggtcccgtcccggttcaaacccaggcagcacagctttcatcggtggcgacggcgatcattcccaatggcaccggtggactagctggagggggcggaggaggaggtggaggagggacagctggagctaacggtaacggcaccggtaatgggtccggcgttaaatcccaagccagcagctacgggagcagtatccttggtagctcgcttagcaatagctcaacgtatgctgtgacgcccatcaagggtaagtggcgaagtttactccgtaacgaatcaccacagagtactaatacatctcctcgaatcacgcctcaaccatcaccaccgccaattaccaccaacatccatcaagaaaacgtcggtggcacgacgtatttctatccgaccgcagcgaaccatcaattaacaccgagcagtacagttaacacgactgaaaatacctttgtccacgtcagtgagctttcgaacgcttcctctttcggaaagggacctttccatcaacttttcatttcaggacatgtctacccgggacctgcatcgcacgtggtcaacatgcaagcgaaggcacaactgtcgatggcgtacttcctgcaggacgaactgagaaacgatattttatctaggaacgaaatagtcaatagtattgaaaccgagtgtcaagatttacctctagaagtggagaactatcattctttatgtctgctagaatctttaccagtccatcccaagctaccggtacagtcgtccacctacaaagcaacacacaatctaactggcgttaaatactgccttagacgtcttcatggtttccgtctccagtcgaccaagtgcatgcagattgtcgacatgtggaaaaagcttcagcacacgaacgtagtacaacttcgagaagtatttactacgaaaacctttggtgataattccttggtgatagtgtacgactatcatcccggatcgcagacgttactctcaaaatacttcatcccgagcgcagaatctacgaacggctattccgatccattctcaggtgaagtgcgaccttttagtcacaaaagcgcccttcatcgggcgtctaccagtacgctgctaccggagaacgaaatctggtcggtgataatccagctgtccgccggactgcgggcgattcaccaagctggactggcctgccgaacactggaccccacgaaaataatcatcactggcaagcggatacgattcagttgcgtagcgatttccgacctcgctacgtacgatcccagccaaacgaacccgctgaccgtggtcaatcatcatcaacaggatgatctgactgccttcggcaaactgatcctggccctcgcctgccgaagtttacagtccgtacagcgagatcagatccagaacagtattgagctgatatcgcggcactactcgtccgatttgaggaacattattctatacttgctctcatcgagcaatcggcgctcggtgacggagatcatgccgatgatcggtgcccgcttctacgtgcagctcgatgcactgcaatcccaatgtgatatccaggaggacgaactggcgcgggagatggaaaacggccggctctaccgactgctggtcaagctgggcacggtcaacgagcgacccgaacttaacctggatgtcacgtggtccgaaacgggagatcggtacatgctgaaactgttccgagattacctcttccataccgtcacggaagacggccgtccctggctgaaccagtcccatatcgtgcagtgtctcaacaagctggacgcgggcaccgtcgaaaaggttcagctgatgtcgcgtgacgaacaatcagtattagtggtgacttatgctgaactgaagcactgtttagagcaagcattttccgaactggtagcggcaaccaccgtgtaataaggaggttcgcgtcaaaccccagcaacaacaaaaaaaaacgaaaaaacttaacttgaggctcgagagatgtgtaatatttttgtctgtgtaagagaaaaagcgtttatgatgatgatgatacaacaaagaccacagcagcaacaacaacattaacacacaacaggtttataatgggagagagaaagcgaaagaatgcagtttctactacaactacaatagaggtacgttcgtgatcttatttttatacacatacatccaaaaaccggacgaacagaggaagcaacataaaacaaacaaaaaaactggatcgttagaaactgtatatgcaaaataggggagaaagttgaaattcttgttaaatctacaaattgtgtaaccgacagaaagtgaatcgatagagatcaagaagtactaaagtgagaactcgcatcatcatcgtgtggtaacccaatatttacaaaacccacatgaaaacggtagaaggaaggaatgcatacacttacacacacacacacgcacttactcatacgcgaactgtagttacatttggacaggagaatgagcgcggaaagcgaagaaatcgagatgacgagagcgtaaccaatggaccaatgcacgagttcactaatttgacgtttgagcggtgccgaattcactcgttgtcatggacacgtaaataacacggcaccgctcaaacgtcagatagtgaacttgtgcatcggtccatttaaggaatgaatccgagaagggaagaagagtttacgaggtgagagtaaggggcagtgtttggagatagatggtttatgttaggagatgttcatttgtaagtgatttttgtgaggattatttcatgtaagattgctagtttctttggaattgtgatgtcctagaagagctaaaattgtgtaaatcgaaagttgagaatcaataaaaattggcagctgaaacggaggtagtg

SEQ ID NO: 662 - DNA, 5155 bp, Aedes aegypti
cgctatggtagtgagaacatgacaaatctgcttccgagtgggtagtttttctcattcagttggtttacttttcgcgctgtggacttcgtggtagtgccttagttctcgggcaaggttatggttaaggtttattgcacatagtgataatgctgccgtattgtcctccgcgcttgttcgacacgatggcgatatgaatggacatatgtcaagagagatacatatgtatgttcggcgtttgcgtcgtgaacgttcgttcactcaggttcagtgattaagggcgaccggaatgaagctgaaagaatcttaattacacagtcgttaaaacatcataacagcgtcagcaattctaaatggtctggtttaaccgggcgggacaaacaaattcaacctctttccggcctactgaacaaaaaatctgcaaaataaccaagcgattgccgactatctgggaagcaatggatacacagacgctttggaggctttcagaaaagaggcagatatgcccaacgaaatcgaacggaagtacggcggactgctagagaagaaatggacctcagtgatacggctacagaagaaagtgatggagctggaggcaaaactttcggaagccgaaaaagaggccatcgagggtgccccgacaaaagccaaacgcacacccaccgattggataccgaggcccccggagaaattcgcattggccggacaccgagcgacagtcactcgagtagtgttccatccagtgttcagtatgatggcctcggcgtccgaggatgccacgatcaaaatctgggactttgaaacgggcgagtatgaacgaacactcaaaggtcacaccgactccgttcaggatctggcatttgactcacatggaaaactgttagcctcctgcagttcggacctgtcgataaagctgtgggatttccagcagacgttcgagtgcgtcaaaacgatgcacggccacgatcacaacgtgtcgtcggtgtcgttcgtgccagcgggtgattacctcctgtcggcatcgcgggacaaaaccatcaaaatgtgggaagtagccaccgggtactgcgtcaaaactttcaccggccaccgggagtgggtccggatggtgcgggtcaacgtggacggttcgctgatggcgtcctgctcgaatgaccactcggttcgcgtctggcagaccaactctaaggaatgcaaggccgaactgcgagaacatgaaaacacagtcgagtgtattgcctgggcgccggaatcggctgcggccgcaatcaacgaggctgccggagccgataataagaagggagctcaccagggaccgttcctcgcttcgggatctagagataagaccattagggtttgggatgtcaactccgggctgtgcctgttcacactcgtcggtcatgacaactgggtacgaggcatcgtgttccatcccggtggtaagtacatgctttccgccagtgatgacaaaacgttgcgcatctgggacctccgcaacaagcgctgtatgaagactctatatgctcactcacacttctgtacatcgcttgatatgcataagtcacatccgtacgtcatatcgggcagcgtggatacgacagtcaaggtttgggaatgtcgctaagcacggaccgcgtgcgtattcgtaggaagttttcttcttttgtactcgatagtgatgaaatgaaacaacacactcacacaaacacatgcatacatacaccaactaatagaagcagcgtgaaaggagcagtggagcggacgcagctgagcagccaaccatgtaagaagaggtaattctatttgataagcaacatactatttcagtaacaacaaccacgtgcaaggcaaattatacattcatattctacataaccttcaacaaacacataaataacaaaatattacaaacaagcaaaatattacacttgcagtaataccacagcaagctacaccaactaaaagaaaagtaaataattgaaaataaaacccgtttctttcaaatccgctccaattttcaaacggaagtaactcttattcaaaactacaaacatattacaacagctgaaaacgtttctgaagccgtcaacttaaacatgggacacgagcaaattactccgaacacttagccggacacaagcagaagaaaaaagctataacatattatcatattatattcttataattacactattcttagaaagtagacatcatatttgaaaacttgaaaaatggaatgtagcattcgcgtgatgaagggaatttgatcggggacagggcacgactggcagagacacatacaacatatacagacatgcgaaacgatgaaggatggtgtgactaggacgagaccgataatcaagacgcagaacctcaaggagaacgatttacaaatggtccaacgaatgtttgttggttatttatctctcttaatcgtgtcaagttgattcgaagcatatgtgtcgcccaaccgtttctcactcagcaaatgcgccaggttaaaaggtatgttgaagagtgtcctgttcttgttgaaattgctatttggtgtgacgaaaatttcctagaaggcgttacttgttgatatatttttgtatggactcattgatactaattctttaatattgaattcttgtgataatccgctattcccaatgattgatttggagaggtctgaaccagttggcataaagccatttgacaccacggacatttgacattacggtcatttagcacaatggtaagcattacatgtttctgaagcttaaagattatatttaagatgaagtttgaaaattgattttctacatttttaagtatctttgaggaataccgcattaacctcgtttttatttggtccaaagcaaaaattctattaaataatcattcaaaatactttctggtttgattttgtactgctaggttatcgtgcaagttttctgtagattatcctaattcagcataaatcagcaggaatataatgttgtacaatttcctaagaaatctagtaccaagttcggcttagccttttcaagattgtgttctggatattgcaggaggtaatcatggaatctaccacattgtgctgctcagttctgatttcactgatccctgctgctgccataattaagcccgaatcagcatggtttgacctgtgttcatttcttgtaaatattaatatacttacataattacttttaaagttaaacagtaatagctctataaagagatgggttcttaagtttcacattaatcgcaagcaccttaataaatttgttagaacagtttctattttacatgaacgatcgcactgttttgccactttctagtgatattatagaacaagattaacaaaaccgctagcccatagattcgtgaaagagagagtttgagcgttgagtgtgactttaatgcgtgacgaattgagaagagaaacaaacacacgtgagagaaaataatcttcaaatatattcaacccattttgtaaaaagtacatccatcatactaaatttcaaaccaactgactcacatacacacacatcggggaatacgagttaattgagaattgagcgtttagaagcgatggttattaaattattaattacaattaaagttagacttacataaagtgaaaggaaaaatattagaactacatagatatagctaaccgaaaaaagagcaaaattgaaaaccagaatatctgaattcttatgtgaaacatgttttaattggtgaaaaagaaaatgaaataacttatatcgataatgttgcttcaaatctgatgagttgattctctattctatacatttaagcctgctagaaaattaaacaacactgcaacgttgaaccaactctaccgcactggtttgaggaaggccaattccatgctggatagtttttagagccggaaaagcgatatgtattttctaataatgttcccagtagcagagaaagagcagagaaaccttgcttatatcgacacactgttctattttagataaaccctagctaaagtgccgcccgcaatgatggaatcatagcttttattatttcgataccagttccagccctttgttccactctgtggaacatcagaaggaaccttggttcgctttgaagaaaaagttctgataatgtagtaatgcgctaattattttgaatctttttatgttaattttctatttttgaaagtgggaagatctacgtgtggtagttgccaagaaatgtgcaattcaagtaattttatatatgattttacattactgataaactgttcataaccatcgttaactaaattgatgtaacggaagaaatttaaaattaacgcaaaatttttcaaaacattcctattaaattgacaattatacgtttctttcaatgctcgtccttgattaacaacgcctcatcgacaaaagcgatttgattttatttatagcgttccagcaaatacaatttacaatcgttactagtcgaatttttcgtttttcaaatgaggcaatcccaaactccttagaacttgaattggaacttccggcttggcaacttccgcctaggttacttcctctatctttatatgagattcagtcaaacttaccacctatagagcttcgaaaatctacgaccagaagaaacaacagaaaatgatgtggaacgaattttttagccgaatacagcaaacgagcgtaaaagtgtagttcttttgaagagagtgcaaatacttttagggttagttttttttagcgattgatgatttgcaagacgaaaaacgattaaacgattgagagaaagagcaacaacacgattggtcaactcatggaagaataataaaatcaactaaaactaagcttttcgatgcgatacatccaaacatgataaaataacacgagaaaggaatgattgctaaattatgaggaaaaatagaataaattcaattttagtaatcaaaaaccaaacattacttacagaataacaacaacaaacatcaaacacaaacatcagttaaaaacaactaaacatcaaatacaaatgcaacatcgctaaatttgaaaaaaaaaacgattgcaagattacaacagcaaatctgattctatgatgtgacaacagcatacttttctttgtaaatactattgaaaatggtaataaaatatatttaaaacag

SEQ ID NO: 663 - DNA, 3328 bp, Aedes aegypti
cttttttgcaagggaacgaaatgagattgttgttgtcattctcgcttcagccaggaagggtcgcgaacgattttttggtggaatttttctacaatttcctccgttggaaaagtgctcatttgtggtcggaaagcacaccggaagtgaactgcattccgctcgaatcgaatggaaaagtgtttgtcgggtagatatttgaaaatttgttgcttttagatttgtatccgtcgacccaagccttcgagagtgtggataagaggttgcgaggtactttccaaactttggaaaccgaagagattaacgaggcgacgacggagaatttcgatccaaaatggtgaagagaaaaactcaaccaataatcgattcagaaagcagcagcgattccggatccggttcggatcttgattcggagctgctgtcattggccaagaaaaagaaaaccgccaggctggcatcgaattctccgggagggaagtcatcggattccgattcggaggatgattccgagccagaagcggcagtgcagcgtaagaagcgaaatgccaagccagcctcatcctcggagtcggaagatgaggaagaggaggaggatgaggaagaagaggacgagccggaagaggaggaggtcaaacccgcggccaaaagtggcgtaaagcgtaaacaaccggatgaggaggaggaggaagagaaaggcggatcggaaccggaggaaggccaggtttcgtcggaggaggaagaggaatctggtaccggttcgggagatgacagtgatgatgaaagtggaagcagcagtagcagcgattccgagttcaatgacgggtatgatgatgagatgatgggagatgaagaagatcgggccagattgaatgccttgtcggaaaaggagcgtgaaacggaaatcttcaagcgtattgagcgacgcgacgttatgaagacgaggtgggagattgaacggaaactgaagctggccaagaaagcagaacgcgcgaaggataaggaatcgcaacctccgaaaaagaaaaagaagaaggacaaagcgaagaaactggctcagcagaaggagcaagaggagaagaaaaagaaagccaaggctccttctcctgtgccgaaggaaccgtctccacctccaccagtcgttcagcaggctgagccttccgagggagaagctagcgacagttcccattcctcgccggacaaatcaaaagacgcagaatcggcttctggtgcttcggattatttcgatccgaaagaacgttcaaaggaacgaaagaagaacgttgaagccaatcgaacagatgacaaacgaagcaatgccatggccatgttgaaagcgaaacgagaaggtaaagccaagcgtgaggaagaggaagctaaaaaggaagcgcagcgcaaggcggaaaccgaggacaaggatgatctggatgatgttcctggtggcaaatcgcaaaagcttaaagcttcagacatctattcggacgattcgggaagcgatagtgaagatgataaaaagtccgatcgtcgatcgagatccggttccagtagcggcagcggaagcgacagtcgttcctcctccgacgaggaaacgtgggacaaagaaaaggactccaaggaaaagaaaccctcgtctagttcgtccagttccagtaagaaacctgccgctatcagcaataaagaggagctcaacaagttacgaatctcgaggcacaagatcgaacgcttcattgcgcttccgatgttcgatcagattgtgctgaactgtttcgtgcggatcaacatcgggaacaacaacggaagaccggtctaccgcgtggcggagatcgtgggagtcgtggagacggccaaaatctaccaatttggaaagtgtcgcaccaacaaaggatttcgactgaagcatggcagtcaggagcgggtgttccggctggagttcatttcgaatcaggactttacggacagcgagtatcagaagtggttgagcgtttgcgaagccactggaacggcgctgccctatgtggacgtcattgagaagaaacagcgcgaaatcaaggaggcgatacagtacgagttcaaggatgcggacatcgacaagctgatcgaggagaagaatcgattccgggcacatccgaccaactatgccatgaagaagacgctgctcatgaaggaacgtgatgcagcccaactgcgcggagaagacgaactggcccgcgacctaaacactcaaatcatggagctcgaagagcgtgccagcactctggacaagaagcgtagcagcagtattagtttaatttcctacatcaacgaccgcaaccggaagcgcaacgtggaagatgccgagaaggccatcaaggaggaaattcgtgccactcgcggtatgaagatcgaagatcctttcacgcgacgtcagactcagccacggatgtcgttcaaagcatctgagaaaaataatgaagtccccaccatccaaatgccggcgcctccaccgccgggacagaagaagaaaccagacgagaagaaagccgcatccagtgcggacaacaacctgtactcgttgcatgattttgaaatcgatctggacgtacctcttccggtcggctctgtcaatgtacttccgaaaccggtggagaagccggtcaaagaatccggcccgaagcggtcactcaacctcgaagactacaaaaagaaaaggggtcttatctaaagcaacacactattcttaccgagaacgagacaactatcggtattaccttactattactctatactgttccccactaagtagcaacggaattagtagttgcatcggaatttgaaaatgtttcacgcttaaacattgacagactccaccccctcacctaacacacaagacaccacaccgaagagtttggtaatatctattcacctgtttttggataaaaattcaaacgagcactagcgaagattctcacgctatatcctcccttgttggcatgattgattctttgttcgattagagatccttagaagaatgctttatttgaaccatggaaattaacccgttgcaaccacgatccacggtgggtcgacagacagcagaacaatagcaaactattacgttgataaattgtgtaccacttagactgtcttcttcttagttttatttattttcgtcatcccctcacgatatcaccgatgacgacgatgacgatgctaattgtgtaggataatcaaattaatactgctggaaaagcaaatttaaatactataagttcattgtaagcgcattgcaaaaggcaggaaaatatttctgagcaagataaggaaggaaaatataacaaatgtattgttataactg

SEQ ID NO: 664 - DNA, 1014 bp, Aedes aegypti
atatttggtacgtggtgtgcggcgtgtgcggagtcgccgctctgtggacttccgatttctacctgacactgttggtgatcgtgattttcctcgccgttggctgctgcggatcggtgctcagcgccatatcggttgatctatttccaactaattatcgggcaatggcgctctgtctgatactgatgaccggccggcttggagcgatggttggcagcaacgtggtcggcgtcctgctcacctacaattgcgaactgatcttcattgtgatggggggactgctgatagtttgcgctgcaattggaacgaccttaccgggaaagtgacggagcacaattcgaaaaatgctgatgtctactgccgctgctcttctttcatcgaatcgtaccttgtcacaatcatctcgtcatcagcagcacacctctaatggcctgcccaccatcaatatgttcaatcaatttactacgcacaagaacctgcgtcaacgctgccaaacgagcgaaactgaaaaaaaaaatcatcaatagcatcgatagacgtgcctttctagctatagcggctcagtaccgctggcagttgagctagaaagcctcagctagcgtccatctcgcgggctatcggttatcagccaataaaattgcataaataattagctccgtgaaaggtatagagctgtcgatgagagcaagaaaaaaaagatcggctaagcatgaaccggaaagtgcaatcaacgaccgatcatcaaatagcaactaggtagatcctatagagacttcattttacgagctcacacgccggcgatcgacggttatcatccattagctattaggacgatcgatcggagtaccgccaactacgcaggcgagcttcgatcggggaggccataaatcaattttacgaggcctagttgaaagtgaagctgttcgatatgagattgtattatggaaagaagtgtagttgttagaatggattcgatattttaactaataccaaagtgaaagttattcaatacgtcac

SEQ ID NO: 665 - DNA, 3707 bp, Aedes aegypti
tctggatctgtcaagagtgcaaagtgaggagatcgagagcgaaaaacaaaatttgtgagagagatagagagagattatagaaagagagtgattaaaagcgtggtggacacgagagtggcgtatgcggtgtgaatcttcgtgcgttccgctaatcaacagacaacagcatcggttgtgagcgaggggcgagtggtgagcggcgagagagagaagtgtagcagatcataaaaacatctttccaactgcttattctggactaccacatattgtctcctcaaaagtacgtaaataggaatcacattcatcagcagcgaacgctgttgttaactatcgcccgatggaaggacagactttagttctcccggaaagagggggtggaggaagagatgaaggtggaggtgttggtactgaagaattgcgcgcctttgcttccgttgcggaacaaggtgaaaccgccgctgagaaaacccaactctgtccgccccgaacccgatcgcaaggtggcagtaataagaagcagcagaacaagcatttctcgcgacagcaatgtaagagcaaaaagtggaaattgaacaaatttaggcgcaatcaaaaggatggcattggtggagggaagaaaaaggatcaagcgaaaggattggattgtggtttgaccggtgggaaaggagatgaaaagcaaaatccgttgggagttaatacggagtgcaaacagcaacagggcaagagcaaacatttaaataagaacaacaatagcttgatgcaagcaagaacaaaaaggttgcagtcggtttcgaagttctttctccctgataaacgaccgaggaaagattgtatcattccgccaacaaaattcttactgggtggaaacatttccgatccattgaatttgaacagtttgcagaacgaatctgagaatgctgttaccccaaaatcttcgcccattccaactcctccgcattataagaacaaaatcgaagttatcatcccgccaaacatcaacgacccgctgcatttattggatccggtggattctgtcgaatatgaaatgcaactctgctcgcctatgaaaaagaaacagcgagcccgcaacaaacggaaacgaaagtcgaaatctgagaagaacaatcaaagcttggattccagcgcggggatcgctgctggaggtcaacttagcacaagcatttcggaagccgaagcaaccacagcagaagaagctcaaatggaagcccctgggtccacaggaaagaacgttgagcattcgcttgaaggcgggaacacgggtgatcgcgataaagctacccgatgtttgcgattggacttggaggtttgtcgcaaacgacgaattagcgaaagcacttgttctagtaagaacaaggtacgtcggatggactctatggataagattgtgagtccggttattcctcaaccaggtgcatggaaacgtgggcattggccggccatgcctgttggaggccgaaatcgcacacgaacccaatcatgcacatcaaacagcgaagaaccacccggtaagcaacccgttctcgaaggggaggtcaacactgaaactcctcaaaccacagaaccagacattaaggttaataacgttgaacaaccaaaatctgaacctagtgaaagtgagacccaagccaaacccaaacctcacgaagattcaaagtatcactacggcaattatgaccgatattacggatatcgcaacttgaacgagtttatcgacgttcggctcaaagtattcctacgcaatccatatctgttccgagataaggatgttcttgatatcgggtgcaacgtgggattgatgacgattgcagtagcgaaaatgctgcacactaaaagcatcaccgggatcgatatcgatgagaaactaattgccaaggcaagacgaaatcttacaacgcacgtcagaatacaaccaggacatgcaaaacatggtggggaaactaagctgagtggggagaaaaggaaaagaaggatatccagaaaacttacaactggcgaagagaagtcattggtaaaagaagaagaagctccacacgaagaaaaacctgcagaggttccggacactgctgaaagcatgcccaaaccggaaacatcatccgccaaaaaaggtcaacatccgcatcggcggaagtttcccggccgtcacggtcacggaaaacatcatatgcacaaccatcatcataatcatcaacggaaggatcccaggaagggcaattcggagttttatccgatttcgtttccgttgtcgttgggaaacctcggatctaaggcgtgtctgttggagatgggcgcgaaggatcacaaattcccgaataatgtgatcttcaaaacgatgaactacgtccttaaggatgaatcgctgataaattacgatactcaacagtatgatctgatcctgtgtctgtcagttaccaagtggatacatctaaacttcggtgacaacggactgaagatggcgttcaaacgaatgttcaatcacttgcgccccggcggaaaactgattctcgaggcccaaaactgggcaagctacaagaagaaaaagaagcttacggatacaacttgtgagaactacaaaaatatcgagtttttcccgaataaatttcatgattacttgctaagtcctgaaataggatttagtcacagttatcccctaggtattcctagacatttgagcaagggttttcggcggccaattcagttatacgttaagggcgatttcactccgagtcaggctcaatggagtgacacataccatccgcagacgccgtatgtcaaccaccataatatctacacagacattaccacccccacacagaatccctgcatttggggttccacaacaccgtatcagccaagttacagcacccgttgtacaccgtcgcacagttttatggccacctcaccctactataacccgagacaaaccgacagctaccaaccgagctacgatgcgggcaatcgtcgtggtagttactgtttcgcttcacccctctactcgaccacctggtcgccaccgtcggatttgcgtcaccggcgatccgcctccaatacgcccaattcggccagtattagaagcgcagaaaacgatgaacagttcgcacaacagcagcatcgtccgcacgtatatcctcctatggaggtgtttccgctagaatcgactgccgttcgatcggtagcaccgggatcggccagcgttcggcaaacggattccgattcggaaccgtcgtcgaattcggcttcacaaacgccgacgcggtcgcagtacgatgtagaccagtcgtcgaactcacccagtactacgcactcgcaaccggacaagtagaaaacagcgtacctttgcttacaggtttcagttttttttatcgaaatagttgttgaaatcatttttaatatgctgtgattgggatgttttttttattagcaaacatgtaaggaacttcacaggataaccaacagtacgaaactagtccgtttgctttgtggaaacatttttttttctgatgttacaaagaaattgtagtacatacaatgagttagcattacaagtcatacaacaacaaccacaatatttctctttgggctgcatctcaaacaaactgcttataatgtaggaaacgaaaacagttgttgtatatagtttataagttgcataatttgtttgtcaatgaatatctaaaaatgagataaaa

SEQ ID NO: 666 - DNA, 3644 bp, Aedes aegypti
atgtcggaccacattagagcagcgtcgatcgatagcagcaaaggcaatggcgggagtgcatcaaatagtgcagttctacccacttcgtccggcagtaaccatgaacggctcgcagagacgcagaaagtacccaattctgatgatttgtatttgttcgactcactgattgagctatgcaggaataatatcaaatactttgcgagtgatgaaacggagactgggcttagaattcacggagctttcgtggggttgattgatcacattgaaaccgcaaggcctttggtaaaagaagttcatgaattcgtgcatgagtatgacttcgatgaaaatactccaggaaatggattcagaagttttctgtatgtggttgattcctgtgtcaagacaactctcaagctggcgaggtatgtaatggaaaatcgaggaacgatacttttcagaaaagctatttatgtaaaagaggtcgaagcatacaaccatttgatggccagcttaaacacatgcctcaaacactgtcacactctacgtgaatggaccacgtctggagaactattccccgaaggacgatccgttgaagaacttcttggcaaagcggatacaatcaaccagttctgcttctatggacggtgtctcggctttcagttctgtgaatcaatgaaaccgttactcaaatttatatctattgggatggctggtttttccgagggatattactccgaaggaggcaaaatctctaaagccacaagcttaatgtatacaagtacaaagtacatgttggagccggaacttcgtgctcgacggatagtgaacatctcgcagcactcaaacgtggacttttgcaaagcattctggtttttggctgagtcggagctgatgcactctctgccgtcatttgtgggattcaaggtgaaggttagccgagtgattaccataccgccagaacctatacaactaaaagcagagaagtccgatgagataatcaacatcccgatccctcaaagccacggtggagctggtccagtcaaagcacggcttatcagtgcagtgaaacgcaaaggaatgattggagagaaagtcaatacacgcagtaccatttatcccccgtccaatggattactctttcactgccatggaggagggttcgtagctcaaagttccaaatctcatgaagcgtacttgcgcgaatgggcggtaacactcaatattccgatcctgtcgattgactacagccttgcaccggaagctccattcccgcgtgctctagaagaggttttctatgcgtattgttgggcattgaagaattgtgagctgcttggaacaactggagaaaagatcatctttgcaggagactccgctggtgccaatttaaatttgggttgtgcaatgaaatgcatcgaaacgggcccctgcacgaatgctatgcctgatggatccgttactgccgtttgggtcatgatgcgctgcttgaaggcttacgcgtgtccaagcaaagaagtgctcgaacaaaaccgaaagcgccacgaggaaagacaagcgattatcaatgccggtcgaaaagtcacagatgaagtgccgaaaatgttggagcttaacggaaatgcatttggcaaggccgcagaagacaacaagtcagaccattcagaatctccggaaaattccgcttgggaccagttgaacagcttaaacactttacagttgaacaatcagcacctgagcccgatgagtgacactgtgagtgatacgattgcgctacaagggcaaaccgtcgggaatacgattgatctcatgagtccagacgagagcaacaccatcacgtcgttggaagaagactcgcagccaatcacgttgcagcaagtcaatttgaacaccgaaaagagcaatgtaacggtgatggacgatttggacatggaccttcccagcgatatgagttcggagcagaataccaacaaatatgtgtcggatttcatcgaaagatatgtactggacacaaccacgaacgcagcaggagaaattgagccagtcttgagaccggtttcacgatcagcttccgaggagaatgtagtactggacataggaaaagaaacaattagtgtacaaaacctacaagacaaagtctccaacgcggccagtaacctggtaaaccgggtatcctcgacgttcaattccatcactacttcgaaaccaattaccaccagtggatcgcagtccgagttccaaagcaatctggaagcgctgatcgcccgcagtccctcggatgagttcatctttgaagtgccgaaagactctcacatgtcaccgtattgggcctcggatgaagtgttaagccaatttcctcagacgaaaattttgacggttgtgttggatccatgcctggatgactgtgtaatgtttgctaaaagactgaagaatctgaacaatccggtctcactggatatattgccagggcttccacatggatttctcaattttgcgtctatttccaaagaagcacatgaaggatctaaactctgcgtcaaacgtattgcagaaatgctcgaagtatcgcttccgacggatgatctcgctactaaaacgtgttgttagcaaatcggtcgctgcctaacagaatcgaagcatttgtttcgcaaaggtagtgaacgcatcgataacgtttagtagcatacactgtactgcatcacaaacgcattaactgctaaccgggtttggatccgaatggagctactttagagaagctatttaagccgatgttcaatcatcacgagaatgtttttatgagtctcgtaatgattttgcatctatgctttttataaaaaccgtgacacgctataactacacttttgcaacaaataatactgaacctttggaatcttatattaggcagcttgcgcatagttatataatcataaatcgaaggaaatttaatttccatcccgattgtgaattggcctttgcttagggtccagcattgtttgcaaatatatttttgattaggtatatgaaaactcgttgttatcaaaaagcaaaactcaagaggcatgcattaagtaataataattgaataaattagctcaatgaaaagttcgcaatattacacagcgaagcaatacgacaaacttatttaaaccaaaaaaccattaaaaaccgaagaaaaaagtcaatagccagaaagcaatctaacagaaacaatctacctagtttgtgtaaccaaacaacataaaaaggataatcaagaaaaaaagtgaaaggaagctaatcaaaaccaaaaccgatccaccttatttacattgctcaagtgtcgtgccggatattatgtgactatttttatgcgaaagcgatgtgtttcatttttgtgcaattgactgtaatttattgagaaaaatgttatagtaatctcttcaattcagctaaatgtgctaaaaaataaaccaaagacaagaagattatactgagtgtattggcgacaaattaactcgacggtgtttgcaattacattttgattttatttatgacaattttttcaggtatgaggaaacataaaaaaactatttacaaagtatagcattaaacatcattatcggaaggaacacaacacattaacttgtaatataattgtacctacttgtgcaatatatgtcagatatgta

SEQ ID NO: 667 - DNA, 3840 bp, Aedes aegypti
cgcgagtgttgctgatggtgaaagacgtcgtcgtgcgaggaaaaaatagtgacgacgaatcgaagtaggctgtggagcagagaagagtagtgtgtgatcctgatcctgacaagagccagatcacaatcaaccggaggaagggcgccacagaagaggcagaggcagagggattcgcttggaagccaacagtgcaagaacggcagcaaaagtggcagcccccgcagcagtatcgaagatgaacgaattcgtcgtggccggaaagtaccggatcgtacggaagatcggttctggttcgttcggagacatctacctggggctgaatatcaccaatggcgaagaggtggcactcaaaatggaaagcctttcggcgcggcacccccagctaatgtacgagtacaagctgtacaaggtgctgatcggcggcgtcggaattccacacatccggtactttggccaggagcggcattacaacgtcctggtgatggatctgctcggaccctccctggaagatttgttcaacttctgcagtcgccactttacgatcaaaacggtgctcatgctggtcgaccagatgattggccgcctcgagtacctgcacatgaagaacttcatccaccgggacatcaaaccggacaacttcctgatgggcatcgggcggcactgcaacaaactcttcatgattgactttggcctcgcgaaaaagtaccgggacttccggacgcgcattcacatcatgtaccgggaggacaagaacctgaccggaacggcacgctacgcgtccatcaacgctcacctcgggatcgaacagagccgccgggacgacatggaatcgctcgggtacgtgatgatgtacttcaatcgcgggtcgctgccctggcagggcctcaaggcgaccaacaagaagcaaaagtacgaaaagatctccgagaagaagatgtccaccccgatcgaggtgctgtgtaaaggcttcccggccgagtttgcaatgtatctcaactactgtcgcagtttacgattcgacgaggggcccgactacatgtatctgagacaactgtttagaatcctattccgtacgctaaatcatcagtacgactactcctttgactggacgatgctgaaacagcgatcgctgatgcccggcgcagtgaatcgcgcggaagaacggcgtgataaagataagcaaccaccaacggaaactgagaaatagaagttttgaaattattttttatgtataaaatatattacaattactaaaactgagtaaacttaaaacaaaacgggaatggcagaagaaaaaagaagataacaagaaggaacaaaaaggcgcgaatgcgaagagctgttacaaagcgaggaagaaggaaaatgaacaggcagcagaaagagaagcggaagaagatgaacagagagaaaacagaagcggaaccagaggtgcaggacgcggatacagaatcggatacttttttgctttgtgggcaacagagaaaggttataactgtgaagaagctgatatagttgagtaacacttgtaaacgaaacgagtggaatgtggcaaaacaaatcttgctgaaaataaaataaaacaaaaaggaaacaaaacattagcaaactcttaacattaattacaaacaaacaaagtatgtaaaattaaatataattattagtgattatgaattacaacaatatcggttgaagatgcggtggaaatggaggacggcgcgttttttcacggccggacaatggcacgagcagagccgaacatcaaacaacagaactgcacttcccgtctcggcttttttcgtgcgcattatccgatcgtcagccctgcgcatccgtttcacttcaagtacattcattcacacagactcatacatacgtacgtacatacagaatcaccatttttcgtctctcatggtctctcgttcctccccgttctctcaatataatcgtaagccacaactacaatcatgatcatttcacatacacatacagacgttcgttttatttccccgttcgtacatattgatgaaatattgctgtgtattactactacagataaaacaagaacgttcaatacgatgaaacgctattactctacaagtactactactacaaaatagcataaaacaatggaaataacaaaacagtgtttgtctaatgttttcgttttccgactctagtttttagttcaatacactcaatattatttgcaatcgaattttgcgtatttcttcaccataaaacgaaatgaatggagaaacccaagaatttaatcaattaagtaaaaaaagaaaggaacaataataaacacagccaatacaacaaagttaagtaaatgcaaaccagagcaaaaaagaaaaactctagaattagaaagggcctgctccgtgaccagtagcagcgttgtaaatgtgactctgtgtctgtgaatttaaaaaaaaatctactactctacaacaaacagcaacaacaatgcacattttccctctcctggaaaacgcttttctctgtttccgttgttccaaacacttattggaagtcgtcgtcgaatcccgtcgatccgatcgcttttggatttgtgtcagttttgcaatttggtccaaaccaccctccccccatccctcctcactcacactcacgagtgtgagcataacctcaaacttgttttgattgtttttattgttttcggataaaaactgttcaaaagcgccgccgatgcagaaaccaagttctcctgtgttagagtactagttcttgtactgtcgatagagtgaaaactaattagtaggagtataattgatccttctgtccgaatgttgtgtctttttggtatatgttttaggattaacatgttttcctatttttttctttcaccggagatctcgcgaaggagcaaaagaggtcactctatgcagcagcagcagcaacgtcaaacaatgcatagaaatttcgtttggagaacaaaattgtggaaaacacagaaattaattataaattaatcgaatatactatcaaattaaaagaaaaaaaacagaaaagaagaaagtaacaaattatgtgtaaatataaataattaaaaacaaaatgaaaaccatgagcaaaaagcgaacagacgttgacaagagtaagaagacaactcttctcttgaggaaaaactaaagttctagacaaaacaacaaaaaagaaaacaaaacaaacaaaatcagttttttaaactatattcaaaaacaaaaagcccaacaaatatctaacgactataattgtttaagtaagacaaataagataaaaatcccaaaacacacggacggaaaacagtttccagaatgcgatctgcagagaaacggatccgtaaatcctcctaaagggctctttatccccctctcaccggttctccggaagttcgattgacccttcctggctgcggtcaattggatccccggagcacgcccctcccctgttcccccacgcctcaaaatggtttgaaccaccctcccatccctcgttctcctcgacttccctcgagagaggctacacacaattacaaacaagaaggaaaaaccagaaaacagatataaatatgagaaatacatgataacaagaacatataaagtgtgcgcggttcagctaggagccgggccggccacaagaagaacaaacaacaacaacaacagcagtaaaagaaaaaaaaaggaagaaggcgaataaaacaagcgtaaatcagatacagtaggaaggatttattattaggaagtaatgattattatttttttcattgaatgaaggtaaaaatgataggatgatgcaagaagtaaacagttattaaataaagaaaacctaaag

SEQ ID NO: 668 - DNA, 1020 bp, Aedes aegypti
acttacctagcggacgatgccagtctggtccagtcgaaatacggagaatttttgtacaagcaccttatcctgttcgcccccgtggaggaattcggtggatcgttgagcgtcgaggccatcaccgatttcgtggataacggaggctacgttttggtcgcgggacgctcgaacccaagggatgccttgatggaattggcattcaagtgcgaatttgaggtggacgaggagaatgccgctgttattgatcatctgaactacgacatctcggacagtgaagatcatacattggtgggtgcttctccggagaatttgatcaattcggaaatcgtcatcgggaagaaatccgtgggcccactgttgtaccgaggaaccggtctgttggccgatatggaaaatcctttggtgttgctgcgggtagtatttaccgattgcagctatgttccggacgcccctatcaatgagtacccccacaccgttcgaaagagaacacttttgatcgcagccctacaggcccggaacaacgccagagtcgtattctccgggtcactctatttcttctccgtgtcgacggttcagcgtgcacaggatgaaaatttgcacaacaaatcggataaccaggatatggccacattcatcagcaaatggttcgcgttcggtcggataaaccttaaaaacacggttagaaagaaagcaaatcaaccaccagtagcttacacaatcaccgaaccggtcgtgaatgaaaccctggctgccgatggcaagtggcaaccattccaggtcaacgatatccagctggaattcgtccggatcgatccgtttgttcggaccactttaagcgatatcggtggtggacgcttcaggtcatattcaagatccccgatgtgtatggcgagtaagtttaaggtcgattacgatcgcatcggatatgcccatctgtactcgacaacgcaggtctcggttcagccactcaccctcacccaatatgaacggttcatcccaacgcgtatccgtactatgtga

SEQ ID NO: 669 - DNA, 1233 bp, Aedes aegypti
atgaacacacgaatcgacaacaccatcgttatgtggttcaaaaccaccaccctgctgtacgtccgggacaataagcactccaaagaccctcggctatcgctgggcagcgattactccctcacgatccagaacgtcaacgtggaagatgactccatctacaagtgcatcgtctacccggtcaacaaatccgcttacatcaccctgaaagtcagaggcccaccgtacaacgtgatgatcacccacggtaacaacgatcacaccaatcgcaatttggtgatccaacagcgcgatcgaaagtttatcatccactgtcgggcctcgggtttccccacgccactgatctcatggtccttccggggaaaacatttggacgaaaatcacgccaaacagaccggcatcaacattcgcaaggagttcctggaaattcatgacgtcaagcctcatcatgccggcgattacgagtgcttggcccagaacggaatcggcgaaccagtgagtgccgctgtgaacgttcagatcaaatcaatgccctcgatcgctaagcacatcgattatctgaacacggccatcggagacaccgccgagttggtttgcctgtaccacagtgatccgaccgccatcaagatccagtggttccgaggagacgagccactgcacgacagtgccaagttcaccatcagccgggatcaccacaaccaccacatgagaacacggttaaccgtcaaggatgtcgagcagaaagatttggtgacctacgtgtgcaagattacgaacaaccttggagaagcgatggccaagactaccctgggcttgctgccaggtgccgcccatctggcgaacttcagctattcggacggactgctgcataccatctggagggtgcgaagcgtacagcccctgtccgatctgcagatcctgtacaagggagaaaacaccaaatataccactatcgacgctaccatttcagagcagaacaaagaggaaaacggcgatttttggaacatcaaacgctcgatccggctgcccgagggcgaatggttcatcactgcccgcgccaaaaacaccgaaggttgggcctacacggaaaccgttcctctgcagttccaaatccccggtgaagtctcgctggagaaccgagctcccggaggcagctccggtgcttccatccgacaggtgtcgtccgccagcttagccgtgctggtcctccttgcggtgcttagacgaatgcattaa

SEQ ID NO: 670 - DNA, 1241 bp, Aedes aegypti
gacagaaagagtcggaaaacggatgtacgatcgttctcttgctagtcctaacgtggtgtaaagttgccgtgtttccatttgcctagcagtgaaaaagtagttaaaacccgggaaaaagcaccgaaatggccgacgaatacttttacggagcaaccttgaaggatggcaacaaaacggtgacctgggacccagacaccaaagccgaaggttacccgcgtacacacaagctgatcatcaagcagtgcatcctgggacacgaggctgccgctgatgagttcaacgtcgtgcaggtagagacaatgaccattcgggacaccctgcgcattcccatcgccgtgctgaaggttggcgaagcccggcagtgccgcttggatctggaattctccgattcgccagtcacgttcacactggtggaaggcaagggaccggtgcacatccacggacagcatttgctcggatcgctggtcgaggagttcgaggacatggaagagatggaagaggaagttccagaagaggaagaagatgacgaggatgacgatgaggagggtggcccacagaagaagaagcaaaagctcaccaacaactccaagggcaagccaggtggtcttcccgccggcagtaatagtgccaaaaacagcaaaaagaaataagcttattacctcctgaacaccttggaacactacgaactaatgcacccatacacaacatgactaacagcagcagcattcaacaaccaataggaattgtaagtcgagtaaagtcatttattcaatgcacagtaatcactcggagtaaatattataccgttcctttttcaatcaataaattcaaacaagaacagaggaagcagattgcttcctcgactaaacaaaacaatcctacatttaatattaaaacaaagtaaaacttagttcgtaagaaatcaccctttctgtccccgataccacgctgtgttttccgtttccgatgtatattttcctgtcggcgcctgcatatctgtatcccgggtgtgccgttttaaaaaagggtagaattctctgaacagcattcattcagtgagttttgactctacactgtagaatacctcttgaatatcctggggaagggactaatcatgacggccactgactatcatcaggcaggcaggcaatggcaaaaagtgtagcgaggaatatgaaagcggcaaagttagcggattaagaaggtacaacaaacgtgagaaaataaaaagaaataaaaac

SEQ ID NO: 671 - DNA, 3360 bp, Aedes aegypti
tgcacatgttcgattgcaccaacatcactttactcaatggttgaaaacaaatatcattgagcagttttttgaagctcatggcataagttatattcatacaataaaattacatcagtgttcgtaaaatcacgtttcgaatgcctcaagggagagcactgagctcatcgagagctctctctctcgagcgagcattacaaacagccgtcaagtcccacaacaaacggtaatcggaaccacagagcggaagacgcagctgtcagtctctccgccctttcgtccgtcacatcgtatggctcttctaccgtcagcgagctcgtacgactgcaatgtagtgtgaaaaattccgtaccgcgagtgagatcggtgtggaatattatttttacggcaatcttgccgtatcgcagtcgttcgtcggttcgcgtgtggtttgtggattcaagattttcgtataaaatcgactgaatcccttgcgtgacgtgccgggatttacgcagcgaagccatcatctaccagagaaacgagacttcctgacagctttgtcagcagtgagttctacggtagagccccctctaaaaatcccacccctcgctgcgccagctgtgtatatacagtgaatgataacaggggcgcaacagtggtgactatcattgccgccggcaccggggaatggaagacgagctggaagataagatcctctatcaaacgttcttcaaatcgcacatgaagctcctgtccaagttcgcagtcggcgtatcgccgctcaacagttcggtcggttacgtctggaaagtgatgcgcgtctatctgctcaagccggaggttctgattgccgggttgttgattttcgtctttgtgctctatcttcaagcgagcgaagtatggagccgaggattcatcgggaaaatcagcagcagtttcggcctctcgaagggaacccgttccggaaagttggcgctgctggcgtcggaggccgagaagcgaagctgggaggacaaacgcggcactagtgcagtgtacgccgtgcagggacgccgaccacggatggaagatcggttcgtaatagacgagaacatcaacgataccggtatatcattgtttgcaatttttgacggccatggtggagagtatgcagctgattacgccaaaacggtgttggttcgaaatttgaacatgaagttgacacaatcgtctcagatcgcctcgggaaaaattaccccatcaccggtgatatccgacctcaaggacaccaaagattgcgccaacaccaaagactcagacgacgaagtgaacgaacgacacaagctcaattcaaactccgtcacaactgtggccaatggcggcagttctttaacgcaacggaagcagagttttcggaagtccaaaaccgaagacatagtagacaaaacgagtggtggcctaggaggaactaacaataatggaaacagcaataacgcgaaccaacagctggagaccgatctgcttagcaaatatatgggcaatcagtcaccaatgcggcaactgacgaaggaaaatttactgaatggaacgacgggccagcagagcgccaatccaaagccaaaaacgtacgaagccaagtgctacgtgcagaatggcagtattaattttggcaagatcatcacagacgaagtgctggcggccgattacgatctggtcgagatggcgaaaaaagtttcgaacttcgccggaacgacggcactcattgcggtgatgcatcacacgaagttgatcgtggccaacgtcggcgactcacgtggcgtaatgtgcgaccacaagggcaatgtcatcccgctgtcgtttgaccacaaaccgcagcaagtgcgggagcagaaacggatcgccgacgccggaggtttcatttccttcaagggcgtctggcgggtggccggaattctggctacctcgcgtgccatgggcgattatccgctcaaggagaagaatcttgtgatagccgaaccggacatcctgtcgttcgatctggtggatcatcgaccgatgttcctgattttggccactgatgggttgtgggatacctttagcaatgaggaagcagtcgcttacatccgcgaccggttagacgaaccccactttggtgctaaaagtatcacgttgcagtcgtacaatcgaggctcggttgacaatattacggtgctggtgattgtattcaaaaatggacgatatcaaatcggttcatcaaacggaaactgaaccggatcatgtctataatcctctactgacccacttattttatagcacgtaattaatttctattacttgtacggaaaagctttttaacatgtcatagagaaaacgtaccactaggttcgtggtatagtgttttattgacttgataaagtgtgctgtgtttagttgactcatattatagtacgatctctcccacaccgctccatatacatagataaaagcatgtaatactgctaccagctttgtgctgggaaacctgatttcaccaggaccatttacatataatttctgctcgcgtaccaaatattctatagttttgtaacgtccttgtagctagtaagtaaattaggtagttaatacacaaagacacacctaaacgtataagatctgctaaagaagggaaactcattcgaaaaaagaacacatcctgttcatcctgtttaaatttacacgcttcccgggtgcagccgttaatgtctagctcgtaaattatttttattttgtgttctatttaaaatcagttccgaaatgcaattatgttagcccactaaattattttcgcttcatttcatttaaaaataagtcatttctcaatgcgtttgtctattaggaaagccatcttggtgcttatttataactgctgtactgtagtttcccatcaaaaagcgagctttcaatcacgctaatcactgtgcctgagtaaaaacaatcggataagatacggtttgtagaacacagtgccaaagaacagcctatttgatatggttgtaaggcaattcaaaagtaacacttggatcaaacataataataggcaaacattgtaactttcacttcactttgaccatgataagaacaaacataatgcaaggaaagatcggtttataacgcatcaatatgaacaatacaaaaaaaaaacagcaaaaaatgttacaatcactttagaaacaactattattgatttcaaacaatttgagtaggcgagattagaatctgaggagtagtcggaaatatctcacaaacgctcacggatttctataaaaaaacgatcatcgatattttagttgaaagagaattaggagattttgagataaatcaacctaacaatgaagtaaattgaaattttaatacaactgaaaa

SEQ ID NO: 672 - DNA, 1977 bp, Aedes aegypti; identical to SEQ ID NO: 302

SEQ ID NO: 673 - DNA, 4269 bp, Aedes aegypti
aaagggttctttaagcttctggacttttgtccactctatcttggacgttgtaaagcttaaatctactagagtcataaccttcgcaaccaattacacgcagaacgattatcatgttcttttagggaatttgaatgtagccagcgccagataaaaaactgaatgggtttagttttgaaatcacactgactccatacctattcctttcatccctctcgcaggagtcggcttcgcccggatggaatcgcgggaaaagtgcgaacagatcatccagatgttcaacgggacgcaactgcaaggcgcaaaggaaccgctgctagtgaagttcgccgacgggggttccaagaagaagaatcccttcaagagcccggatccgaacgcgcggacctggcgcgatggtgccgagggcattccggtgacgtacgatccgaacctacagcagaacggaatcggtatgaacgtcggagcccacatcagtatgccgtatggacggttcagcgctcctcaggtgggaagctacgccgtccccggctcccagtgggtaccgagtgggtacatgatgacccaaccgatcgcacaggtcgatgaccagcagtacgtgcagatgcaggctccacatcttagcgttggcacgccctacaagaccgatgctgttacgaacgtacagccacgtggcgtgtcgatgatcatgtccagtgaaaacccggcggctggtgtccaatacggcatgatgccgcagctcaccacattacagattggatcatcgtacatcagcccgacgtatccgtattacgcgccaacgccgtcgattattcatgcgatgcagatgggtgactcggagcaggtcagcacggcggcttctccggacgaggcgtacaccgcacagtatcaacatggtccgaagtagagtcctgccggatccggtgctacccgccagatctagagcgggtccatcatcacaaaaaaacaacagccgtcagttgaagaatcggaagaaatagaagaagtagtgtagtttccagtcatcatcatcgtcgctgattcgtcagcgtcgcaaaattcgccacctcagttgatcgaagcaaaaacgtagaaaaatcatagaaacagcctcagccggtaataacagccaaaccagcagtaatggttctaagtcaaggtaggagagatgttaatgtatttctgaagcgaggaacttatcggaacaactgaatgcaatgccaaacagaaacagatcgaaagtgaaccttgatcagtgaaggtccactacgacaattgacacgtgtagaggatcatgggacattgggggttttgaactctcaaagcagcagtgagagttgacaaagacacacacacatacacacactaacagactcgcgtaaacacacaaacaccacacactaaagaagcgaaaccgatacctcaatcgagacgagatacacataacgctgtttttacataagacttgaagaaactcacaaacaattcaaagaattccacgataacgaaatatcgcacttcgatgcatgggaagaacgaaaagacgtgtgcgctgaacacagaaggagaaggaattcgacctgcgtttgcaggattgcgtgtgtgttgaaagttccacattctttactagtactttatttgtttttgttcgaaatcatgatcaaacagcttagacctctaccatcgcgatcttcgaaagaagtgaaaaccaatcgttacaatgactgttattttttttagtattttctcacatttcttcggaacgttaagaaataaacgttgttcaatcgcccgaacgttgaaaatcctttttgtcacggttagtttataccgctggaagaaaataattaatcgccagacaaattcgtgagagcgtacgtgccgctggaagcaaacagaagagcgaaaacggaatctgctgcgaagaaatgtctcaaaacattgtgttaaaccagcaagcccttagttttgttttgttaagtttttacaattgtttttgttcccattttctcccctcttaagttccccaaggataaaatctttatttattactacacctgctctctgcggcagcagagagtaacgtttgttgcaagagagaaggaggagaacgctcgaaatgaaaactttagagaatgagaaaagtactgacacgattcgatttccttcattgcgaaatatgaacgtctaaatacatttacccatacatatacgaaatcgacgatgagagcgagaaaccaaataaaagatgggcggtagaaatagatttttttctcgaaaatggctttcatcattgtcgttttttcaacgagatgaactacagtgcagtgaaggcatgatgattccctaatttgaattttcctccggatggtccgatcgatcggaagagaagactagcgaagtatgcgtaggatgctagaagctacagcagagagaaagagttgctattttagggttaaattttaatttatttttgttggttaaggcgaagtagtggtgtggacgcggaaaagtttgagtttagggaacggtttgcgcaggagaagcagaggagaagtcttcgggcggctcggaagagacaaatagatcgcgaaaggagggaaatgcaaaaagaatgctagttcataattttagttcttagttcttagatagaccgatttgaaaatttacaatttagaagcaacctgaagaacccagagacacgacaaacacagtgacggatgagtgcatttcgagatgcgtaggaacactgcaaagatcaggtagagctaggagagatagggtgaaaatcaaaagagtagggatgagataggcagttttatgaaaatgaagattcttttctatgattttttttttttttgatttagttataattttttgtagctttaagtaaccagatactggaatgtttgcatggagaagaatgatgtcaaaggatagaagtagaagcaaatatagaactgaatgctagaagaatgaacgattgggtcagtaagggagatggaagagtaggagatctattatttttgcaatgaagtgtaacgccggatagagattggatgaagcaggaaggaaaccgaagaaggattgatgatttttttttgtttttgtagtagaatcttaacggtaagcacgaaagattttttttttctgaaaacgattgaataaagggtgaggcttgcacagtgttgcaagggaggttgcagggcattaaaagccaatgcactgcacagccctgccactggcaaagcagagcgattcaaacaaaaatggcaaaagaaattgtagttaattggttttaaattagtaatcgatgagattgctcttctccgttatgaacattactttctccattcttaccgaggtgggcaagaaatgagataatgacgagagcgcaatccaaactgcagaaagaaaacgtcccataagtatttgtatagtgaagtgaaaaggtgggcaagaaatgcactcgaaccgccttagttagggctctagttggtaatttggtgatttgggaaggaaattcttatttgtttttcatttttttccaaatctgtggatactgagattgtaagattcagggctaattactggtatctctttagagacttagtcactattttaatagtagtcatcaaagagtttctgtttcaaaaggaagatttcttaagtctctttttttggaacgcccagagattcccatgagactgttttaaaagtttttcagtaattccttccatcacagattcctctataaaaattttgagggacttcgttcggggaaatatttagtgacttatccagggtttcctccagagattcgttcatcaattctcccaggaatttgtgctaaaattgctccagtgatttctgaaggaatgcttaatttaaaattttctccaggaaatccctcagcagtcaaattctaccttcagggattacttcataaattctaacatgatttccatcggaaatccttccaataatccttctacagatttctccatttgttacttaaggatatctactaaatatttatacaggaaaaaatcctgcaaaatcaacaaaggctcattctgaaaattggattaagcaatacttcagcaaatactacaagaattctttgaggagttcctaaaggataggggattcatagggattcttccaagaacatgtgatctgcctagaaatggtccataaatttctccaggggttatttaacgggtatagggacaaaatgtcgaaaggcaaaacgtcgaatgccaaaacgtc

SEQ ID NO: 674 - DNA, 2637 bp, Aedes aegypti
gcattttccttgttacttcagtcgattattccgaagcagtgattttgtgatttggttcaaattaatattgagattatagagctgtgtctgctgaatatttccatggcaaatcgttaccacaaaggaggacattaatccaatttggttgtgagctgcggtaggagataacaggaaggaaggaaaaaaccttgatgaaatcatcgattctgcggttgtgctctcgaatgcaggcagttgacagagaatgtcgcagagtccacccaactacatggacggagttccggtgaagatttcggagcgcttcaaaccccctccgaagatcacccttccccagagtgtcataaatcgattggcacaagtccagagcgggggaacacttcgaactccggtcagctatgatttcgatctggaagcaaccgtacttaaacgaattaccgaatggcgagcagccaaggagaaggagcgttatgagcgggaggaacgggttcggcttaaggagttagaacggacacggctagcggaagaagagcagaagcgtaagttgaaccagatttcttatcccaatacggatgacctttccagtgccagtgaaggcgaagaggaaggttctgctgacgaaaatgaggaatcgacgccctcgggatcgtctgaggaacgaattcaaagtaatcacacattatcagtagctagttccaacgcagttcagcatagtcatatgaacaaattcgattcaattcttatgccaacggtgctcccagatgtggcaacgtctgctctagtgtcccctgaaaaggcaatagactccggcagcacgcctcttaacttcagcattccaaagaatacaaatttgttgaacaataaccacagtatctataacaagatcaactattcggatttcgagaatgacacttcgagtcctttcgataatatggagttgaaaactataaacgatttggacattttagctcaagtttataatttagatatttctcattctggtccagagcgaagcccagctgactccaatgaaaatgaggcaaaaaagaaactagaaaaccaatgttccccgaatcagaatcaagataatgatgtttccgttgtgcaaaatgcgaccccactgcaatccttaagctatcaacctcaatcccagtatcaacccacagcgtatacccaaagttctggtcaagaggtcctatcaaacgattattataaatcctacgatggttaccactataattatggtgctgcatatgctcctccctcttcgacgccctcgaatgccagctatgcgactcaggatagtcgatttctaagtcaataccagtcaactgcgggcacttcctaccagcagtcgacgcaatctcagtatcaacctttcaactattttccttacacgagttcctcgagcaattcagcaacgcagtccacctatgcaaatgcatatttctacaacagcacctatggacaccagtctcaactagcgcccaattataacaactaccccgtacaggcaaatgccacagcaacggaaacgccctcagccggatacaattccagtggagaatcttcaaagggcgaagacgcatcgtcattgagatccaaatctaaaagtgtgcctgacatagtccgtcaattggatgaggaggtgaaaaactccgcccagcgaagaactcgaaacaatagtcaatcggttgccgagagcaatccggcagaggaaaaaagtataggcaagtcagagtcgtccacgcaggactatacgctttacaatcggttgtcgcctaccgatcagaacctggtgaaacgcattgggtcgatgggtttcccattggagcgtgtagcagcggttctaacacggatagggaacaatgataaaaagatcgtagaacatctcataccattgagtgaattgctggacctgggtttcgaagaggagaaaatatccgaagcgttggtcaaattcgacaacaataaacacaaggcgctagattatttgatatcgtagtacctcagttattttctgtctgatattaagctaccactcgacgtcggtagcaacgtgattgtgattatagctgcgcgcagaaaacaaaaatcctagatattggctccaaattaagctgtaacttgttgtaataaaccaaaatcgattgtagtagttatttcatattccactttgaaacaactaatagaaggctttgatgttgtgatgccttgcccgctgacgatgaaactaggtcgtattttgcaaatctttatataaaactgtgcatctaactgcacttgagcacatgatttgcttctaaagtgagcttatcgtttgatcttattattcgccgctgcatattttttcgcttttattagatctgcgatacaattttcgacaatttcaatctttttaaaatagtgctttgtaccaaattttgttttataacctatcttgtcaattttctgttttaatctggtaggtatgcccttgaaaaaggatttttatatcggcagagtatttaatgaatcttgcatgcctaaccgcgaaaaacgagtcggtgagagaaaactcatgttctaatattgaatttctgttcaagtgcttatgttgattattacaagaaaaataaacaatattataaactactcaac

SEQ ID NO: 675 - DNA, 5130 bp, Aedes aegypti
gctgtggaaatttcattcaaatcactggtcgggcaagatccataaataactggtaggctttataccaaaattgatcatcgtgtatggaaaatcgcacaaggtacaaatttattgtcctatactgtatgacgcggattcgtattcgtattttgttcgatgaaactcgaaacaagcaaagaaatttcactgatcgtctattttggaacataggaacaatccaatctacgcaagtaaagttggcgtcaagtttattcgcatctggaccaattccgcttataacccgatctcattgtgtgtaaataattatcactaacgtaatacaattcaaaccggaaaatatctcatcaatggaataaatagcgacggagaatattttcaacgcatcatatagtgaatatctgttgttataattattcccaatcggaaagtgagttttgatagtgattggaagaactggcaaaaagcataagaagtgaatcttcgataaaaaagggaaaaagaataagctgccagtgagtgcccggaggtgtatgaaattatccagtgaatcgaaatcgtaagaactgcctcggcagagtatagtgcgcgatagttttacggtcgcaagctttctttttagtgatcaacaattgagcaaagtataggcaaggttagatacaaaattttaaagaagcggaagaaaaggaactcttccagtcatcatcaccaccaccaccaccaccatcaccatcgtcatcatccgacgtcaacggcggcgacgacgacgacggcgacggcaagtacaagcagtagtagtgaccaacagcaaccggaagatacgccgcaaccctcgactagcggcggaagcagcaacaactgtagcggcggcctcagcagacgcaacatgacaaccgatacgaggcgacgagttaaattgtatgcactaaacgcagaccgacagtgggacgatcggggcaccggtcacgtcacatcaaactacgtcgatcgagttaaaggtgtctcactgctagtgcacgcagaaaacgatggctcaatgctgctggaaagcaaaatccatccagacacaatttatcacaaacagcaagacacactgattgtgtggagtgaaggcgacaatttcgacctagcgctcagttttcaggagaaggcaggctgtgacgaaatatgggagaaaatttgtcaggtacaaggcaaagatccttccgtagaaataacacaagatgttgtggaagaatcggaagacgaacggttcgaggatatgtcggactcagcgccgcctatcgaactgcctccctgtgagttgtcccggttagaggacatctcggaagtgatcgccaatggactgacctcgcagatacggaaggacaaactagcacaagcgatagagagtgaaaactacattaaaaagctgcttaatttgttccacatgtgcgaggatcttgaaaatcacgaaggactgcattacttgtacgagattttcaagaacattttcctgctaaacaaaaacgctctatttgagattatgtttgccgaagatacgatcttcgatgtggtcggatgtttggagtacgatcctacggggaatcctccgaagcagcaccgacagtatcttaaacagttggccaaattccgcgaagcgattccgattcgcaactccgatctgctggcgaagatacaccaaacctaccgagtgcaatatattcaggatattgtcctaccgacgccatcggtgttcgaggataacatgctgaatacgctctcctcgttcatcttctttaataaggtggaaatagtcaccctgatccaagaagacgaaaaattcctcgacgatttgttcaccctgctaacggaccccaacacttcggacgccaaaaggcgggatataatcctttttctgaaggagttttgcaactttgctcagtatttacaaccgcagagcaaagaaacgttctacaaaacgttgattagccttggaatactgccggcgctggaaattacgctggctatcaacgacaagaagacgaaggctgcgtcgatcgacattttaactacgatcgtcgaatattcgccgtcgattgtgcgggattacacgctacagcagtataacaactcggacacggatgaggatcaaacgcttatcaatatcgccatcgagcagatgctatcggactcggaaccggaattaggtggtgcagttcagctaatgggcgtattaaggatactgctggatccggagaatatgctgagttccgtgaacaagtccgagaagtcagacttcctcaacttcttctacaagcacagtatacaaacgctgatagctccactcctgctaaacaccctgaccgaaaaacccgccaacgaagagtaccacacggtgcagctgctcggtctcgtactagagctactgtcgttttgcgttgagcaccacacctaccacatcaagaactgcatcttcaacaaggacctgctgcggcgaatactggtactgatgaagagcacacacacgttcctagtgctgggcgcgctccggtttctccggaagatcatcgcactaaaagacgaattctataataggcacatagtgaagggtaacctctttgctccagtggtagatgccttcgtgcggaacaacggccgatataatctgcttgagtccgccatcctggagctgttcgagttcattaagatcgaggacatcaaatcgttgtatacgtactttgtagagaattttggaaaaatcttcgacgatgtccagtatgtccagacgttcaaaacgcttaagaataagtacgaccaacaacaggaccgactgaaggagaaggagaagggaaacctcgatagtgtaccatcgattctgcgaaatagtaaccgataccggcgggatcagaggcagctggacgaagaggaggagatttggttcaacgaggaggaagactttgccgaaacgaacaaggccggatcgccggaactggacactagcctaggtaaaatcttcgacaagaaatcatcccccgaatcgtccccgtcagccacctccgtgaatggccccaagtacagtagtagtaatagtagcaatacgaccacatcgcaacaacagctatccacgttacagacgcactccacaccactgaacaacaacactgacattaagagtaatagtacgacattgtcatccgtggcggccacggccgatgatgaagaagaagattcgtccattcaccaccaccatcatcagcagcagtcactactaggtataactttggtcaattcaacgacggcgacgtcgtcttccacttcgctgtcggattcctcatccactggcgtcctggcggcggaagttccgctcgtcgattcgtcggcggttctgtactccaccactggctccgctggtcttgtctcgcatgaaacacctgccgcttctacgtcaacgacgacgagtatggacgatcagtcacctgcctcgacagaacccgtggttgacgaagatcccagctgtagtagtgttacgcaacttccacaaaattccacagtcagtgatagcgaccacagtgctgttgccaacagttgtaccagcacgtcgccaatttctactactgggacggaagccgttgaatctctcgataacagcaacctggaggcatcgaaacggctagctgatgatgctagccgggacggcgaggataacgcatcatcgtcctcatcggcatctgaatcatgtgaagatgtgaggcaagcggaacagaactgtaccggaagcgttggcgacgcgctggagggtggaaattcctcggtcaactgcagtaatggtgatatcagtggatcgtctacgacgatagccgccgtgttggattctgcgccggacgtagtggcaccgacggacgagacgcccagttccactgcggtcgtgagcagtcttaagaagcgtctggtggactacgagggcgattctgacgacgaggaagacgacgacgatagtgatagtccggctgtgaaaaaggccaaggtggcatagcatcttagtcacaaacaccatcgtcggcgtcgggccaaatgccatcgccaaccggatccacagctactgtccccccatagccacaaccatccccatcataaccatcaatatcatcatcacgacgaatctcgttgcgagtttgccgccgatgttgaccctagtggtaacaccgacagcgaaagcgacgaggacgaagatatgtctacgatgttatcagtctcgctagctgctactacacaaccacaaccaggaactgaaacaacaaattatgcataattcttataaatacatgtgtaactagaggtaataatttgctaatttaacgacaaccgagggcagagaaaaagagtgggagaatagtttaaaaaagaagaaaatcaacaaaaagatatccaaaaatcagctctttgttaaatcaaagatggagcagaagtagaagagtctttcggggcaagtggataggaacgataaccattttaattattatattgaataataattgaagctgtaatttaatgagaacaaaaaagataaagaaaaactgaataagattaagtcttaatgctataactaaacaaaaaaacatattactacaacaactgctattaggaggtgagatctagtgtcaaacttttccgaaggccacagatagaaacacaaatagaaacagtttcggtgtgttactctactgtatgtgaaaagtgagagatgctaattgggaagtataaaatttgtaaaacaatattattgttttgaaaaaatgaatcgaaaaagtacccaaaaaaacaggaaaagcttattttcaattcgaaaagaataaagctaaaaacaaactgacggacactgttcagatggtaaagaacgcaaagctgctaaattaaatgtaggaacaacagtttatcgacacttgacaaactcaacaaatttttatgcgatcaaaacataagatacttgaaacggcaagtcgctgaaaacgctgcgctatgctcgaagaatggaaaacagagcgagagaggcgattggaatgcgtttcacgtaactaacattggacatattcaaataaactaaaaaaacaacatcaataaaagtgtaattgaaagtggcgttaagcaaaggat

SEQ ID NO: 676 - DNA, 7549 bp, Aedes aegypti
atggcccagattgcattcataattttggtgaacaaattgaacgattcgcatgctcaactgattgtgcattggctgggcgaagggacaagcgtaatgatttgcctggctcgtgagcctccagctgacaacgatgccaaagcgccgccccctcaaccatcgagaatatttgtgtctaaagactacggagacacttttgacgatcaaacagagatgtttgcgctgaacattaacggtactgtggtaaactcaactgtggagcagtttttcacccatccaaagtttaatacgattgtcttcagtgatccaagaaataaagcaatatttacctccgaagattatggtaaatcggtaacggttcgaatgctgaattttacaccttccgatgtgactttttacgaggcggatactaaaatgatgctcattcttgacaagaaagatccagaacgcaagctctactactccacagattttggtgcttccttctcacttttgcaaagttatgtaaagtcttatatttggtcatctggtgaaggagtacccattcacctttacgttgagcgtaaagaaccaaccaatacatcttccgttattttctataatgcagccactctgcgcaacaacagcaatcagttcaacgttttaatagaaaaagtggaagatttccatataaagaaagatttcatgttcgcttcgcagcggttgccgaacagtacgcaactacttatttcctacaagcgagggaagtttgtcaaggcagacttccagaccgaattggatatgaagggttaccatgtggccgacgttgaaggacggcggattatgatctctgtggtgcatacggaacggatctcgcatttatatgtgtcggagacaaacgcggacatgacagaaatcaagttcgtacccagcctggagaacgtcttcacctacgtaccggaactgaattggcggtcgagttggctagttcaatcttctgatggtgcattcacggatttgtacaaggtggaaggattgcgtggaatttacattgcatcgaaaatcaatcgtataccgttgagcgaaaccatttcccctgatgcattggtgtcgctcattacgttcgatcatggtgctacttggcgatcaataactgcgccaacgacagatgatgacggattgcctatcaacaactgtgccaaggattgtagtttgcacctgtcccagaagttcagttctttatatccggtaacaagatcggtgagcatcatgagttcgaagtcggcccctggagttatcatggcttccggtgttgttggcaaatcacttaaaggacatcctggtgtgtacatttctcgcgatggtggtctaacgtggaagcagattctaaaggattatcactttttcaacatgggtgaccacggaggaattctagttgcggtgaaatatttcaagtccaagggtgagacgaatgaaatcctgtactctactgatgaaggcgaaaagtggatgtctacggacttccattcgacgaacttgaaagtttacggattgatgaccgaaccggatactaacacaactatattcaccctgtttgggtcggaacaggaagagcataggtggctcattattaaagtggacctaaagaatgcgttcacttcaaattgtaccgaagatgattacaagttttgggcacccggaacgaacgcaacgctcatgccgtgcattctaggactacaggagacgtaccagcgtagaaagccacatgccaattgttacaatggagtcgattatgaacgaccgattcgacaagaaatctgcaaatgtagtcgctgggattttgattgtgattttggattcagtcgaaccggaacgataaacagcccatgcataagaagtaaaactatcactaactatgatccgtatgcgattccaaccagttgtaagcctggacagtactataaacgaaccaaaggataccgtaagattgaaggcgatgtttgtattgagggacaggcatcacagtatgttccccaatcaattccatgcccaatggaggaaagcaacgagtttttggtcatagctcaaagagataagatctcccgcattaacttaaacaataaaactaaggaagtgtttccggtgactggcttgaaaaacgtgatagcgattgagtttgacatgaaacataattgtgtgttctgggccgatatcatgaccgatgtgattggacgccagtgcttgaacggagatcaaccgccggagcttttggtagataccggattgtcatcggtggaaggtatgtcatatgattgggtttcggaaatgttgtacttcgtagacggaatgcgattgaagattgaagctgtgaagactagctcacctgctcaaggtagaatgaggagaacaataattgaggcaccgaacttgaataaacctcgcggaattgtagtacaccctctgcaaggctatctgttctggacggattggaacgcactgaagccctccgtttcgcgtgcgaacttagatggtagcgatattaaaatattgttctccaagcccgaggttgtctggcccaatggtgtgacaattgactacatcgccgaaaggttgtactgggtagatgctagtaaggattacattgcaagtagtgacatggagggaaagaatttcatcaagattctacagcaagactcgcgtgttgcccatccgtttgcagtagcagtgctgaaggatctgatgtattgggatgattggaaaatgaactcagtttactctgccgacaaggatcatggaatcatgatcaatattattgccgaagaaatgatgaattctatggacctgaaaatctacggccattcggttcaggaaggatctaacgcgtgttcggttggtaataagtgctcacatatttgtgttggtgcgccgaattcgggttacagttgtttatgcccggatggcatggagaagaacgctcagggacaatgtctttgtccaggtggaggaacgccgttttccaacaatacatgtgctcgctccggaagcacctgtggttcaaagtttttcgattgcaaaaataacatttgcgttccattgatttacaaatgtgatggcgatgacgactgcggtgatcgatcggatgaggaaggctgtccttcggataaacctccgtgtccaccatacatgtttacgtgtaaatccgacaaacaatgtgtaccgaagtattttgtatgcgattatgaccgcgactgtctggatgggtctgatgaacagaactgtaaacctgcgtcttgcaagtcggatgagtttacctgtggcaacggacgatgtatcaataagagctggctttgcgatggagaagatgactgtcgagatggcactgatgaaaggaattgtaataagaatagcaccactgtcgtcgaatgtaaagcggacgagttcagatgcaatgggacaaacacttgtattcccaaactgtggcgttgcgatacagaacaggattgtaatgatggatcggatgaagcgaactgcagtagaaaggaatgcgaaccatggatgttcatgtgtgcaagcgatatgaggtgtatctataagacgtggcagtgcgacggagaaaaggattgcaaggatggaagtgatgagaaaaactgtaattcctgtcacgattggatgttcaaatgtgccaacgataaatgtgtgccatattggtggaaatgtgatggagtcaatgattgcggagacgagtctgatgaaacgggatgtaattcgactcaacctgtgacgagcacaacgataaaacccattcctacaaggaagaaggaacgaaactgcggattgcatgaattccgttgtgataacggggtatgcatttcgaagagatttgtctgcgatggttatgaggattgtgccaagggtgaagatgaagataattgcccaacgcaaaagcaatgcagcaacaaacattttaaatgtcgaagtgatggcatgtgtcttccaatggacaaatattgtaataacgtagtggattgcgcagatggaagcgacgaagattgcaaatttaaacccagcacatcaacatcgaccggaaacaattgcacaagcaatcccggtgtattcgcttgcgacaatacatgcttcgctttgatggttctttgtgatggaaagcctgattgttacgatggaacagacgaagatcactgcgaaaaaatgaaaacgaaacattatcaggttacgcaaatcggcgttgatgagcgttcgctcaattcaacaagcttcctgattttctggtggattcccctaccgcgtgatgttaccttggaatacttgccttccatctattacaacggggagtggaaaaacgtcagcaattggattaacgagacggactaccgattcacgaatttgaaaccttacaccctgtacaatgtgacaacatacgtgagagtgaaaacccaaaacaaaatcactcctccgtacatctattacgaaattgcaacaagtgaaggaattccaagtgccccttcaaacgtttctgttgttcaggtcaatggttctcggattcaagtgagctggcaagcacccaaggaagtgaacggccaacttcagggttacactataaactatcgttcgcagtcgaagaacgttggtccagcgcaaaatgttaaagttggtcccacggaaacaagctatcccatcgaaagcgaattcaaaccagacgtagtttatgaattctgggtaaaagcacgcaacggaaagcacgaatcagtatcctcgaatatggtgcagcttaagtttgacggtacatccaatgttgcgaaaatagacaaaattcaagaagtaaacaaaaccaagaaatccgtcacgttggaatggaaaccggttgaaggtgctgatggttacatgattcagcccattctacctcaatcgtatccgctactgaacacaatttgggtgaagaactcttcggtaacgctggataatatggtaccaggcacacaatatctgattaaagtagcagcgtacgtgaaacagtacgttggacgacatgaaacaacggtaattcaattcggcggagaaccgttgcctgctattaacatccgtttgaaggaacagactcaagaatattcactgttggaatgggatgaaccgcatggcaactacggcaagttggtctacggcgtgtattacggcacaaatatggatcaattatttgaagcatccagatttaacacgactgctaccagctacaaattgacaaagctacgaccatgcgaatcgtatgtcgtcagtgtcggaatcgtgggaccgatcggtcccggtccgttgggacgcaatccgctgaagttggataccccctacaacaacacattgccgccgaaagaattgaccgtcgatattagcggaactagtcataactcgtcagaaatgattatccagtggaagcatagctgtgcactggagtcatctagttatccaaagtacattataactgttcgagagcttacgaagaatatcacatcgtcggtgaatgtgccgtcatcggcaaacaaaaccctggtgcacgtgttccgcagtattccccgtggtgctgcttacgagatttcagtttcgaccaacgtttccaatgctcaagtggtatcagcggttgcctattctgcgcctctaccggctcccacgcggttgcaggtttggccagaagctaacggcagttacgtcgtctactggaagccagtgatcgacttcaaggatgttccgttcacctaccaagcggtagtatatgaaggaaagggaattaatacgacgattccacctttggcgacattagatggaaaagaaccgccattacttattaacccggatcgccttgttgcggtgccattagacagcatgttcacaatcggcgtgagactgaaaacagtggatggatatttttcggacattgtcgagacggaatactttgcgaagcacaacttccaaggcctcgtgcaggagtcttccttctccagtgcgtggctatggattgtgcctaccataatagcactggtgctagcgttgaccgtggtgtacgtggtccagaggcatcggcggttgcagacttcgttcagtcggttcgccaattcacactatgatacacgaacgggtgcgacgcgtattggtgacagtttggatgacgatgagcatgaacatcaagaggtgccacgaagtttctccgatgatgaaccgctcgtcatcgcgtaagtgggtaaaatactaatttccagttttttacgcgtagaaacagtgtagaagtaattgactaaaaacgcttgtgcaactttctgctcatttagttgaagatggaaggaaatttgtaataagttagaatgatagaaacaaattattacacgcgagtctggttcattcagactggactcgttttgtctgtgaacattgcatataacttttttaaatattaacgaagtttaaagtcctacaaacaaaagactagtaattgtgtatttatgttggttttattttgataggtttatttaattagttccattgtacatttttgaggttgtttactttgtatagaaaattacttgtatcatatacagtaaatgaaataaacaaactaagactagcaagcaaggggagatcgagatcagagtgaacgagtcaactgaaaaaatcagagaaagaaataataagtagtggcgtttatatgtgtgtatatttgtcgagataaaaaaatgaagatattaatgcagaagatttgtagtgactgtgtaatttgataagacactaggcgattgtaggaagagaaacgaccattgaaatacagctttatcgagaacagattcgctgacaggaggcttcagttgacaaacacacacaagtcagcactttctccattcagttaggagtaagattatacgattttggatgacttatagctatgtctacaatatagtccacggcatttgtatggagattctttgatcgacattcacatactcaaaccaaacatgtttcaggaacatcatgtcataagttttgttcacttatctcacgtagctttaacaactgagtagcaatgtttccgaggaaaagcaattctgtttaaagtctataattcgaaccgctagggtttcgtaaaatgtgctaaaatggaagaaacagtaaagacaaagattaatgatagttgataatgataacgattacaataagttactatgcatgctaaacgataacaaaccaaggtattcgcaagcgtttgaactgtgtttttcctcgtgattttttttgtttaaaatttgatgtagaatgaagtaaaatgagaaggtaaacattgagtggagtatccatggtgagaaaaaaaagttccataattttttttcctacgcaaatcttcctgctatttgatctggttgttttcctttattattgtgagtggttccaaaacggtgaaaataaatataagtagcgaaagaatatataataattcaataatgattgtaatgtaacaattcatgatccataaaactgatcaatgatgtgacgtgatcataaaacataatcttggaagactaat

SEQ ID NO: 677 - DNA, 4803 bp, Aedes aegypti
cttcccgagcccatttcgaaccaccggggcttctctccttcatcggccaccgacactgccagatacgcgcagaggccctttccgtcgtccaactgcttgcacgttacgcggcgcaagaaggcttcaacgagcatttgcttcaaggttccggcggcgggcctaggtgcccgtccgcccagcatcatcagcagtagcaccaccaccgacgagggcggtttcaacgaaccgtcgccggagatcaaagccaagcttaaaccggcctacgacttcgatgaagaaccccagctcaactacgccgatctgggctatcggttacgcccggatgggaccgagtgcgacgaaatctacggcgaggtagatcactatcaaagtgccaacagcagcagtattatcaccaacaataataatcaaccgttagacttaggccacggcgctagtagtgtagagagtaggaacgctattaacaatacacgatctcatttcaatcttactaacaacaatcagcaaccatcagaagcgatcaccgcaaatggtagctcgaacaaaccagacactgacgatgtgccaatggcggagatggatcgagtgctgtacgcttcgatcgtacccaaagcgaccggagattcgtcctcgaccatcgccagcagcgaactggccttcatggacatagaaaaagatgaggctaaaatcctggacctggatgaactgagcgagggtggtgccgaaaaaggttatcacagcccgcagactatccttgatcccacgaggcccaccttgagtgagtacgaggatgactacagcaacaaaacgctgccggatccgccatcgctgatttcgatgcgaccgccaccaatcccggagggacccccgttggacctgcaggatgttctgtacgccgatgccagcgataacgagcacgacagtttggtactgccggacgagatgacggcagacgaggccgagcgattgctcagctcaaggtatgtggctcttgcgcttagtcgcgtacatacatatgttgtagctaataggaatgtgtcttgcatttttcgcgcgccgtcttccccaaggcagcgtttgtttagctgcccaaactcgttgttgctgctagagcaaaatattttgttaatttatattttggagtacaaaatcagctcattgatgaattcaaaacagcagcagaaattattctcactttactgtcaatcaattacctttcataggcatttccatacattgcattcaactttatttgactatctctctcctaaactttcgtttttatattccgaattctcacgccaatccctaacttctatctcagaccaaccacttctctcggacgaacaagcccgcgaagtagagcagatcctgctcaacaacaaaaccaaagccgaaaccgattccaaccgaccgcctccgctgccaacggaatcgcttccaaccccaccgcaggaattccgtaaagaacccgactcccctccggctgtcacctcggcggaacctacccctccaccatcggctacagacgagccggactggctcaaagacgtcctagaagccccggtcaaaaatggaatcgctgcccctcgtgacaagcctcctcctccgccaccgccacatacaacgtccgcgaccaacggtttggaacctccggcaccgccaagtcgcaacaactccactactagtcagttcgaggagaccgccaattcgaccgatctgctcaaccaaaccattctcgattcgtcgtcgatcctgcaggactcgtacgtttccggtgattcgatgcccagtgtaaccacctcggatagcttgaacctgagcaaacaggaggaacaactcacgaccaacgatgccgaggctgacgtttcggcagacgagagcaacaactccggaatctacaacgcagagtacccaccggtcaagagcaaggaggtgttcgtaaatcaagacggggtccacttcttcgaggatggtaacttctggatggaggttccgggtctgctggagtcggatgaggaggaagacgtgcgggtgataaagaagagcaccaaggtgaagttcagcaccaatccgatgcaggtgttttcgacgttttcggtcaacgattacgaccggcggaacgaggacgtagatccagtagcggcgtccgccgagtatgaactggaaaagcgagtcgaaaagatgaacgttttcccggtggagttgatgaaggggccggaggggttgggacttagcatcatcggtatgggagtaggagctgatgccggtttggaaaagctgggaatcttcgtcaaaaccataaccgacaatggtgcggctgcccgtgatgggaggatacaggtgaacgatcaaatcatcgaagtcgatggcaagagtctagtcggcgttacgcaggcatacgccgcctcggtattgcgcaacacttccggtctggtgcggttccagatcggacgggagcgtgatccggaaaattccgaggtcgcccaactgatccgacagagcttgcaggcggatcgcgaaaaggaggaacgggtcaaacgccaactagaagattacctccgacggaatacggagatatccgaggactccaccctgccggtgtcggccaattccagcgtatcggagggcccaatcagcccaacaggggcaaccgcggaatcactgtttgaaacggaagccgcccgatccagcgatgtagaatcgctccgacgaatattgcaggaggtaattgattgctttttccaacccaacccgctttgccttctcatcaagtaccagcaaaactgtaacgaggcggagttgttggccgagcgaatgaagcaaacggaacgggagctggccaacatcaagaaggaagcgaacaactatcagaatatgctacagcagagccaggcccagtacgtcacgctggagaaaaagtacggccgcgtgaagaagattctgcgcgagttccagcaccgggagcgagatatgatccaattccaagaatactatctgcagcatctgcaggagaaagacactgaatacaacgcactggtcaagaaacttaaggaccgggtgatccacctggaacaggaactgcaggaaacccagcgaaaggccgggttcccagtgatactgccatacgatagtaccagcctgaagctaactcctcaaatgagtcgcaagcagccaccaaagccggtattccagaagctggaaaccgaactgtcggacacggaattctccgacctttcccccgatggcgaaggtgaagacggcaaaacggccaccgtcgagcggaaactacccacccagaaagacgacgaactggacacggccattcctcagcatgagctgttggacaactcgctgaacaaaggtaaaagtgatctggtagcacgtggcggtctatccaaacggagtcttcccggaaagaagagccacagcaatagcggttccgattgcgccttggacgaaagcgaggaggaaatcaccgactccacatcgatatcgcacgagtataccggcctctacagcaccccgcagatcatcaacaggcagctgaacaacgtcaaaaatggtcaggagaattctggtcttccggtgtacgctcaggtcaacaaggaccgcagcgaaaaccatcacagcgctgggcaaactcagcacacaaccattccgaacatatatcggaatccaccgtcggacaacaacaaactcaattccagttatgggtccgatctcaatgcttcctcctacgacagcgatctgggatcatccacagacaaactcaaggatagcggcgtgtccagtgacagttggatgtacccctcgcggaggcccaaaggactgaaaggcatcacgccgccaatgcttgcagaacagctcaaggaacgactagccgaaagacgaaccggggatgacggttcttcgcgagactctagcgacgactactccgaaatcaaccagcgacacatcagccctgccgcatccctatctcagaaccttctgttcgaaatcaaaaaagcagtcaacgaagcgcaaccgaaaggtaagaccatagtaacaatcatctgcgtgttgtgtaccttcagtgtgaattttcgtacgcttcgatcaaaattttgcaaccaaccagtttccggcaataagtgtgatgcatataatattgatttttgtcgctattgtaccaacggatataatcgtagttcttttggcgtttttctttctttctatttcactttctccactctttcggaatgcggacgtgcagtgaaaaacattcttccacaaaatctatctcctccaggaagtagcagcccgtggcaacagcagcagtcgtcgtcgccgcaagtcggccaatcggcgggaaccggatcgcagggacctccatcgccgtcgagtgtgtccagtgggtcaacgtcaccgggggcgtattcgccgagccggacactggacctgtcggggtcgacgtccagcttctcgagcgatcgtatccgggatgcgcaccagtggaagaatggtcctgttgagcagtggtctaccgatcagtggttgctcggcatcagcatggaggcgtacatcccggccttcgtgaagctccaggtcgagggcggagcgctgctctacctcgaaagggcagactaccaggcgctgggcatcgacggccaggaccggaagcacctcaagcgtaacatcaaggagctccggcggctcaacgaaaaggaacgcaaacagaaagaaaaggaccgtcgggagcgggaaaagctgattaagaaggcggagaagaaggccgagaaggatcagaagaagaagaagtaa

SEQ ID NO: 678 - DNA, 2833 bp, Aedes aegypti; identical to SEQ ID NO: 251

SEQ ID NO: 679 - DNA, 2938 bp, Aedes aegypti
atggacagttttctgggaagttcggaaagtggtgttccaaagaatttgggagaaatgtccaaggaacaattcggtgacctcataacggaccactcccgttttccgagtggtgaagaaaagtcggacatttcacagaaatttccatccgacgtagatctgttgggtgattcttttacgatgccctctactcatactgcgccggacaataaagtgctggagcaagaaaaagaaaacttcgacgacttcttcatgggggtagataaaaaggccaattctgaggccgcagcatcctcgataagtaatctgatcgatgttggcgaaccagacatgttcgaaccaaagaagaaatcaaataacgaaccagaaaagtctctgtttacggattcgactccattcggctcaggcccagatgagttagtgcatgtgaaagacgaaattgaaagtgactacatgaacccatacgccgaggttcgtcctcaggctccagtacaaagcagccagaaagtggaagaaccaccagctgttccagcgcagtccagcatcaaagatgatttattcgaggattttgtgagccatactaaggctgatcaattcgatgaccctttgttcgctgattcatcgtcgtcagctgctgcccccccggctgttgttgcccctgaaccagccccagcccctcccgttgttactcctgcttctgttgctcctatcataaccgcaccggctgaaccaccaaaagtaaagacccccgttgaaattccacaggaaaaaccgaaagctccaccggccgtcgttccttcttcctctggcaaaaccgcttccaacgaccagtgtattcaagctgagaaaatattcaaacaattcggattggatgcttggttcaaaccggaaaaactgcacccagtagtggaatccctgatctactggcgcgatgtcaagaagtccggagccgtgttcggcgctggtctcaccatcctgattgccatgtcactgttctcgctaatcagtgtcttctcgtacgtgtccctgctggccctgttcggtaccgtctcattccggatctacaaaaatgtgctgcaggcagtgcaaaagacctccgaaggacaccctttcaaagaatacctggacactgacctgaccctgtcgcaagaaaaggtacaacagctgagcacagtggccgtggcacacgtcaatgccctgctgacggaactgcgccgtctgttcctggtggaagacctggttgactccatcaaattcggcgtcgtcctgtactgtctaacctacgttggtgccatcttcaacggaatgacatgcgtcatcatcgcatttgtcgcattgttcaccttgccaaaggtctacgagaacaacaagcagtccatcgatgcttacttggaactggtcagaagcaaaattctggaagtttccgacaagattaaggctgccgttcctatcggcaagaaggccgaaaccgagaaggataaataagatgatttagtttatattttttaaagaacctctttttatttttttatttattgaactattaaccacaatgaaaagaatgaagtttaaactaaacgaaaaaaaaatcgaatcttttattcccacgcaaatttattgtttaaagtgtattcgttttaacgccaagtactactgatatgacccaagaaatctaaatactgaacgatttaaatttaagcagattaccaagattgcggataagaatgataaataaaaagataagattacctttccgttgcctttattttacctttgtgattactcaatggatcaaaacaaaagaaaactctcacacatagacaaaagtatgcgtagtagtaatagctgtaataatccaaataaaactcttcaaataagagaaaagaaatcgaatgcagaattgagattaactctcaataaacaagtttcaaacaaagtcaaacccctttcgaagtatcgttttgtctggagatagcagtaaagtagttcactcgcccacatcactcacccaactggaattcactcatcgatcgaagtcaacaccacaaactcggtttaaatgtttatcaaaacagttaagtattaaaacaagaaaatatgaggaataaacacaacacacacttagagattgatagtttttttggaaatctcgtaaccatcgttaaggttttagttgacaccccgcctccgtgttacagaatccgttttttccttttcttttgtgaggttgtgatcattgtttcgtgcgtgtgttgtttttcttttctgcaacggatcgagctaagtccaaacagaggtgaattcacactcacgcagacaaaggcattatgttggttggttgaaccaaatcgaataattttgcgacaaaataaaatgtgaaattgcttcagcaaaacaaatccaattcgcttaaatttgtgtaaaattattgaaacgagcaaaaaagtggctatattcatatttgtaattgtaattcgtataggagtataagagcttgtttgaagtggagcgaagcaaagcaaagcaacttatctaaaatgcaacaaaacacgcggcgttgagtctctataagctaattctgttgaaacaaagtaaaccctgtgcattatttaagcaacatatgaaatgcaaaaggtaaatatcgaatcttttttccgttactcgttatcgtaagcgtttgtttttagcctaaatgagcagaaaccatttttcgattcacctttttctagaagtaaattggagatgcaaaaaatcgtagcatgtacatgaaaggaacatcataagcacatacacgaagaaaaagaaatgcttaaatgaaaaaaatactttattattataattcattactgaagtgcgaaagtaagaagaaacaaaaacaaatatataagaattgtcatcaatgcaaaagaatgaaataataaaaaaggaagatgagaaactg

SEQ ID NO: 680 - DNA, 2127 bp, Aedes aegypti
atgtataaaatgcgccagttccaaaaggttttggaagacctcggttctcgagttgcatcggctgaaactttgattaaatcatggacttcgcccagttcagccactgatgcagcagaacagatgcaacatcttcaacgcctgaaagacaaaatgactactgcaggagcattgctagatgattgcaatgaacagcagagtttcttcacagcaaaccatgtactggtacccaatcaatgtcttgccaaattagaagatttgaatacacggatgaaattgctccatattgctatggatgagcgacataaggttttggtagcaggcggagcaaatcagccatctgcctccgatgctgatggtaacaagtcgatgcaaggtgttagcagcggaacaattggtccaattccaaatttagcaatgagtgtaaaaccaccatgggaacgagcaacaactccagccaatgtgccttactatattaatcatgagcgagaaaatacacattgggatcatcctgaaatgatcgagttgatgaaatccctcgctgatctgaacgaggttcgtttctcagcatacagaacggctttaaagctacgcactgttcaaaaaagactagctttcgatcggatagcaatgaacgttgccatagaatcattcgatcgtcacggtctacgagctcagaacgacaagttaatagacataccggatatgacaacagtcttgcactcgctatatgtaacaatcgaaccaatcgatatgccgctgatgcttgatttagccatcaactggatactcaacgtgtacgactcacaacgaaccgggcagatacgcgttcttagttttaaggttggcctaattttactctgcaaggggcatttggaggagaaatatcgctatttattccggttgattgcggatctcgagaaaaaggttgatcaacgaaagttaggattgttgctgcatgactgcattcaagtgccgcgacaattgggggaagttgcagcattcggcggttcgaacattgaaccatcggttcgttcgtgttttgaacgagctggtgtaaatcagaacggcgaactgatagagacggcaatcgaagcgcaacattttctcaattggttgcaacatgaaccccaaagtttggtgtggcttccggttttacatcgtttagttgcagcagaagctgccaagcatcaagccaagtgcaatatatgcaaggaatatccaattgttggttttcgatatagatgtttgaagtgcttcaattttgatatgtgtcaaagatgtttctttttgggtcgtaacgcaaaaaatcataaactatcacatcctatgcatgaatattgtactacgactacatcgactgaagacgttcgagattttacgagagctcttcgtaataaattcaaaagcagaaaatatttcaaaaaacatcctcgagttggatatttaccagttcaaagcgtattagagggagacgctttagaaagccctgcacctagtcctcagcatggaactcacacattacaaaacgatatgcactctcgacttgaaatgtatgcatctcgactggctcaagttgaatatggtactcgaagtaattctacacccgatagtgatgacgaacatcaattaattgcgcaatactgtcaatctttacctaataatggtggacctaaatccccagtacaagttatggcagccatggatgctgaacaaagggaggagcttgaggccatgattaaagacttggaagaagaaaatgcttctttgcaagcagaatatgaaaggctaaaatcaaagcaaacgcctataaccactccagatgattctcaaatggggcaaacaggaacgggtggaaatgtaggagacaatttggacatgatggctgaagctaagctactgagacagcacaaaggaaggctagaagcgaggatgcaaattttggaggatcacaaccgacaattagaagcgcagctacaacggttacgacaactacttgatgaaccaaatacatccaaagcatccacattgcaaacacggtctgttacggcatcgcaactcaatacggaatcaccagctaaactccaacaaaatggtcattacgatcagaattcaagtaagttcaaataa

SEQ ID NO: 681 - DNA, 1104 bp, Aedes aegypti
atgccattttcttttacattccaggattgtcgaggatcttttccaatcgtcaagtgtacgtactgtcgtacagagttccagcagaccagcaagggaagcaccgccgccatttgcaaaaaatgtgaccaaaatgttaaacagtatggaaagccgtccgcttgtgatctgtgcaacattatcgctgcattcattggatccaaatgccaaaggtgtacaaactccgagttaaagtacggaccagcggtaacatgcgatcaatgcaaacaacgatgtgcctttaataggccagactataaggtcgatggaaagctactatgctggctctgtactttgtcctacaagcgtgccctgaccaaggcacgccaagcggaaagcgatcgtcgccgtgcgaagaaacgtggagctgagggtggccctccaccggcgttgtcttcgtcggcatccggtgccgataatcgcagcacctcggacaagaccaatagcagcagcaacagcagttccatgaaccgcggcggaggatccagcttaccgccactgggtgatgtgagtttgggccctagctcccaccaccatcatcatcaccaccactcgaaatacgtcgatccgcacagctcggatcatgtcatagcgatgacacagctgaaggaaacgattgccacgctgcagcgtaaaatcaagcaaaaagatggtattattttggagaaagagaaggagatcagcgcatggaagggaaagcatttatacctagagcaggatttgatgaaaaaatacaaagatatggagaagaactacgagttcaagctggaagtgttgaacaagaagctcaaatcccaactgctggagattgcccagcttccccgtgactccgacaaagaagatgagaaggatgatgaaaatgataaaaaggacaaaaaagaaagtgagtccgataaggagaaggatgatgagcagagtaagagcaatgggtctgttaagggcggagaggattctgataaggaaaacgatgaaaagaaagatgatcagaaggaaacagagaaggatgaagataaagaaagcgatgaaaaggatcgaagctccgacaaaggatcccgtcaaaattctgag

SEQ ID NO: 682 - DNA, 3643 bp, Aedes aegypti
gttgtcgcgaccatatttgttatggcagcagaatttgttgctgcgtgaaaattgtcgataattccaccaaaatggaactttcccgtgacgaaagcgtgcgtcagctgtagagtgcggtcggtgccattgtttggcgctagtgttttccgcggagtggtgttcgttgccaacttagaagcttttttcactccatgttgattctggtcgccatttctgttgggaagacacacaaagatagggtacagctgcgacagtaactacaacaacaacatcaagacgagcggggtttggcttcggggctgagttccatttaaagggtattggttccagtgggaaacgtaactaattggatgcgtttgtagcgaagagtggaaatcgtcggcttgggtggtgtatgatatctttcattcagtacacgctgaatatcatgagcaatctaagcaatagtcacaacagtaacacaggaagcagccaaaattctgctgccgagggcacaatggagagaggaagttgtatcctggttcggtatgccagtcagaactcgcttgatgagagttcccagaagcagctaccgcggtcgaatggaaaagacaagacagttggaggagcctaccgtaacaatgtgcacacacagcgatcatttgaggcgatgaataatatgcgagaacaaaatctgctgtgtgatgtcatactggtggccgatggcatggagatacccgcacacaaaatggtgctagcctcgtgcagtccgtacttttacgccatgttcacaggcttcgaggaaagccgacaagatcgaatcaccttacagggtgtggatcatcgggcgctgcagctactgatcgagtacgtttacacttcggtagtcgaggtcaccgaggataacgtgcaggttctgctgacggcggccaacctgctgcagttgaccgatgtccgagatgcatgctgtgattacttgcaaacccaattggatcccagtaattgcttggggattcgggactttgcggacatccatgggtgcatcgatctattgaactacgccgagacgtacattgagcagcacttttcggaagttgttcagtttgacgaatttttgaatctcaccagcgaacaagtcgtaaatttgattaaaagtgatcgcctctctgttccatcagaagaaaaggtttatgaatgtgtaatctcctggctccagtacgatatctgcacccggcagtcatttctggctgatttgatggaacacgtccgactaccgctgctctcgcaagaatacctggtgcaacgagtcgaaaaggaacagctgctcaagggagatctccagtgcaaggacttcatcatcgaggcgctcaagtaccacctgttgaagggggagctgaaaacgaccttcaaaacccctcgaaccattccacggcagcccgttgggcttcccaaggtgcttctcgtcatcggaggacaggcaccgaaagcaatccgatccgtagaatgttacgatttacgcgaagaacgttggtatcaggtagcggaaatgcctacacggcgatgccgcgctggtttagccgttttaggcgatagggtttacgctatcgggggattcaatgggtcattgcgggtacgcactgttgatgtttatgaccctgttcaggatcagtggagtacttgtaatagcatggaggcacgacggtcaactctgggagtagccgttttgaatggttgcattttcgcggttggtggttttgacggttcatcaggcttgagctcggcagagatgttcgaccctagaacacaggaatggagactgattgcatcgatgtccactaggcgaagttcagttggagttggtgtggtcaatgggttgttatatgcggtaggaggatacgacggtgcttcaagacaatgcttggcttcggtggaaagatacaatccggctttggacacatggactcaagtatcggagatgacagatcgtcgaagtggtgctggggtaggggttcttgacaacattctttatgcagttggcggtcatgatggaccactggtgaggaagtcagttgaggcttacaatgcggaaactaatacctggcataaggttgccgatatggcattctgccgacggaacgctggagtggttgcccataagggtatgctgtttgtggtgggtggagatgatggaacgtcaaatttggcttcagtggaagtttacactccagaaacgaacacatggcggttactgccagcttcgatgagcattgggcgtagctatgccggagtagcaatgatagataagcccattcagaataacaaccaaaacaacgatgacgagaatagtcaagcggaagggctgaactcagaagctggtgctgtaggttataatcaagcttccaataataacaataacaacaatgtcaacaacaataacaatgtacactacgaaaacatttacgagtcaattgaacaatacgctgctgccgcgaatgctggtgtggctgcggttgcccctgccgttgctcaaaatccttcaggaatcattccacaaggaaatcctcttcttggtatgccatcaaatcaaccaccccaaccaggaccgggaccatcatcactcagtatgggacctcgtagcaataacgtccaaccgggagtcgtccctggcccaccaccacctccaagcatgctacagatgcagcaacaatatctatcattagcctatcgcaatgaactgtatgaccgaactgccggatacgatgtaccacgtggcggaggagttccacgcaacaactactatcaaaatcaacaatcgatggcgactggaccgcgttaccaaaaccttcatctggatctgaaccgaccaagatattcgcacaacagtatgagggcacctcgtcaaagaagttttgacgacaccgaatcctatcagtaccatcgctatcaaaatcagaactttgccaaatttgataacgtttacgagagagttcgtgaggaacctgcttaccaaaatacaggctatgtgaaccgtgccagatcggagagccctgcccgttcgggtacaaatcgccgagaagagcgtaacggtggggatcccttccgtaactgggcattcaattttgaggacaacagtttccgacctgccagttcagttccacgtcctcgtgaaattcgtcgtataactgatggaactttccgagccaccgactatcagcaagataatgaaagacttgggttgagtcgtgaagcacccaaaacccctccaactattgttgtcaacgcatcagcatctccttctacttcacgttcaaattctgcttcaccaccgaaaagtaaggaatcgtccgtatctccagtacaaccggagcgaggtggcactccagcgtcttcttcatctgattcggagatatttgtcatggattccgttgcgtccgatgctggcgggccagctgaggatagtagcgcttgtggtggtgccggtgctagcagcagcatgcagtgcatggaaaatatcggggacatgggagacacaaacgccacaaaagataaggaaggcgcttcatcacaagagacgtcggaatcatccaactttgaagataatgctgcggaatcctccggatccgatgatgatgtcgtcgatgaaaagaatgtggatattacttaa

SEQ ID NO: 683 - DNA, 507 bp, Aedes aegypti
atgtcccgcaataaagacaagtacgacaacaacaacccccggcggcagcagacctttctcacggcggaggacattgcggccggcaagaagacctgctggcatggcgtcgagataacgggtagtgtgcgcaacctcagccccacgctgtggaagttcgaacatctgacggcgctctacctgaacgacaattgtctgatgcggctgccgcaccagatcggtcagttggccagtttgcgtacgttggacctgtccagcaacaagctgcgtagcttgccggccgaactgggcgagctcatacacctgagggaactcctgctgaacaacaacctgctgcgtgtgcttccgtacgagctgggtaaactgttccatctgcatgtgctcggactgcacgggaacccgctcggaaaggacgtgatgtcgctctacaacgagcccaacggaacgcagaagctgctcacgtacatgctggataatctgtcagttttcttgaagtattcttgcccttaa

SEQ ID NO: 684 - DNA, 1795 bp, Aedes aegypti
aagccccaactaaagttattcgtcagaatgtggcacgaagtgcagctcgccaaggaggaaaaccgccgggagttggttctctcgggggctgccatccggaagcgattcgacgagaacgatggcaacctggacgagaccgtgtaccagctgagtgccctcaacctgctggacatcaacgacaccccactgaaggacatttcgcccaagattgcccaactggagcatctgcagtcgctgattttgtttcggaatcaaatcagttcggttccgggtgagattggaaagctggcggcgctgaaagtgctggatctgtctgggaataggattgagcagctgccgagtgagttgggccaactgaaggccctgacgacgatcaatctgtcggggaacaagctcaagcaggtggacctgagccagctggagtggcttacggtgtgcaacttgtcctcgaatcagctggaggagtttccggtgctgccctgcggaaaggagacgcaacatttggcggaggtaagattaatttttggagatgattcaagtctagggctggtagcaggtctctttttagtttttataattgagttggttccacagtttttggtcaaatgtgcaaagttgaaagaaatcaatctcaaggataaccctctgaaggacaaacgattgaagaagctggtggagcaatgtcgcagcaaacaggtcctggactacgtcgaaaagaacggttacgttgccccgaagtccgaaacggaaaacaacatcgaaaactctcttgtgaacgcagatcccactccagaagaagtggatgttcgacagcgaatcacaatcgtcaaagcaccggaagatgctcgaaaaatcagcttcacaccggaagcgaaatcgctacgaccgcacatggcccattgtatcgtgcggaatttcaacgtgggcaacatgaagaagttccttcaattgcaaaatgaccttcatgacaacgaatgcgcaaaacgagagctggccaccatcgctacccatgacctgtccaaaatcaagggaaatgtacgctaccgagcggatcttgccgagcaaatcgaaatcacccctctcggaggaaaggccaaaaccactgcggccaagtactacgatggattgaagcaacaggcggagattatccgcaaggagaagaagcgcaacacctactccggagtgtacaaattcatcaacctgctcgaaggcaaagtgttcgttttcttcgatgacgaggagaaagtgatcagtcttccaccgctgacgaattgcgacgagacgaaaatatccccggacaccaaggacatgctgctagaagtgaccagttccgcgagcttggacgtctgccacaaggtgatgttggccgtgatcaagaagatgctgctgatggatgtgcaggtgagccgagcccatcccgaggggaagaagaaaggcaagggaaagacctcaaccacagtcgtcacgtacgataaatcgacggagatggtcatcgaacaggttcgagtgtacgacgccgaagggaatttccactcggttttcccgggcaaaggggatttagcgttccccgaggaagagaagatcgacatcgaattgaagtaggaacgatttttacactgttttacctgaaatattttttcctgtactttcccacacgtttgttaaataactgaactagattccttttgttaacattttgcaacgaatgcatacccaaagcattagtacgagtactatattataaatgaagtgttgctacaacgatgctaagcattaaatgttttttctgatcatc

SEQ ID NO: 685 - DNA, 4595 bp, Aedes aegypti
attttcggagcagcgcagtcaaagtaggcagcggacactactcgctgtgttgtgtgcggattggatggtgtgagataagagagcgagctctgtgcttgcaaaagaagaaaagaaaaaacgtcgccttggttaaaaaacgcaccgaaaaaccgaaatttcccccatcttgtcgttgttggccgtcgttgaaagtggattctattgtgatttgatgaaacaatggcagtgtagaagtattgtgcgcatttgttgaaaaaataaaagttcattgtcgccgtggatgaagaaaaagaaaggtggttcttcgcctgctgcgtgaggaaggtgtgtgtttgtgtgggtaggaaagagttttttttttctgtttatttgtgtgtaacgcctgtacgtgtgaacaaactgtcaaaaaaagttcgaagccagaagaaaagtggtgcggaaaaaatagaaaataatgtacggcgctgtgtgaaacgagaagaagcagcagacggccgcagctcaagattgacgtgcaaaagaaaaggccaccatcaagacgacgacggctgctaaaaaggtggaaaggaggaatttttgcctctttttacggtacgtgctcgatttcgatgtgtgtctgaaagtgtggcggaggaaaatgtccgcaaaataagtgtcccgtgtgattctggtctaccggaagactgtccgtgtccgcatccggcgtcgttaagtgttaagtgtcccccagaaaaataagggaagctgctccaccacgttccgcggatattgtctccggccagagaaagtttttggggacacggctctgcagaagaagattttcaccttgtctctggcgtcgggacgcgagcgaacttgaaaacttgtctattttcggaggagccaaacagagcagcagctcctaaaaagcaggaggaatctccgaggagctagaggagcaggaggtggacaacattcaattgcgtgcgagatctctaagctactggctgcgccatctggaggaacacatcgccacctcctacattccgacaacggcagcaactgccaacaataataacaacaacaacaaaaacccaaccaagatggtcaacagcaatagcacctatttcatccatcctcctgcttcacaacagcagcaactcgttggtggatccaaccagaatctggcctgcaaaacaagcagtcaacaatcgctacatttcctcgcaacaggcccatggcagcaaattcattcgcaaccggcgcaacatcatcatcatcatagtcacaattctcaccaccacaacaacaacggatgcagcaccaattccggaagctgcaaccaacttccgcaacatcagcaacagtcatcgatttgcatttcgagctcgtcgctgttgtccaagtcacagcagagtctcaaccaagttgccagcagcagttccagctctagttcctgtcttgatagcacttcctcgcagctgctaaagaccaccaacctgctagccaatctggactggtgctcggacgtggtgaaaaagcaggaggatggcggcggtgggagtgggccatccttgatcggtgatggcaatggcaatcccggcagtgccgtccggggcatcggtagcgttgagaacgtttcgatgaaggaatttgtaccggttacattcaattactcaactccgcagggaaacaataaatccattgtgaatagcagtggtgccagcagtgctggtaccaccaccaatcaagccagcaagcaccatcacctaattgcgtcttctagtcaagcctccggtgtgctgctgggtagcagtgctaatggcagcagtttaaatcttaacggtagcaccggtttaggagctcacacggtggtactctcggatctggactcgagcgacgataatcatctgagctttagtaaaaatggaacggaaatattcgactacgattgtgattacgataacgaagaagaattcaattatttggcccgagcagccgccgctgttgccgcaggaggaacatcgtccaacgctgccaattcttgtaaatctggtgggacgaatgcggctggatccgctgcagttccgccatctgtttcgggatccagtggaccgaccaataccagcagtggaagcagcaatagcagtagcaacaaaaatcgagtttcgtttgatgctaacattagtgattacctacgagtccctcctattggacttggggaattcgatttagatggtagcggccagttgaaaaccagaagatctaacagtcttaccacaacggtaagtagtgcatgtgggctttcggttgggcaactgcatcagcagaagcagaacaacgaatgtttatcggcggaaaatctgagcaatctacaactactgcagaacaaaccgaggagtttctcgttaaccatggacagcccacggtcgtcgttaacctccagtggatcagaaactcggctggacgatttcaagcagcaccagttgatgaaaatatatggatctccgaatgttggcatgtctagcatagctcactggctgaagagtttgcggttacacaagtacgtatggttgttctccaatctgacgtatgaacagatgatggaaatgactgaagagtacttggccaatttgggtgttaccaaaggagctagacataagctggtattgtgcattcataagctaaaagaacggtacagtgtactgttacggttagagaaggacatactgaatgctgggggttctagggcccaacttagtccagtatttgatgaacttacgaatatcgtgttgactccgatgaaacctatcggactggaccagaaagaggatattgccgggttgtttgttaaattgttggacttgattgcttcgtttacattgacacggccgctctgtggcccacaagaagaggaatgcatgaatgttttcatttgggtgttggagcgggcgcttcataacgacgcttttgcggcccatactactcagataaaggagtacaagtacaaagcgaataaactgaagatggcttatgctcctaaaagccactacgctaagaataacggcattaacggaaatatgaataagccacggtggtctacaactatcaaacataaacccaatagtgcagctgatggccaaaaaacgccccaccgcaagagctccctgcagtattttactccaccaatgcaacaatcgcaatcatcacagcaacaatcgcaacaaactcaacaacaatcccaacagcaaaactcttcctcttctcacacacatcttcaagcaattccacaccaatactacggccatggaggtcataatcctaatgcaggcacgggccacaacaacaattacaacaagagttcgtcttatccgaactttgcttcgaacttatccagcagtagtggctctggaagcaacagcaccatcaaacatcacgtacagcatttacagcaaagtcaaagtcagcatccgctcccacagcaacagcaaccacaaccaccacagcaatcgcaccatgcccaacagcaacaacaatcgcatgtccctccacatggtaattttatgtaccatcgacattcgttgaacaacatttccgctcatcaacaccagcagcaattcttgcagcaattgcaaaaccaacatcagcaacaacagcagcagcaactgccagtgctgccttcgattttcctaactgcaatgggaggcggtggatgtcctccaacaaacaatggaaaatcccaatcgtcagaaacctcctgtcccaatcccaaaaactcgaccatgccgacgaagtccagtccagtggatctgctgggaagcaaaagccagaacaacagcatcggcgatataaatagtcggctagagtttctttgtttgcagatgaccgaacaggccatcaactagagcaccttgttggacagaaaagaaaaactagtgagtagtggtagtaattgttaaataggattgcgttgattaatttaggaataggtcgcgaaacgatgcatgcctctttctgcggaggcacgtagggatagacgacgatagaaattgtagattttttttcaaatcttgacgctcttcaagtctataagcttaaaactaaaaacaatggaagtaagcaaatcttataagcagataaagggattcctgtattttcaataactctatatataaactactcatctcattctctctttctctgatatacgcgcggaatgaggacgcaaaattaacgcaaaaaggtggaaactcttacgttgttgtagatttcttctcttggagacagaaattgattgttttatctatttgtatctgtttttaacatctaactttctgacgctagcggtctagataaggacgtcaaacaaaacaaaacgaacgatgtgaaaattgtgctgagaagtgtttcaatctacaataatcgataggagagcaaatgagtgctagggaatttttaattcagcaaaagcgggtacatttgaaagtggtagtattctctgttttactatttgtgtagcctttttttctgtcctatgaaattctctatgattttactatttatacaaatcgaaaagcctgttcagacataattttatacaaattgagtaaaataaa

SEQ ID NO: 686 - DNA, 3066 bp, Aedes aegypti
aaaaaaaggaagaggaacatagcatcgccaaaggaaagtgtggtcggtccagtgtgtgagtgtgtgtgtttggccaattcatccgacagagtgatccacaagcacatccctcaaggcagcagaaaaggaagatcgcttattccgtgtcgtcgtcgcagaaagtagtgtgaaaaacgacgaagaacaggcggcgcagtcccggtttcgtgaaacaacattgaaaaaggggagcaaagtcacagtcggcggaagaaaaatccacataaatcgtcctggtgttccaatcaaccgaaaaggctgaaaatcaactgttggtagttcttgggaaatggtaatggaagcacaaccttcaccgcaaagcgttggccgcgagttcgtgcgccaatattacaccctgctgaacaaggcgccggatcacctgcaccgcttctacaacaactcgtcgagctttgtccatggcggtttggatacgaagaatcaggaagccacgctggtgatcggccagaagcagatccataacaagatccagcagttgaactttcgcgactgtcatgccaagatcagccaggtcgattcgcaggctaccctcggcaacggagtggttgtccaggtgaccggtgagctgtccaacgatggacaaccgatgcgtcgtttcacgcaaaccttcgtgctggccgcccaatcgccgaagaagtattacgtccataacgacatcttccgctaccaggacatctactcggacgacgaaatcgatgagaacgatcgttctggcgaggaagacgccggtgaagtggacaccaacaatgccgtggtggatcaacagtccgtgcaggccaatgttgtcgcttctgctggtggcgtagctccggctctcggtcagccgcagcaacagccacaacaacctcagcagcagcagcaacaactgtactatcctcctggagtgatgagtgctgcccctaccggtatcatcccaagctacggtcaaccgcaacaggctcaacaaccccaacagcagcagcagcaacaacagctgaatggagttcacgacgatctgctgaaaaccgtcccaacccaaaccactacccagctgatgcaatcttcggttggtgctgtccctcagcaaaacccgaccgcagtcatgcaacaagtcccaagcgtcgccaccggaatgccaacagttgatccaatccaacatctcgcccagcaacaacaacaagtggtccaacctcagcaatccacccctcagcaacttcaaccccagcaaatccaacaacctaccattccacagcaaaccgttccccaacaacagcagcagcagccacaaccaaccccgatcgccgaaccggaaccgattcaaagctctctgtcgatgaacgaactggactccgctttgccctcgatgaacgacccaacccccgccgaggctagcgattctcatgaccaccatcatcaccacggccagtcggacctgaacgatcagcaacaacagcatcagcagcaaactgtaccgcagcaacaactgtccaacgagccgaaaacctatgctaatttggtcaagtctggcggagccggtggtcccggaccgttgagtttcgcttccgtttcgtcccatcaccaccaccagcaacagcagcagtcccatcaccagcaaggctacagcaacgttgccgctggacgtcaaaccgtaatgtcgccaccgccgtcgtcgtcgctgcaaagctccagctccaacaatggtggccccacttccggaggactgggtggcgccagcaagtacgatcgcagccagcaacagatgtcgcagcaggaccagggcatgggcgggcagggaccgatgccccagcgaatgcaaaaccaacagcgaccgatccgaggcaatggtggcccatccagtggtggacagagctctctcagaccgcaagatagccggccaagctatcagagaagctacaacagcgatggcgaagatcgtcgccagcagagcagctcccagttcggagacaaccaccaacttttcctgggcaacattccacatcatgctaccgaggaggagttgtcgtcgctgttctccaagtatggcacagtcgttgatctgcgcatccactcgaaaccgggagccaaggttccgggagtgcgtgccccgccaaactacggtttcatcacgtacgaggatccctcctcggttcagagctgtctagcggatacgcccctgtacttcccggataactctcccgatggtcagaagctgaatgtggaggaaaagaaaactcggatgcgcggtcccggtgagactggtggccgtatgggtggcagcaatctcggaggcaacggaagcggtggaccacgtggcggtcccggtggccctggaggtcaacagcgtggaggccctggtggcccacagggaaatatgaaccgtggtggttcgggacagcgcggcctcggtggagttggtgccggaggtggcggtagtggtcgcggaggatatcagcgatcagatcgaagcagcgtaaccggaggtggtcagcgatctggcaatggaaacgtaagtagcaacaactcttacgggggcggtcctggcagcacctacggaggacgacgttaggacatagagacagacagccatgcggctagaatccaacatttagaaagcaaacatattatcattttactatcgactcgaaatcatatttgccaatctctctctatctattattgaaacaagaagaaaacaaaatgcattacacacacatacatacacattaatacctaaacaatcggccgtagcgagagtggctatgactgctggtttttgaatttttcgttttcttttcgcgcgtaggatgtgatatagttctatattgattaacaaacaaacaaaaaaaaaaacattaatgagtaaaactgcagagaaaaggaaaacaatatgaaacgaaatcatacaacaatgaatttgtgttcccgctattcacttttttctagtcctaaaaagaatagtaatcgaacagacaggtgatgttcccaaggcaaaaacgatgtaacacaaatggaataaaagtacgattttcc

SEQ ID NO: 687 - DNA, 3706 bp, Aedes aegypti
cagttgctttcgatcgtgtcggacgtgcgtgagtgactactttttctgatttttggtttctggctgctggcttttctggattcctacagcgaaaataaacactcaacaaagttttggggaatttccgtctctgcctgccattcgcgtcgcgtcgaccactgcaatcctccgtaggtccgtccatctcactgcaggatcacggtgaaattcgcggcgcgagtgtagtgccaatctggtggaaattacgtcgggaagtctctggcttcggattggaagtgtgctgttgctgtaattgatgggggaagtccctgcgaagtggattagggctgtttgtgaatttattgtgtgctgaataggtcaataatttgcctggttccgactgtgagcggattgtttatccgtggaatcggaaagttcctatactagtggagacaagcgaaagtcaagaaaaagtctcaggaggaggagaaggaaaatatttggctcgtgtcacaagtggcatagaggaagtgctttgtgagagaaagaagctgctgtggcatgggaaattaaaagaaaaaaaaatgacagcaatcgtcacggaaggtcagatctgaaaagagctctcgaataaaagttacaggaagtcaaaattttggggggctattgtgggaatcagtgcttgaaggaagcatcaagaaaagagcactacacaatggatacatcaaaggagacagaaatggatgaaaacaccgagctggatccgagaattcagatcgagctagaaaatctcaacacagcaacggatgatattaacaagttggagatcgagctggaggaagcaaaatcaacctttcggattctgatgaatgaatccacccggcggctgaagctatcgtccaagaaactgggcagctgcatcgacaaggcgcggccatattatgaggcattggaaaaggccaaagcggcccagctggaatgtcaggcggctgcgatcaagtaccagcgggcaaacgagatccatgcggcagcgaaggaaacggtggcgctggccgagcagcggttcatgagcaactcccacgagtggcagttcgataacgcctggcaggagatgctgaatcacgccacgataaaggtgatggacgccgaaaagcaaaaggcagagagcggagccgaacatcagaagaaggcaaaagtattccaggaagcagaactgaaagtacaacacttggaggagcgaaaccggcgtagtatacagaaatcgaggccatactttgaggaaaaacaactgtgccaggaacagttggaagcacagaagggacgtatccagcagctagaggatcagattgttgcagcgaaaagtgcctacggaacggcgttgcgaaatttagagcaaatcagtgaggagatccacaagcagcggggtgacttgagtctggcagctccgtccgggcctcgcgagcctggcgtgggtgcagaattatccaacctccctccgacgacgagctcgatgaagcttagctcacccggtgccagcagttgcagtaactaccacaacttcagcagtaatatgccagacatatctacagagctggacaaatgcgagattcactcggtgggaagtacttcgttggcaactagttccgctgtcagtgagaaggaccctactgacgatgactatatgaacgacgcagatctgaatctggaattgctccgccagaaagtgaaaacactagccgtccgtccagtggaaggtggcgatggccagcagcaagagcaggatgtctgggagcacgagctgaatgctaccgtcgacaaactggaccaccttatgatgctgcgcgagtcctctgccaatagcttgagtggatcatcgctggtcgacagcaatcaagctaacaactatgccagcctgccaaccaccccgaaacatcaccagcagctttctccggtgctggcggagaagcaaaaaattaaaatgttcaaaaaactggatcctcttccgcttgccaacgtttcaatgtatgcgcttccaacttatctaagcagtagcggtagtgggatgactcctgctcgcacgggtattccttcagttcctatgggacacaatgatctagtgacgcctcgtaacgagaccgtagctcccgttattgggctaaagagcaaacggaaaatgtccatgtaaaattaatggtaactaaattatttgttaagcaaatcttcgactgacaacatgcaaggacggggattaacttttggttaaatcctatccagattctctggagaaggcacggttccccggctaatatggtcgtgacatactaacattaacgttattttttaacaatattataagtccattcgctccgggctttttcgtatattttgttcattttctacgttttactagaaataacgaaatgaaatgaggtagtgacgaaactcgaaagacatatgaagaaacatggcaaacatgatgatatgttgcctctgttttcaactatttgctcactacgggcttttgtacatacttacgtgaaatattatttttagtaatgtgatatatgtatctttcaaacaattggcatttatatacttgagttgcacctttcacaatcttactgattgtttcaatatattcattctattttttctatatatcttgcaaattgtattcggctctcgacacagttaccttaggaagcaatctactgctacactaaagatgaaaattgatacactttgttcagtacaaactcggaacgtatacctacttaaagtatacaagcggtagtaacattgcaacagaaaatacataatagtaaattgtaatgattacagaatgaattctatattttcaccacaacctggttttagcaaaaataaaagttctttagaaaatgaacagtagggcaaaacagtatactgttttgatagccaacacaatcgaaagacataaaattgtaggtgtgctttcgtcctctacacataaccaatgaaaatcgaaagcagtgaaaaggcttcagccgaaatgaagtaaagctttattactattacatcaagataaaagaaacattgatcacacaacttacatttagtattcaaaagaatcagtttaatcccagccactcgccttcaatttttcgattgatttcaaagatgaaatccacccgatttatgtattgttggtacattatcaagaagacaagagttttatgagtgcagtatcatagaagaaaatatatcgtttttattttgttgaacatgagagaactaaaacgaagagttgaaatggtttgatacgtttaacagactttaaagtagcataaggtaaaacttttaaaggtgaaaatttacggtttgattttatgcatctaaataaacttgacagcggatttagcgatgttgaaaaacaaaatcttcttcaagttggtcaacctactttggcacttctctggttcactttggcagggtggttttgataggtctgaaacttagctataagatatatttgtgtatatagaatcttgtgagtgatttttgactgtaaagcttaaaaaccatgccaaagataaccaagatagcccaagaataagacatgtttctcaatgcttgaagaggattttcctctgaaatcggtgaaaatttgaaccctgtatggtatggtttatcgaaaatttgatccacccgtctgtaaacatgaaataaaaactatattaatgcgtaa

SEQ ID NO: 688 - DNA, 3051 bp, Aedes aegypti
atggcagatagtttagttgaggctccagctccgagttcgagtcacttgatgaatttgggtgggctaatagcggctgatttacaaccgggctcgtcgtccggtccttcgtcgattccttcttcctcgaccgcttcggtggtcgcctcctcatcctcgtcatccacttccggtggtggacagccctcgacattattgatttctgtggctactcagccagctcacggtttgaatttgtccgagcaaatcatgaccagcagccaagagctgaatcttagcctggggaacagcagtagtggcaatggtggaagtgccaatcagcagcagcaggttggggaatctccgaaggtcacacgcccatccgagcactcggatgaggatgagccggaaaccaaacgaaagaaaatcgataaacccgtaacgaaaatgatcgaaaagttggaatctcgcctcgggggcatcctgtgttgcgccgtctgtctggatctgccaaggaccgcaatgtaccagtgtaccatgggccatctgatgtgcgccggatgcttcactcatttgctggcggatggcagactgcgtgatcaaaacgcgacctgcccaagctgtcgtaccgagatcagcaagaacacatcatcgcgcaacttggccgtagagaaggccgtctccgaactgcccagtgggtgccagtactgtggcaatgagttccccaataagtcgatcgactaccacgagagcaatgagtgcgaagagcgaccgaccgagtgcaagtacgcccgcatcggatgccaatggcgcggtccgacccacgaggttccctcgcatgaaaccaactgcactcacccgaagaagtccggagctgaggtcatgatagcactgcaggcccacgatgcccgggcagccgaggagaagaagctttttctcactttgattgatctcttgagctacgagaaaattatcttcaatgacctccagatgaagccataccgtaccgacgagtacgtgcatcgtctgtactacgaaacgtcccggttttccgcgttcaatcaccaatgggttgtgaaggcgatcatcaataagagccagcgtgatccccaccaatcgcgcgaacgtgatatcacctatcagttgattctgaaatcgaaaaccaccagtccgctgccgatgcatttcttcgtgttgcggggcccgttctcggacatcaaggttgatacgcagatctacaagcacgactttacagaaaccgagacggagagtccgttcaagctgctgccattgccggatacggccgagtgcaatcgattgctggcggccaaggcgatcaatttcaggttgataatgtttttggcgtccaagtaatttccccgtcgcgagaaattatacgtgatcagtgatggtaacagtatgtgttgcatcaacatttgctactattattagtgttattatgggttcttttactagcgaacacgcgcagcatcagacagagcagaggaagaaaaattaactttttttttcgtttattatgtaaaactttacaacaccctacttaataagttgtcagcatcgatagattgggttgaattttattgatcggttttactttgaatgtctctgctattcgctcgcatatgatcggaaaaccaaatttttcagttttaagtgcttgtaacgtacatccgtttatggtagatgattttgttttaactctctagatacaaattcagtcacagcagagctgtgatcagtggaaatgtgtcttttattatcgcacaacattttattaattttattttctacatggaatcaagcattttggaatacgaactactgctcaccgcaaacagattatttatctaataaatatagtgagtaatgtctaggataaattatcaacattttactcttacagatacacatatattaatagaccgagacaaaaaaccctcccctgtacattaattgactcataggataatcatcgacatacagtacgttgttggaaccgattgcaccgttttcctagattgattccaatccgaaaacagataatcgtagtacaaaatcattttagaaaaatttagttatctctcaaatcccctattcccaatggtcgtgggcttcaatttcagttggtaatcttatatcgataaaacccgaatcgattgccatcctgtataaatagatactgcatctaaccaagagcgccatatgtattaaacttgtttttgtttgaacactaaatttagttgtccattactccgattctgcatctgttcgctaactaaattgtgtgataattaaatcgaatagttgaacttggagttttccgtcgaatagaggcagtgcgcttattcgaaaaaaataagaataaaactttttagtcgtaaggcgtacaaccagagaagcaagggatccatctaagtttccatcgtagagttaagacggtatgtgaaacaaagttcgatcaaaaatcgtgaaaacatatttatatttaattgtactctgtaaggtctcaccatcgtgtagtgataataattgtaacgcattacagatgcaaattgtgtataaacgatacaatgaatcgaatgtaaaagtacctacgtaggtaagtcgttactttctccttaccacgcgcgtactttactgattgcaatcggtcaggtaccgccaagtgcaaaccagcagcagcagcaaattagcgagacagccaatgagcactaaattagtatgcaatacgttttattctgatccgctaataatctcttcgaaaatcaattacaaagctagcgttgtaaggaaaggcttacgtcgtatattttaggattcgttatttcaaagagtggcatatgcaacatacggatagataaaggcaacacttatacatttttgcttcagagatatacatgattatatttatatagattgctgtaaaactagtagtaaggacgcatgtcgtttgtaagatgtttttctctaatttttattcctttaccattatcgtacctttttggtaggtcgttttgtttgtcttctgtaatgaacttatcccttattctagtt

SEQ ID NO: 689 - DNA, 2096 bp, Aedes aegypti
tttctttagataggtacctgtctcttatagtgattaatgctaatgaaagtggaagtttacatttttgttgtatcttgatactgtacatggatgtcaagtagaatgatgaatttattttttatccttatggcttagacaattctatagttgttataccggtagtttacctgaaaacacctaaaaataatgtctaaagtaatctcaatgtaatggctacaaaatgtaataagtattcttgatgactgacgctcattatccagcgaaaaaaatagcaacaagctaaggatgtgacgattcggctatgaaatccatattgtaacgtttattgcattgagcgaatttgggtttttcccacaatttgtcaaacgaggatactactgtgacgatagatcgattcaacgttcgttcacgggggataccgtagccacaactgcgattatgctgagtggatttgtacctctgttcctgatctggttaactgagataatattctattcatcctcatcgtcgtttatatgtagcagctctagtggtaaaaaaactcggtgctccagctcgtggagtcaaagctggtattggttcaaaaagtacggcaaaggtctcatactaaagcttttgattgtggatataataaagaccttcgctggcgaacatagacctcactttatagaaacttgtctaccggatatcgtatgtgaagggagcgaatacgtttctacatacacctgtacaaacaccgaatatcgaccttacttcatccgagatgctagcaagtcgtttccttccgggcactcctcgatgagtgtctacggatcgcttttcatgatatggtacttgcaaaaacgtacaccgaagatcgcttccgttatagctcttccgttgtgtcaggttgtggtagccacgtggggaatattttgtccattatcacgcataatcgataatcgtcaccactggtgggacgttcttgccggagcgttcattggggtggtggctgccgtcttgacgtgctatttcagttgccacaacttcgacaaattaagactgaggggaaaagatccgatttacaaagatcacgacatcaaccttgtttccaataacgtgcaccgtcaaacggcgtcaatggaacaatcaattcctaaacacattaccaccgatttagaatcgtactagaaatttagaaacttacaggtattaaaaactgtattacgttgtctacgaatttacacacaaatccataggattgtaaataggaaaagttcaaaacgtgtgatgtatgtttgcgaggacgtattgtgatattaggactagcccagtgagattgtttggtaatcatgcaaaaacgtactgcgctcatatgcttctactacaaaacacagaaaatgataccggaaacgcagatcactgcatgaaaagaatagcaaacaacataatgtcgttgagttgcgttgccctgcaaaacgtgtaccggtgaaacctaaaaccaacttggttgttcaggagaaaaaccgtttcatcagtattaggcaagtagaacattgtttcgtacgtggcgaaaaattgtttactgtcccgtttgagaagcactgtcatagtagaagatagaatgtagaagcacgcgagtcaaatgttaagaagaataagggaatagctggcgtattaggaagcatgcggttgaaccagttgcacttcgcagatcgtgtaattgtgacaaaaaacgagtaggcgaaagtaaaccgtacccacacacaaaaaagttttaatatattgattttacaacaacttgaaaagaacataggtaaattatagaaaagcacgatgacaatgttgaataattgtaagataaaaagctttaataaaaagaaataaaaaatatgatgtcaaaattcttgttttcttttcattttactcacattatcttttatataaataaacccaaaagttttacattttatattgtctagggttaaaaataaaaaaaaatatgggctttcactaaaaacttaactcttttgaacccattaacgcccaagcgtctcacaatcggtattcagtttcatttcagtccacttgtttccatacaatacagtcaaccctcc

SEQ ID NO: 690 - DNA, 17643 bp, Aedes aegypti
ggaaaatttggaaaatcgcgaaacggaacgggaggtgaaaaaactttcaaccagtcgtgaaaaagtgcaaattaccgcggaaaagtgccccgattcggaccgaaacccgtcgcaaacggaagcccgcgtgcttctgcagccgcgcactgtggaatcctccgccgaacgatggaatccggccggaaaagtgcatttttcgtcttttcgtcatcgtagacgagggggagggagtgtttcctcttggccccgtcatataggtttttcttttttaccatacgccaccccaacaaattcatccacacaaaaagtgttgttcagcagttgtctgggggggaaggaaaggcagaaaaaaaatagtgcaagcataaccagtgaaaaaagcaagtgttttgtatttgggagggagtgtgattcgattcgtgattttgtagtaattggaagattgggctatgagtggcttcggaacgtccaccggttctgatttgcacttccgggcgcttccgtatctggacaagaagtgggtcaaggcggatgtcggaacggctctgcgatgttcggaggatttggcgaacctgtggaatcacctggtgcaggatgaggaagtggtcactggcaagccccaaacggcggtcaatgcctgcggagatgtggcatatgcccgtccggatgggaagtactactgcggacagcaggcactgaactgtacttgctgcaagggcgtttgcagtgcaacttcgaactgttgctgtccgggatgccagatcctggaagtggaagaagggccggtgaagaagtcgtccggttcgggaacaagtccccaacagcatcagcagcagaatcagaatatgcacgacgggagctgctccgggaccattctggactcatggctgtggagcccgataccaagtccggaagagaaacgcgcctgcaccaggaagctgattgccgaacaaagagagatttgtctccaggcggcggccaattgcctttcggccacgcgcaccaagcagcttctgtacgtctatcggcggtattttatcgcgctgcaacgctgcaaggtggaagagaaagcaatcgccgcggccattagcgaggacggccggccgggaatcaatccggagatggtggccagcgatatccacgacgccaccaagctgagcaaaaatcccagctttgaccggacgcccatgaaggactgcgacaaagccactttcggattggcccgtgtcggaacccgtgccgccctcaacttctcgttcgccttcctgcgtcgagcttggcgctccggcgaggacgtcgaactgtgttccgaactgctcttggaagcgctggaagcactccaaaccctgccggaagcatccctcttcgacacgtcccaaatgtccaccctgtggatcgaagtggtggaaaagtccattaaattcctgcggcaggttgtgctcggggacgtcatgggtggtcgctgcttggttcccaaagctgatcgccatatcgcgttgaatttgctgctggaactcggtgctcagaagggaactcttggcggctccctggaaggtatctccctactgctaaccttacacgaaaaggatcaggaaagtgacgacaatcgaagcccaccgcaaaatgccggagctccgcttgtatcgctcctgaaacggtatgagcagatcgaaagcttcggatcgtacagcgccgtcgattcgtttcacttcggaccaacggaatcgttccttcggttcctaacgctgccagaaaacgaaacaaccaacgtggatctcaaacaggctgccgtcattatcataagtcatctggatcggctggcaaagccgcatctccccgcgggaaactactcgaccaaagttaacaagtccaaatcgcagaagatcttcaccctgggttggagttcctgttcgccggaaatgtacggattcatgtccgaggcaacgaacgggacgactcagttgatgggatcaatcccgaggtattcagctgcaacaatcgaactgccatcgacgcttcaggtgcgccaagttgcatgcaccgaaaacaatatctacattctgacgaccggcggacaagtcttctcgctacattcgaacagttcggagaacatagctccgaaggcattcgaaggtttggaaggagtgcatgtggttcagattgccgctcactgcgaaggaaagcatgttatggtgctcagttcagcaaacgaagtgtggtcctggggagcgggagatggtggccgattgggacatggcgatacggtttcgaaggaacatccgacaatgatagttggcttgcatgagaaacaagtttgcggaatctactgtggagcgtcgtacagtgcggcgataacgattgccggagagttgttcacctggggacgaggaacctacggaaggctagggcatggtaattccgacgacaagcttgtcccgacacaggttcaagcgctgaaatcgtacaaggtggtcgatgttgctttgggaagtggtgatgcccattccatgtgtgtgacggataatggattgctgtttgcgtggggtgatggggatttcgggaagcttggtaatggttcctgcaatggatcccccattccggtgcagatcgatacgcttgtgaatgtttcacggatctattctggatctcaattcagcgtggcactcagctgtgacggaactctgtatacttggggaaaaggacacggtggacgtttaggtcacggtaactcggaacattccaacgttccgaagctagtaagggcactggagggaaagaagattgcagatgtggctgttggatctgctcactgcctggccctgacgagcagcggagagttgtatggttggggtcgtaatgattaccagcaaatctgcccttcgggggtctcgcgagatcctatcatacatagtcctattctgacaacgccacccaccttaagaatatccggaatgacatgtggagctgcccagagtatcgtttggtgtcattcctcgacgctgggagttgcgtccaaaatcccattcgttgtagatctcagtgaacacacattccgtatgttggaccaactgctttgtatggtttgcaacagcccaggagacgtccgtcacccaccaagtcaagaagcggaatgtatagccgtcgcatctctcaacctcttacgtcttcaattgcacgccatgattgtcaataacgtttccgctcgccaagtgggcctcgtcgaaggatctcggctactcgctagcttgaaatcaagaattctgaaccttgctggaggcccagttgttctgaaaacaatgcaggaagccgctcaatggacactccaggtcggatggtccattctcctgcctacggcttcggaacgagcgcaaacactaacctcgcttctcccagctggacacgatacagccaccactagcaacagttccggccatcgctttatgactgatctcctcgttggttccttaatggccgaaggaggcctccaaaccgcccttaaccaagcaatcaacgctcaacgctcgcaagactgcacctccactggaacccatctgtccctgctgcatttactcaaacagctgcttagaaacaattccagcctaacgcaggcccgccttggccaacttatgctgggaccatatctcaagactgaggaaggcttttcttccccggaaccaccctcgcctagtctagatctactgcacaagttccaacgcttgctcctgtcctacatctaccaatccaaaactgacgatctcagcggtgctgaagccctcctagatacctacatccagcaggtggtcggtgcttgtgttactaccttgaacaaagcccacgaaactatcctccaaggcaaggacggagtggccgaaatcctcaagaatgacatttccgatgctctcttgtatgagctgctgatcgggcttgtactgatccagaaagagaaatccttatttctgtccacattcgattggaacaagcactttattccgcttctccatgctttggacaacttcaatcgtttgacgcacgaaggagaagtgcatgactccgatgacatgggatggcctggcattatatgtcgtggtacagctaaggccgctccgatgcaagaagaaaccctactcatccgtaaaagcgacatcgagaatcactgcgccgacggaggcaattgggtcatcatcaacggcaatgtctacgacgtcaaagattaccaagcggagaacgcgaccacacaggaaattctcaactccaacgctggcaaagatatttccctggagataagcaatcctcagcaccggaccgcgttcgagttcatcacttcgtttcttcgggtagggagattcgccatcaacgagatatgcgacaaggaaacccctcgacaaatgaccactctgacccacttccactcggaatgcatgcttgcgtatttgctggggctacgatgtaatatcctccaaacaggatctccgcttcaaccagcggaaatacaatgtaaaaatctactcaattcatccatattgagtggaggacttcaggtccttcaaccgagcaatcccttcgatgaggagaaaggcgaagcccgcagcagtggctcgacagccggaagtactcctaccgatgcttccagtcagattcccatcgctgatgtaccacagatggcaaactggccttcggtgctgatctcgcaccgtgtagaaactatgctctccaatttgggcgaaggaaagctcacagatcctctggtctcctcgtggattgccatctgcgagcggtattgcaaagaaaatcatctgatttggcatcaggagtttccgccagaacatcccgtcatggagctagaacggctactaatgggcgtgctgatccgtcatcagaatctcggtccgctggcgttggccgtcgtcgatcgagaactcagcggtaattgctccaaacctccagcccctatcatcaacatcatcaaaattgtgcaccaaaccaagtggggcatcgtcaagatgcgccaacaactgaatcgaagctacaaggaagtctgcgctccgatgatcgacaagtgtcggtttctactgtacgaaatccgcccggcgatcagtctggaacagcatggcctagccaatctccacatcctgcataaactaccccgcttcaaagcgctcgtccggcgaatcatcaccgaaatgcgagcggccaagaagcaactggcctgcgccaaaccggaagacatcctcaatgtgaccattcaaagccaattcacttcttcaatcaccaaaatccagtcccaagaaaatctcagctgcaagcacctctcctccaccgagaacctggtaaacgagagtctcatcaaggtcgagagtttggaaagcttgacgactgctgcggcacgggatcgctcatcctccccagttatcctagccgtccagaagcatgccgcctcggatgaaaacctcctgaccgtagcaaacgtggacaatgggggtggagatgctaccgataagaagattgcaatcaccaacgaagagatcaagactccaacgaacgagctgatcgattacaacaactccaagatgaagaacacggacggtggagacgagttcatcaacaatgtgatcgcaagcttaagcgaaaagtgcttgatcgagacgtatccggccgagttcaagaacggaattagtcaacaaatcgtggatttcatactgtacgacctgtgcgacgtggaaacgctgcgacgcgccatgtactgtcaaattcaacgctaccagatccgcaaacaagggctcgcaatgctctatgaactgttgaagatcgttggattgttcgacgctgctcagtacaacctcttcaacggctatctagggttgcacgtctccaaaggagaaacccaaaacgcggaacacatcctcgagaatctcaacatgatcacggctttccagaaggcggatatcctgatcgctcaggccaagatcatcgaatgggccgtctctgaactgcagaagtacgtcaaccaagagaagatcaacggacgacatcgcaatcacggcgagaaggacaattccaacctggggacgtatgtgttcttgaagaagctgccgagggcacggttccttttgagtatttttggcatcctttcgcggacgtacgaagcgaatgagttaagcttgcttatcaactcaggcattttgggtagcatcatgggattgctaagacagaccggagccgattttccgaacagcaagaacaatacggacatttccgtcatctacgaggatgttgtgacgaatcttaaatcatccaaagagggacttcccggaccggaactggccaagttgatgaagattggaacgagaattactcgcggtgcggattggaagtggggtgagcaggatggccccggcggagaagggaggatcatcagcgaaatcggagaagatggttgggttcgcgtcgaatgggacaacggctctaccaattcgtaccgtatgggcaaggaaggccagtacgatcttcggctggcagatagtgccctgaaggcactctccccggacaaggacagtgagaaagaggacttcatcgatcaccacatgttcagcgagtcgcatcccaccaagctgctgcgtaacgtttgcataaaaacccttcagatgatctttgcctcggttggaattcacgccgatcaaatgcaggaaaattctttgcgaagcgtcgcttccatgttccgttcgattctaaccaatcgaatcacgtactacaactttggaatggagcagtggactacgattggtttcctacgggcaatttcctcttccaaggcgttatccaaacatctcacatctccggtttggattgatcttgcgttcgaaatactaaactcgccgatcacgtgcaagaaagatgtgtataagaagctgcattgtctgagactgctgcagtccacgttgatcaactggaccaacgaagaagccgatcgcgtcgatgatataattttcaaactgttcgaagttcttggaacgatcagcttgtactgccccaatgatctgtctctgttgaataactccgtggacatcaaatcgagagtgctttacagtgcttctcatacgggtacgatcgcagaagagatcatagttctgatcagaaagttgcataccctaccgctttggaacgagaacatcaactcgttcattgcgcaaaaactctgcctagtggctgacgttctactcgtgagtgagctggagatcaactttgaaggagagaaagcttccatcatggggacactttgcacgattggtggctgtgattccagacctcgattgggacttaatctgactctggacggagttcgcggaacgatctcccgtatgacaaagaaaggaaaagttgtcatgaatgttcacgccttggctgaaacgaaaaagatcccgatcttcaaggtctccgagtgtgccgatatcggagcttttagtctatccaagttgaccattaatgagatgctgctgaattcctgggctgttctgttctacgggatcggtcaaactccaatgaacgtggccaacaacatcagctcgcagttgttgcaaacacagcaaattaacttctccgctcttaaagctaccaaagtcctgttccgtcatcagaaccttctccgaaaaatactgcgtcaaagatcgccgggcgtaactcggagctcctccaaggacagcatatccgatagagacactagtccggaggagggcaaaccacgaagcgaatccaacacttccgacgagtcacaaacttacaccgagctgttgatccaaacgatcctcctgagagctacccaaccaagtccgctgaaggcatgttactcgttcatggagatggagctggccgccctcaatatttcccagatgttggcaagtcacgtccacaacgagttgaatgccccgtctaactccaataagcgtgcattcccgatcagtcagccgacgatgatccacggggtgccgatctacaacaacgaatcggccttggaagatgcccagactccatcgggtgcggaagctgctactggagtatcttccgtgggaactaatcgaggaacagccagacgtagtcctccgagtgcgctagttgcgcagatcatggagatgggcttcacccggaagtcggtggagacggctattaagagccttacgttgcatacgaacaataaaccaacggcagagcaggtggttcaatggattctggaacatccggacgtgacggcgaacctcggtggtaaaggcgatgacaatgacgcctacagcgacacggagagtgccagctcggatacgatggacggaggatcatcgttgcacgattctcagcaagtcccgttcaagatgagagaagacttcaaatcggccgatcagtacgcgatgtatgtgcggggattgatttgccctggaatgttggttcgttgctgtcaggacttcgaagagattcgtaagggagatatcggaaccgtgttgaaagttgaaccggaaggattgcacgatttgaacgttcgagttgactggcagatgcacgatcgaccttattggatgtgctttgtccacttggagttgctggaggcaccaccttcggaaaacagcaccacgatcagtgttggatcgcaggttaggatacggaatactcagcacttccggtatcgtttgaacacgattccaagaggaagcatcggtacagtaacgtctgtgaatggaagtgaagttacggtagagttcccgcagcagactttgtggaatgggcatttgaacgaattggagctgatttccaatccacttcacggtgtgaactccggattgggaggtgtcttcgatatcattgacgactggtcacgatgcatccggtctttaacagtttcgtccaatgagtcatcggcgaagaatcttttggacaggggagccaacttctggcaaagttcatccacccaaggtaaacattggattcggctggaaatccacgatcaagtattcattcagaccttatcgatcaacgttgatccagacgattactcgcacatgccttcgctggttgtgatcaaaggtggcgattctgtggctactctcaaggaactccactgggtttcaatcaatccgacggatgtggtggtccctctgctgaatgaatgcaagcaatactacgcatggatcgagatcctgatcaagcaatgccgcaacaacggtatccagtgcaaggtgcatggcatcaacatcattggaaagaggaagcagacagacctggagatgatgctgcagaatgcttcgttcctggcaacagagaacgaaacagcagctgagccgacctattcgacttcgtcgaactacgcagatgatcagtcgttgaatgaaatatcttcgaaagtgttggtttggggtctgaacgacaaagagcagctgggaggtctcaaagggtccaaagtgaaacttccaacgtattcttcggtgctaagccagttgaagccaattcacattgccggtggatccaagtcgctgttcatagtgtctcaagatggtaaactgtatgcatgtggagaaggaaccaacggacgactgggtttaggtcataacaacaatgtgcccacgccgagacaagttccaattctgaaccagtacgtcgtaaagaaggtggccgttcattctggagggaaacacgccatggcgttgacactggatgggaaggtgttctcgtggggtgaaggagaagacggtaagctaggtcatggcaatcgattgaccctggagaaaccgaaactgatcgagagtcttcgtaccaagcgggtccgtgacattgcttgcggatcgagtcacagcgcagcgattacaagttcaggcgaattatacacctggggattgggagagtacggtcgattaggtcatggagataactgtacacagctgaagcctaaacttgtcacaaccctacaaggacatcgtgtagttcaggttgcctgtggtagccgcgatgcgcagacgctatgtttgacagaagaaggtctggtgttctcctggggagacggagactttggcaaactaggacgcggtggatctgaaggatgctcagtgccacaccaagtcgaacgtctcaacagcgtaggtgtgatgcagatagagtgtggagctcaattcagcttagccttgaccaagtccggcgaggtttggacttggggtaaaggtgattactaccgattaggtcacgggactgatcaacatgtgagaaagcctactcctattcaaggacttcgcggtaagaaggtcatccatgttgcggtgggagctttgcattgtcttgcagttactgacagtggacaagtctacgcctggggagacaatgaccatggtcaacaaggctccggtaacacagttgtcaacaagaaaccgaatttggtgctgggattagacggagtgttcgtgaaccgtgttgcctgcggaagttcccattcggttgcttggagcttaccccaaaatccatcggagaaggacaagaaggaacccgtgccgtttgctgtcagtaaagacccattgggcggtcatagcttgggaattcatgcttccgatacggagcctacaactgctcatcctcaggtcggaaccgttaacccaaaacagcagcgaccttcactatccgaaagtgttctatctctggaaacctacggcgcccgacaggctgccttgtcccacatactgaacgccatgagtattctacaggcaagatcttgtatcatcgctgcgttgacctgtcactcacagctaacggtgcatgacaaaaccctcggggcgttgaacgacacccgccccataacccccgtctcggagaatgacctgattgaaacaaaaaccgacaccgtagtggcgagcctccagaatgaagtgatcgctcagggtggaggtgaaggacctgctgatgcttccggattgacgaccaacgatatcaacgactgcgatatcccgatcgtatccggcatgaacaacactctgagtgcgtatcgcagtctgacgggttccctgtcactgtcggcatcaatatccagctgtaatgcaacccagcggcactccaagatgtccgcgagtgcaatgtccgtcatggctgccaccatgacacatcatgatgagatgatgaacgaagtgcagatcatcagcggcctggatgacttcaccgcactgctcggagaatcggaagccaagcatctgatcgaactgctcaagctgagcgtgtcgggtcgaacgggtccggcaaacacgtcggagacgattgccaacacgttgatcgcgctggccaagggcagcacgacgatcgccaacatgctgatcgaaacctgcatcaccgagctggaggatttgtgcacttcgcggcactcgctgggtaagctgccgaaagccgtcgtgcaggagactagtcatccgtatattgacgatataacgctagttggtcatgtaaaaatcccaggcgccgaagcgcttcgtatcgaattcgacagtcaatgttcaacggagcgtcgtaacgatccgctgatcatcatcgatggtacgggtcgggttgtagcgacacgttctggtcgtgaatgggcacagtgggcgccggaaatcaggatcgcaggggacgaaatgcgttggaagtttaccagtgataattccgtgaatggatggggttggcgattctacgttcatgctatcatgccggagtcgtatctgcaagagctggggtctgatcgaactgtgttgtctcagccgtcgatcgcaatggttatggcattgctggagtcctccctcgttcctcacaatagtaatacgttgatcagactgacggctgccttgtcgcagtgtgctcagctaagttccttaacaattgcacaaaggatttggtcgttgaagaagatgcatcagtatctaacatctcgggaagctcctcgtgcccttgaaccatctgtcgtggagatcctcagtccattgatcccgattatcctacgacaatacgaatacgaagagccgcaagtccgcacaggccttcacctaatgcattccgaatacttcaaaaccttggtagccttggcatgcgatatgcaactcgattcgcttctaccgcatggcgatgcccacaaatgggcatggttccggcgctactgctccgctgttcgggtagctcaatcgctgatccgtcgggtaaccttacctgctacgttcactcttgaagttcgcaagaaactcttggagattgcttcgcctgcgacgaacccgtcgctcccaaacaccggagcaaacagcctgaccagcagcaactgctcgctgattcagcacacaaacagcggttcgaatctcagccaacaaggattcgaactcaacagcagttccgctccaggaagcgagatcgagtcgatcgatacctccaagtatctacacgaagatcacaactacttcacgccgcagtacgactcgcagctgttgcagtggttcaatcgacgacctgaggactgggcgttctcatggggtggagcaagcaccattttcggatggggccacaatcaccgcggtcaactgggtggtttggacggaagtcggatcaagatgccaaccccgtgtgaagcattgagtttgttgaggcccattcagatcgctggaggagagcaaaccttgtatgccgttacgccggatggaaagttgtatgctacggggtatggagccggtggacggctgggaataggcggtacggattcggtatctgcgccgactttggtggagtcgttgcagcatgtgatcatcaagaaagtggcggtgaattccggtgggaagcattgcttggcgctgtcgtcggatggagaggtgttttcatggggagaaggtgaagatggtaaactaggccatggaaaccgggatagctatgatcggccgaagttgattgaagcgttgtcggggatcggagttatagatattgcttgcggaagtgctcattcggcttgtataacatcgcagggacatgttctgacctggggtaaaggaagatacggccgattgggtcatggagattccgaggatcagttgcagccaaaactggtggaggcattgttgggctatcgagcgatcgacattgcttgcggttcaggagatgcccagaccttgtgcattacggatgatgataatgtgtggagttggggcgacggagattatgggaaactgggtcgaggaggatcggatggatgtaagataccgatgaagatcgaaagcttggcgggactgggagtgatcaaggtggaatgtggatcgcagttttcggtggcgttgacacgatcaggaagtgtttatacttggggcaaaggagactaccatcgactgggtcacggcaatacggatcacgttcgtcgtccgaagaaggtcgcagctctacagggcaagaagatcatctcgatcgctacgggttcattgcactgcgtagcttgtagtgattcaggagaagtgttcacttggggtgacaatgacgaaggacagcttggagatgggacggtaacagcgattcaacgaccaaggctggtgcagtctctgcagggcaaacatattgtgaaggtcatttgtggatccgcccatacgctagcgctgtcgacatatcaattgagcgaagccgtccgaccgccgccatcccctccactggaatatgacctagtgcgggacatttctccggaggttcttcatgctcggctagtgctgttgcatcatttctccgaactggtctgcccttgtttggccatgcttccgatcagtggagagctctcccttggtgctttgaaggatatcttggtatactcgataaaggaagctggcttccgaaaggtcatccaaacgactatggtacgtgataaaccgcatggacctgtgatcgagctcaatcggatacaggttaagcggtcccgtatgcgctctggcaatgggctagccggtgttgacggaatgaaaagtgtgttcggacagatggtgcagaagctgccgctgttgacccaggaggccctttcaatgccccatcgagtgtggaaggtgaagtttgtgggcgaaagcgtcgacgattgtggtggtggtttcagcgagtctattgcggagatgtgcgacgaattgcagaacggtagcgttccattgctgatccagactccgaatggccgcggagaagccggtgccaatcgggattgtttcctgctggatccgacgctgaactcggtgctgcatatgaacatgttccgatttttgggagtgctaatgggaattgccgtgaggacgggatctccgttgagtttgaatttggccgaaccggtatggaggcagctctgcggagaagtgcttcgcccatccgatctgacggaagtggaccgtgactacattaccggtttgctctacatccgagatattgaagatgaccctaaggtgtttgcttcaatggagcttccgttctctacaccgtcggctaaaggtcatgaggttccgctatcaacaaggttcaccaaaatcactccggaaaatcgtaacgagtacgtaaagttagccctcaagtatcgcatccacgagttcgacgaacaggtcaaagcagtccgagacggaatgtccaaggtgatcccggtaccgttgctatcgctgttctcggcgtctgagctgcaggccatggtgtgcggttcgccagacattcccctctgcttactgaagactgttgccacctataagggagtggaatcgacagcaccgctcgtgcagtggttctgggaagtgatggaagagttcaccaatcaggaacgatcgctattcttgcgattcgtgtggggccgaactcgccttccgcgaaccatcgctgacttccgtggacgagactttgtcctgcaggtgctggataagtataatccaccggatcacttcctgccggagagctacacttgtttcttcctgctcaagatgcccaggtattcgtgtaaggctgttctacaagagaagctgaaatacgccatctacttctgcaagagtattgatacggacgagtacgctcgggtggcgatgggtgaccctacggaagccaccggtagtgaagataatagcgaaattgaatcgattgcttaaaccactaaactcgtgtgcctctgcgagcttataggactgatcactatacataattctaatgagcagaccctaaaaagggtgagcttaaaaacgaacggaacgttctaggagcaaccaaaaaagacatcctctccgacattcttcgccattttgattatcaacagcaatctaattatacccatgggtatgtaaatccaccaaaacgcaaaccgtgtagcacgattatgcaccactaatatgtataaaatgcatttaacttaactagacccctaaacaatcttgcaagaagaaaaacagagctgttgttcattacgatgttttgcgagtgactccgacacacacatagcaagaacctctacacgacattctaactgtattaccattttgccgccagcttttacgccacactcttgattacctaccttcctaactatacgtgtgctacgataaggttgttgtttcgtttactgaacttttaccgaaccaatcattcgatttgctttactttttcaaggcctattttgcgttacgaagccttgaacgaaaccttacatattacagatatacaacctattgtacaagatcataccaacacacaacaagagatattttattaccatgttatatacatacagaaaagcaactgaattataaaaaaagaaaaaaaatgtaagtgtttgaccgagtcaagattgaaaatgaattgattgatgaaaagagaagaatcatattgtaattgttgagtttcttcatacattttttgacttgaaatgttcactctcattgcatgtaacttccatcctcaattgtgttttataataacaccaactggtctgaaaattatggatttatgatgaacaactaaccttttcattgatccgatgagtcaaattctaaatgggtgacttcaagacaagcattagatttgacaccgtgtgcacagaatatctatcaaaagctcactttcctcctggtccatttcaaaagagcaataataccggtcttagacatgttagcaaacgattgaaagttggaagcagcactacggtgaacagctgacatgatctgaagaatcacaccggacgacgttcctagacataatttagacacaacaaaagcagtggacaacaatagcatatttttccctactggtttgattatcgttctactaaaccaacagacagcagacgcgatttaactcttgcaatcatgtttttcatatttcctctcttgactcaggtgctactaaaccaatgaacaaacccactccccacacataaaaacgttgaatcaaaatgaaatccaattcctctcaaccaatctgtactcgttttgcattgtgttaagtcaatttgttcatatatgaaaacatagacctagaattagggcagtaatcaactactaaaattaatagaaaaaatctagaacatcgtagatcgctaattcctgacgaacgcgcgaaaccacatcaaacacggaaaatcatcaactcccattgaatacaaataccgtcgaaaatcaaacatcccgtactttctcccaattgacgaatatcatactaaacagtggaattcataaaattgtagagaaaaaagagtaatacatagagactgtactgatattcgcaaactacgtttatggatatggatataaacctagcccaacattctttttgagtcaactagagggcatagaatactaagtacacttgaaaatcattcttgtaggctatgccgcccatcatcatggtcatcgctttattgaacacgcggtcgcagtaggcgccaatccgattagagtgcgccataatgttgcgcaagttagcagtgtgtggtgaaatcttttaaggtgcacacacgaataagcagttcagttatttattgaaatcgcataatttattaaaacatcaccatcacacacagacgcgttgccattcggcttgtcactagttctcgtttttttgttcagttgcagtagcaaaaactaatatagcagactttaagaagcgagtaacagttttgcaacgctgtagagtaacaggccgtttatagctttataattagtgcatctacttcaccagagtccgtctttagcctagaatcagggttgaaaactgcagagctcgccctatcactaactagtttgtaggcggggttgcgcatcagtattgttcctttttcagtcgactgagacaaccgagtgtgtacttttttttgggagggagaaaggttataacgaaggccgatgccggttggggagttggcgcgaagactaacactttttacagtgaactgtgggaatcaagagctctagaatttgaattggggggatactttttccgagggagaagaactacgatagtctgttttctttatggtacaattgtccgaagaagagctacttttgtttgcaaatgcgtgagcctcagtgtatcatatgtttaatattctgtgatttttattttttatgtttttttactatctataaaatgaacacgaaacaaaagctgaaataaacaatcatatatatgtgaattcagagaaaa

SEQ ID NO: 691 - DNA, 2960 bp, Aedes aegypti
ctccgtgtagaccaggatagcattttttatatcagtgtataaataatgctcacatgggcgggctttattaataatgtcatatttccatatcgcacaggcctaatgtcgacgtcctggatgtcaacaagaacctacacaaggccacaaaaaataatttttgaactgaaactgcgattttgaatattaccaattctagcaaaacaatgagttttgcttaagtatacttattgtaaaattatataaaaactaacctttattagatgtgccaatgtagtaagcaaaagtcttccgttcaacattattgagctgatttaaaacgttttggccgctgctcagtaggcacaggatattgtcattcaatgctgagtcttcaaaccggtaacatctagcgcaaatccggttcaatcgcggtgtttgagttcagtgagaaggtgttgcacaaagtcatttggctgatggaataaaaataaaagtgtgtgctacctgcttgaagtgactcatttactacgcgagtgttgtttcgagtgctgggaacgaaaatattgtgcattttgtgtgggatattgtcgaaataattgtagtgcaatttagattgaaaattgcgaaaaaaaatacatattttgaggaacaacacaagtctagaagaagagtaagaaaagcaaactgtcagattttgaaaaaggaagataaaggaagaacaaaaacacgaagtatcttcacggcgggcccttttcaaatattacgttagataaaagccatcaaaagtgacagtttcctcacgcaaaacgacaacaagggagtgagtcgacattagtcgacccgcagtcgtcttcttcggtccgccgaaacgtccatccgtcatcgattttccacaaacgccgcggccattttgttagaagtgtgcttgcgattggaagttcggattcggaagtttgactcgtcgacggtgattttgttcgattttccgctgtgtggaatcatccggttcgtaaccgtaccggaacggtcctctccgtgcgcgtcaagtgtacccaggttcaagtgaatgcccgtttaccgtccgcgagtgtgagatattggttggcaaaaggccgcagcaccgaaaaaaaatcgtcggctaatcagaagcagcaaaccgattccgagcagaagagaagaaaaaaaggatggaggacaaggcgacactcaaagatttggaccagtggatcgaacaattgaacgagtgcaaacaattgaccgaaacccaagtgaaaaccctgtgtgataaggcgaaggaaattttggcaaaagagtcaaatgtgcaagaggtaaaatgtccggtgacagtgtgtggcgatgtgcacggtcagttccacgacctgatggagctcttccggataggcggacgatcgccggacactaattatctgttcatgggtgattacgttgatcgtggctattactcagtcgaaacagtaacgctactagtggcgctaaaggttcgatatcgtgaaagaatcacaatcctgcgcggcaatcacgagtcccgccagatcacacaggtgtacggcttttacgatgagtgcttacgaaagtacggcaatccgaacgtctggaagtattttaccgacttgtttgactatctcccgctgacggcactggtcgacggtcaaatcttctgtttgcatggcggtctcagtccctcgatcgatacgttggaccacatccgagcgctcgacagattgcaggaagttccacacgagggacccatgtgtgatctcctctggtccgatcccgatgaccggggcggctggggaatatctccacgaggtgctggttacaccttcggccaggatatttcggaacttttcaatcactcaaacggtctgacgttagtatctcgggcgcatcagcttgtcatggaaggttataactggtgccacgatcgtaatgttgttacaatattctctgcaccaaactactgttatcgatgcggtaaccaggcagcattaatggaattagacgattctttgaagttttcattcctacagtttgatccagctccacgtcgcggtgagcctcacgtgaccagaagaacaccggactatttcctttaagaatatcattataacgaatattgtaatacacactacaaattaaacaaaaaaataatatacctaataataaaaaatataaataataattataagcatatattattatttaatacaaaaaaaggataaaaatcgtaaaaagtttgttagagacatgcaaggaaaaaaaaggtaaatgagacgcgtaaacccgtattacacgaatgaacttacttagataaaaagagaaagagagaggaaaaagaaacggagagaaaacactgcaagtttaaaaaattgagcaacagacaaaaactaagcctgaaagtaatttcacctcacatttgctactcacaagctaggattcagagagaaaaccaacacacagaaacattcattctcgcgaagaaaacatagattaaagattcataaggaaaaagtgcgaagaagaggaaaaataagtgcatatactcattcacagaacgtcaatccacgcattacataaaacaaatagtaaaagaagcttaggtacagtcatcccttccctgttccccactccccacacttagaagctcattctgtcttttgccataataatgatatatagctagaaattcgcgttcatataggttcatcaattgcgtgaaatcatttttcctgttctttttcttttgtacctacacctacaaacaccacaaaaatgctgaaagaaaaactgttaatccgtttgaacactgtgaagcgtaaagcatggaactccacaacggagaagagagagatacaggacgacgaggatataggcatcttttttcattcggaacaaacgctttatgtcacaattattgttcaatgcagatgcgagataataaagtgtataaaatttggaac

SEQ ID NO: 692 - DNA, 3715 bp, Aedes aegypti
ttttttttttttctatttttttatcatcgcaagacacaagtcaggactgcagtttctcagacacgagaagcttggggaacagaaatgctctgctgctatatctcacactcttgatgaatgtcgttcatagtgccaccaagaaatgggactggtaatgcaggaaaagtgagaattcccctactgcagactacatcgccgccgtcgtcgtggttgattgttagaggaagcaattcccccaatgatgttgggatgttctgcgctccgagcttcctccgcgttctctgtatatgcatgcagtcgaccagagttgggttcgttcacacttcgctgctatgccgtgtgtaacactcgagagaacgttctgttagtcacttcattatccgccaaatgctgcctcgcaaggggaagcagagattggtttaagaaaattttaatctagcttgtggcgtggagcgaatcggtcgcgcatcgatgtaagctttgtccgtttacgcatttgcagctattggtgaattttctcgggttttcctacgtttattcgtcattaggtgaagttgtagtttccagctgccgttttttaaacctcaagaaaaaaaatatttcagaaaaatgattctgtgcaatgtgatagtaatggttaaaacgacgttcatttccagatgatggtgaaggccatgtgggaaccctgtgcgaaataggacgttccggatcgacgcactcaccggaaaaaacagtggtagtgaattgggactccggtcatcggacgaattatcgggtcgggtaccagaagcaatacgatctgattgtggtggataatgcgcagatcggcgtgaaacatccgaacattatctgtgacgggtgtaacaaaccgggaattgccggtatccgattccgttgcgcggattgcgccaactacgacctatgtgccacatgctacggaaatgatgttcatgacctagaacattcgttcatccggtaccagacagcgaattctgttggggttcgcgttccgccacggaagggtgccctcaagatacagctgaagggaatcttcgtcggcgcacgtgtcgtccgagggccggactgggaatggaataaccaggacggtggaccaaacaaaaccgggcgtgttatggaaattcgtggatgggataacgaatcttgtcgcagcgtagcgaacgtgtcttgggcgtctggatctacgaacgtatatcggcttggtcacaaaggaaacgtggatctacgttttgtccagccagcggtcggaggatactattacaaagatcacatgccagtgttaggccaaccggaggagcagcagccggtttcgccaccggtgcgctcacacttcaacgtcggcgatcgagtccaggtggccatcccggaagaaaggctcatgtcactgcagcagggtcacggaggctggaatccgcggatggccgagtatctgtcaaagataggcattgtacataggatcacggacaagggtgatattcgggttcagtatgagggttgtgccaaccggtggacgtttcatccagcggccctcatcaagatctatagttttaatgtaggagatattgtaaccttcatcacggatgcggtcaaaatgcagcagctacagaagggccacggcgagtgggtggaaaccatgcataacgtgctggggaagtctggaaaggtgatcaaaatctacggcgacggtgatctgcgagtgcaacagttggacgacgatttggcctggacggtgaatccaaagtgtgtcaagctggaacgttcgttgatatcgcaggcgacggcaaccgaacgatcgaacagtatgatggatttgagcaatcagcgcactaacgagcaccatataacgcccctgtctggattgtccggaacgtccgccgctgatagactcgtccgtgaggctgcccaaggcaatatgaatttcgtgcaaaattatctcagtgccaatccggaggagatcgactgcgtcagcggtggtaaaacgtgtctgcaggtagcggcccaccagggtcacgtggatctggtcaaacatctgcttcaactcggtgccaacgtgaatgtcgtggacaaggaaggcgactcgacgctacactacgcggcattcggcaaccagccggaaattatgcgcatcctattgcagcataatgccaacatcgatgtgctaaactcgtcgcactgttcagcgttgcacatttcggcgcacaagaaacccccacactgtgtcaaggttttactggagtttggagcgaatgtcaacgtgcaggatgcttacggtgatacggccctgcatgatgccataggcaaagagaataccgaggttgtggaactgttgtgcgcttgttccacgctggatctgaccattaggaataagcgaggattcaatgcattgcaccatgcttcgttaaagggcaatgtccacgctgcgcgtaacattattcgcttggcccggcagttagtcaatgttaggaaagatgatggattttcggccttacatctagcggcattgaacggacattctaaagtggttgaggtcttggttaaggagggccaggcggatattaacatcaggaacaaccgaaggcagacgcctttcctactggccgtatctcaaggtcacactgctgctatcgagaaattggtcgaattgaagtgtgagattgctgcaaaggatgaagatggtgataatgcgatgcacttgtgcatcataaagaaggcaaatctagtgcaggatgtgaccgcaacggattcaccgaagatttttgaaatgtaccaatcgttggccccgattgtgaatgaaaatcgtttgatgtatgcgctactgtgtttcctggcaaaagaaggatgcccattggatgtgaattataagggcgcaagagttttggattggattcctagtcaaccagttaaagatattatagttggatatgaaaaagctcatgatgtaccgcctcagatgctgtctaacttggaggcgatgagtctagctgcaaacaatctggatgaaaatgaaggcaacaatgctgcagcattgcaagatggagctgcaagtactggaaccagtggacttggacaatcaaatccgccaaatcctgcacgtagaaatcggggacacaaccgagaggctgctggtgcaacaccgcccccaattccaagtcatcatccgaacgtcgttcaggaggaagattctaaacgaatgaacatcgaaccgttagccccaagtgaagcatccggccccagtgtcacacctttagataataaaaatccaactgcttccccagtagcagtactgtcctcaagtccaccagtcattaccaatatccctcaggaatgtattgtctgcaacgaacaaatgttattaattatcttcgatccctgtcagcatcaaatatcctgtgaagaatgtggtatccgcatgaagaaatgtctgtcttgtggtgtgtacatagaaaggcgtgttaccgtgaatggaaagcaattgttcaacccgaaagacaatcgccagccatccgccgatagacttcgctacctcgaaagtaaaataatggaaatcgaagaaacacattgctgtagcatctgcatggaacgacgtcgtaatgtagccttcttgtgtggacacggagcctgttccaagtgtgccgaaacgctcaagatttgtcatatgtgccgcaaaacgatcactaaaaaaatcaatctctactaa

SEQ ID NO: 693 - DNA, 9296 bp, Aedes aegypti
cggtactgtacggggtacttttgcagccatcagtagtgagaaagagagtaccttgggtacctagtagatactgcgcgagaaatagtggaaaattctattactttgttcgcaatgaaattgcaaccattcgtcgaattgcgtccgtagcaaaacggtgtagaactttgttttttgtttcgggcttcagcaaaaaggcccaaacacgtgtgtcgtttgaccgtggagcagtgggatcactatttggccaccgaaacgacactgggcagtaatcgacagtagtgaaactttcaaacggtagaaaaggaagtgtgatataatcgcagaagtttgcttccatcatccgacgaggaaattctttttttcatcgtgacgtagttttactggttgagacttccggaagtacagctcggaaggaatttcttgtcagcaaaattctcctgatacttcgaagaatgcacagcatgattgctatccggaccgatctggctcgcacgggaatagccaaataaaaacaaaaatacggaaagcaggaacgacctcttcacccacccagggattgccgactccaccagagcccagacagtttggtgagatcaacgattcaatcaacgtcgtctcacacagcggtaagaagagagaagcaaaagaagcaaaccgagctgtgtataatcaacaaagcattgaataagttcaagagaaaataacacagtaaaaaagagtcaaaaacagcacacgagggggccaacggatgtgttgttgtgtatgagcaaaagtttgctgtgagtgcatgtgaagtcacgacacgggttgaaggcaagtgcagaagtgcagtcgtcgtgaagaataacaaaaccccgagtgagagtgttaaacgcgggaaatagtgaataacggtcaccacgagctcgatagtagcagccttagtgccacagagcgtgtgtctcataacaaagaaagattgcagtgcggtgagcgggttgaaggaaatttccttagctgcgtgcgtgattaaacggcagcgcgaaaaaataagagtcgatcggcgagtcaacgcagccaccaataccaatcctatagtaaattgtgcaaagtggtggggataacaggctataacacatagaagttagtggtatcgaagcaaaaaagaagaaaaaaaaatcaattggtgaaattctcctccactcggatgtgcaagttcggaagcagatgtttattgaatgtgcaaacaagaatgatgcaaacgcgagataaatgtgatacagggttcggattgtaatctgagcagcggattactacctagcaggagaaggagttgatcagcaaattggaaaggcaaaacacagaccgaaacgtaaacagagcgagccagcgagcgaggaggacgacgacgaacaaaacgtgcacaccaaccagctttatccgaaggcagacggcaaagtgaatgaacagaacgcgagtgaaaagttgagataggcccagggtacacagaaggcacaaggcagcaaaaaatgagcattgatccaacggaggtggccgctcaaacaacagcatcaactacaacaaccaccaccacagcatcatcatcattattgtcatcgatcctcggtgcggaagaggaggaagaatcgacgctggtcgaaatttcggcttcttcgtcgtcatcgccaaccacggtttcgtcactgtcgccatcgtcccgcactagcaccggtgaagatgggcccgaatcacatccggaagaggcggtgcgagactcagcgaagacgacgactacaacgaaggcgatgacgaacacccgcgaagatgctacggtatccttagattcctctgaagccagcacggtggctttagtcgcggatctgactccggagcagatccatcgccagcaacagcagcagcagccgactctagcaccggtggcagcgcacgttgcaactgacctaccattacaacaaccagaatcccggaatctctttccgatccagtcctcgtcctcactgtcgactccgtcctcatccgaagaatacgatgaatctgttaacactagcagtaccgaaggcgccttgaacgtttccagtagcaataaaccgttgaacaacaataacgacagtagtacagcaataggaggcaacaataccagtcccagcaacgaccagcgggtgccagagagcgagttgagtgccatcgaaagcactctgccacccttaccatcatccggagcgacgatcacattggtaaccagcaccccggagaattcccccagcagcaaatcgtccgaagagcaaaggcaagcaccgatcgagatagtacaaatctttccacccaccgcaaaaacattgtcctcatccgtaacgtcctcttcatctgcatcgtcctcctccccttcatcgggctcgcctccgtcgtcgggtgcctcagctgcgtcctcgacctcgtcgtcaccttccgcctcgccgctggcagtggaccaacagcaacccacctccgcaccaactgcagtttcgccttctcaagttcgagcggaagtgccgccgtcgcccccatcgaaaatggatgattccgccattggcgagccggaaatcgtaaagtccggtggcggtgatccggaggcgatccgggcggcgacattcgtgtaccacaatcgcggttcgtcctcatcgccgcaactgcagagcagcttgaaaaagtacaaaatgggcgaacggagcggcgaaagtgcgcggcgcgtttcgttcccgaaggatgcgcagctcatcaccggctacctggagccgatcgatccgtgggcgtgtgttaccatcatcagtgtaccggaactcatcgaactgtatcggacgtcatgtgcgaaacacttcaccgaacccctacccgccatcaccgagcacctcaccaagctggatctagcggcaaaccagcgagtaccgtcactgtcgctcaaggaccagaatctcagccacggttcgtgcgaagcgctggaggaaatcttcaaacgtgtccagtaccgcagtattaatctctccaatgccggcctggacgacaccagtgccagcgtgctgttcgacatgatcgagtactacgaggcggccaacgagctggacatctccgataatctggccatgacgaacaagagctggctggcggccatcaacatggtcaaaaagagccaagcgttgaacgtcctcattacccggggtcccggaatatccgaacaccacgcgtcgaacttggccaaagcactgaactcttccgccctccataccctcaggctagaacactgcgagctcagtcaacgcccgttggccacgttgtgcaacttgctgaagaggaacactgtgctgcgggagctatcgctggcacacaatcagctgacctgcgatgacgctaagaatattgccaatctgctgagggccaactactacattcagctgttggatatttctaacaacaatattggggataagggcgtggaatacattgtgaacgcactgatcgatcagtcaatctacttcaaaaccgtgcaggaaacgaagcgcaagagcgagttcagcttcgccgatctgtccagcagtctgcacaacatcaacagcaacaagcacttcttcccctatccgtatggcaaaacatcacaacagcaacgacttcagcatcagcagcagtgcaaaccagcgcaggatccgccaaaactatccgaaagctcgttatccgctgccatgtcgccaacgcccctgtcaatgccggcggacgaaaccccaaagactccgccaccaacaccggccttacccgtgcgcacaccatcgggagaagcccttcccgtggtcgtcgggagtttgtccccgccagtggaaagtcaggaagaggaaccgccacccagtccaccgagtgcggctccggtagcagcagcattagaagaatcttcagatttgcatgagaaaagtacaaataacgatagtggtcttaatagtagtgtttctagtgaagccgaacaaacgaatagcgatagtagcgggggtattgtggtgggcaccgaagtacagaagctggaatcgagcagcagcagctgcgagggagaacacttggcggcggtagcaacgaaagccgggggtgaaggcgaaacgaccagtgacattagtggtgataatctagttgattctggcctagtggtttgcgatcatccagataacagtaggactgattgtgcaagtgatgtcgaaggcagtgcaaatgatgtaggagagaaacagactttagagctggcgttcgacttgggcggggatgaagtggacgtgaaagggccgaaaaaggcgcggttagcgaaacaggacagtatactaagtgagttcgaagccaccatgccggagcttcggctgaacacggatattccaaagaagaactcgaccccgagtaaggccgaagaaccgatggatgaagacacgccggaagtttgcacagattacgacgattcaaatctcaaaatagtcgaagagaacctgcttgtagataggagtatcaatgcatcaaataggaaacaaagcgacaccaaagaagcggaagatagaaccgataccgatgacagtgcacccgtaacgcctttagccactcacaaaaaagacgaactacaattgctgctggaaaaatccaaacagcaggaagaacaggacgaagaacccatacctcctcctccgtccctgttgccggtcatcgaaagcgtcccttcggtgcccagtgtagaagtgataacgtcgatcagtgttccggaaaatctcggcgccatcccgttgaagatcgtcgaaggggagctcaaagacaaacccctctcgcgatccctggacagtgcagggtcggcggactttgacagtccgttcctggggggcagccaaccgccagcgttcccgaacgagcgctcgtttagctcggagagcctcaacagcgaaacctcggtcgattccaacgattccaagagtagtttgaagatcatcgaatccaagttcgccgctcgcaacggaacgctggaacggcagcagtcgaacgccaaccgggaagcccagcaggccgatcaatcaccgaatgcaccctgcggccttcaagttctagtcctgtggaacaatgaaatcacccggaactcggcccagtcgttttcggacctgatcgagaacacgtccacgttggagatcctgaatgtgggctgtaatttactgtgcaatgactttgtgggcagtatcaagggcagtctgaaatcaaacagcagcgtgacgagtttgggactgcagggggcgcacttgtccgacaatggcgccaaagttatggccgaggtgatcgagtttggcggtaatgctacactgcagaggatcgacctcaggaacaacaacatcctggcgacgggactggactatctgaacgacgcgatgaagtccaacaaaaccgtcacccggatcgacctggacgatgtgccgcggcgagttgtggaaaactccctcgacattggcccagagtacgcccgcctgctgaacaacattcgcgctcagtgcgaacgtaacaaacacccgcaggaaccgtcggagccgatcagcacatcgatcaaacgcctccggggatcgcacctgggctcgcggaagatctccctcacctgttcgtcgatccgggttactccgagtggggcaaccgccggcgagaagcaccatcaccatctgctggatccgagcaagaaaaccggtgggcgattacgttctccattgccaagtccgattccatcacccatcgcatccccggtgccgagtccctcgcggaatcgcttccaggtgacacgtgtcggcgagtctaccggcggcagtaccagtagtctcaccagtatgaacaacacgagcaatacatctacctcaccgtcgccctcatcgacgggaagctcgccgacactgttcttcgcggcaaattcgcgctttcgtgtggtgaccgtcgaggaaccggcatcgtcgtcgtcgtctgtgcctaactacccgctagggaaactgtcatcctcgtccatatcgccatcaccgctcgttaccagtggcatcagccggatgccaccttcaagcagtagttccgctcctgcattgtcctcatttgtcagttcaccgaaactaacatcgtcaccgattcagcaatcggtggcaacgaatacgccaccggtgctattgccaacacctacagctaccgtgcaaccaacactacaaccccaacaacccccgcagacacaattcgtatcgcctctaacggcaacaccagctacaatcccaccgacaccaaagcccaagcatacacgattaccttccacgagcagcacactgaacgattcggtaatttcatccacgtcgatcgaaagtcccgatctcgaagtgaaacggttcatgaccggagcaaccggtagcattactggccatcatactcgaacgcactcctccaccatggacgacagctgctgttcgtccatcagcagtagcatcgattcgatcgacaacgcccacttcaacaacaacacctctatcagctcgacggacgaaagtttcgatctgatcgttagttcaccttcgtcctcgtcgatatcgatcggctcagtgagcacggctccgctagtaaagtccacctccagccaacagggcgacataacactcatcccacagaaacaacaccatcaaaagcaacaaccacagcaactgttgaccacaacgaacaaagaacctcctaccctgttggtcaacgccaatctgctgaaggtgaagaacaacagcttgtccagtctggagatgagcaccagttcgcaggagtcgctgtacgatgtgcaggacctgtcgtcggtgtcggtatcgtcgtcgagtgtcgggtcgtcttcgctggtcggaggcgtggccgcccggctgacgctaccggccagcagtgggaactccaacgagaacaccctgacgtcgatccagagcctggacaaggacgtcaaagcagcgggtaaatcatcggaaaagccgccgcgagtgcggaaaacctcgtggatatcctcgatcggaaaccacccgaaagcggacagcgcttcgacgggttcgtccggtggtggtggtggtaccagctctggcagtggctactccccggccatcgaaaagctgctgtccatcttcagccctagtaacctgttttcctccaacaaatctagtccaccgagttccgaatgtggaaccgtaagcactgcgggaggaagctcatcggcgtcgaaggagaatacttcttcttcgcagcctccgtcgcggaaggaaagccccatgggagggctgttcacgtggagcaagtcctcgagggacgaggaaaaggtcctgaaagtgaacgtttcgccggagaatactatcaccccgcatcagcaggttagccattcgcagcaatctccgcagcttcccactttcagcgtggacaacatatccagtcagttgaaggcggaaatcaaggagaatatctcccccgagaataccatcacgacacctaagcttttggtgaatccacctccaccgtcgtctcaagctataaccactccggttactacgatagtgccagccccggtagccacggcggctgggtctcctcatcccaaggtcatattccatctgggaggtgactacgaggattccgaggatgacatcgatacgctaaccagcaaatatggcggaggaagcgggggaccaggcggtattaacccactgtcccatccccctttatcgtcatccattctagggacgagcgccggaagcactaccaccaatagcagcggtatcagcatcagtagcaacatggccgaaggatcgcccaccccatccagtggaatcggcatgggtgggatggccattctgccgaccagtcatctcggccagttggcacgggattcgttgaccaccatgttcaagaactcgtcgcttacgtcgcaggactcgatccggtcgatggattccctagcggagatggccgaaagccagacccagatatcagcacttcatccgcaccagcatcaacatcagcagcagcaccaaccggatgacacgcaacaagctcagtagcggacttgggtggaacgtaaaagtgtcgaatggttgatatgatttcttgattgaacactgtctttagcatagataggaggaaggcgaaattttgtgtgtggttctgaatgtctcttagacttacctgcgttcgcggggatgtgctatggcttcgaaaggaactaccagtagaagatcgcgttctacatcgcattttcggtttgcatgtttcggaccccctaccaaaacaccccaccacgccacatccacaatcaatccactatgatcgtgtatcccctatacgttttatttgatcctatttaaattgtgagaagcaacaagtaattaatgtgccttctttgagcaagcgaacactgcaagagcagcgcgaaacggaagaaagaatacgttggcggggcgtgaaacgcgaaactgaactgaccgatggaacgacaggtaagatgtaacgaattacttaaattttatacaaataattacgaggaaaaaagaaagaacaataataccgctattgggaacggaagaggcgtagaatattcgaatcggcagaagcttattccggtgggtttggtccgttgttggaagggtttggggatgggttgagtgtgtatattgtgtgtatgtgtgagaggtggcgatgttcgaatcactgtttagtaagcgaaaggcgactgtaatattctagttcataattttgctattggcatcacttaatcttaacctattctcaacgatgaagaacttcactgtaaaagttttgagatggttcctctctggctccaatttgagatgaacaactaatacagacggaatgaataaaacatggcttttagaatctaaccaggggaatagcatgaattctcgacacatcactcattttatgtagaaatctgaaaactggcacagaatttgtgtaggttcaatacgcaaaaccgaccataattgatacccttgcaccctacatcacttcaccctggtcagtaagaggcccagacgatcaacctgaggttcccaacggtatgcgaatgcaggattataaaaaaaatcatacatgcttgtatggtatcttccaggcatttatccctaaattcctccagcgtttttcttttcatactgaaaagggacataagaatttcatacaattctgcaaagactactttgaaatgattctaccccattacctcgaatgccatttccccgaatgccattatcccgaactccatcaccccgaat

SEQ ID NO: 694 - DNA, 5549 bp, Aedes aegypti
gtccaaccattttccagtaccgggtagcatttttgatctcacaaacacaaccgaccactccctcgtcacacgaagagagccgaacgttgacagtcccctccgtcgctggcggtagttcggttgcaactgtcaaaggtggaaaatgccactgtgttttcgctttcccatcgaaatgttgccctaatttttatttcgggaatttagtgaaaatttctgcacgaactcgaataaatttcaccgcaaagtgtgcaacaatgttcaattgatcggttggcggtgaatttcagtgcgcggaagtgttttccagttcgatagaagaagatttcttgcggtcgcgagtgaagtgttacccccctcttcttcacttcccacccgcgggcgtgtttcgctaatcgatttgggaagggagaaactacgattctttttttggaggtaaaaattcttgaaaagtgtgcctctcggaggagaacagggccaaaatgacgccgcaaccgctagagcagggaggagccgtggccagcttcatcccgaccgggcaggaaatggcccagcgacagaatttgataccgctggggcggctgatcgatttcattatccagaggacgtatcacgagctaacggtactggcggaattattaccccgtaaaaccgacatggagcggaagattgaaatctacaacttttccgctagcacccgacagctctttatccggctcttggctttggtcaaatgggccaactccgcatccaaggtggacaaatcggccaaaatcatggcctttctggacaagcagtcgctgctgttcatggacacggccgacatgctgtcccggatggcccgcgaaacgttggtcaatgcccggctgccgaactttcacattccggcggcggtggagattcttaccaccggaacttactcccggttgccgtcgatcatccgggaaaggatcgtcccgccggatccgatcactacgctggagaagcgtcagaccttgcagcggctcaatcaggtcatccagcaccggttggtcacggggaatctgttgcctcagctgaggaagtttaagatcgagaacggacgggtgaccttcaaggtggatcatgaattcgaagtgtcgctaacggttatgggcgacggtccgaacatcccctggcgcttgctggacatcgacattctggtggaggacaaggaaaccggggacggaaaagccttggtccacaccctgcaggttaactacattcaccagttgattcaaggccggatcgtggacagcccggatgcattggccgaagtctacaattgcctgcattacttctgccaatcgctccagttggaagttctttacacccaaacgctgcgtttgatgcgcgatcgactggatgatcacattcacgttgacgagtacattccgggaaccaagctgacggtgtcctactggcgagagttgaccaacaaagatcccaaatcggagctcggctatcgactgatgattcaaactgatcagagtgataccaccaaacagctggcgatcttgcaccttccctcgatcggtaccaaggaagtggacatcgccgatcgagccgttcgttccgagctgctctccatggaacgactgcttgtccatacggtttatgtacgatcgttggctcgtctgggcgacctcaaaaccgaactgcaactcttcctcaaggatgtcgactacagcatccagggaacgccggcgatgctgctggttccggtcctgaacccctgcctacgagccgaacacatctacatcaccgtagatacccacaccggaatgctccggtgtcacgttcccaagcacctggattgccccataatgccggagttgcagcacgcgttgaacaacgaccgcagtaagctgcagcacctgttctcggagttgcgctactggataacgcagcggcggtgcgagaaaacgctgcagcatttgccggcgaccacgcaggagcggttgccgttggtcttcccggcggatcatcctatcgagaagattggcccccatcgggtgtacattcagatgtgccggcatgcgaatgttatactgatcgtcgaactcaaagagaaggaatccagccccaatgaaatgacctacaccttctacctggtgctggtgaagccgtcctccatggaagacagtcaatcgtcggaccaagatcagccaccggcatccaccgccgcatccgccaatcaatcgggcccgggttccgtccctcctggaggtcctccgagcgtgtccagtgtaacggccggcggaacttcgcaatcatcggcgccctcggccgccaccacggaaagtgatggaatgccaaaaatgtacctcaaggttctttccctgatcgagttcgacaccttcgttgccacccatggacccggaacgtacgttgatgaacaaaccgttggatcgaaacgtaaactgcttaccggagaaggaccttcagccaagcaatccaagaccatctacccggcgtacttcatcccggagctagcgcacgttgtggccatgtgcgacgagaagctgccgttcgtggccctggccaaggacctgacgcgccgtaagattccgcacggtggcgtccaggtcgaggccaatgcaacttccttggtgctgaagctgttgacgctgcctcaaccgaagcctccggtaattccggtgtcgagcagtgcagcagcagcggccgcagctcaatccggaccggatcagaaaccaccggaaccgaaggtggtcagcgttcccaagattgacaaggacgtctggaatgcgctgctgaaacggctgctctcggtgtcggttcgtgcccagatcaacaagagtattcagactcggatgtggacggtggagttggtattctatggaactccattagccagtgcgcatcacaaagagcagggaatgcggcgtgcggtttatctgacgtacgacatgcttccagtcgattcggttgacaagttcgttgacatgatactgaacgactggtccaagatcgtctatctgtacacattggttcacgacttccgcgagcagatcaagaacgacaagtacaatctgcacaacatcgtgaccataaagtcctacagctacacgagccttcttttggcttacggcccgaacaaggaggtgaacgtcaacatctactgggatacggaggccaaggagttcaaaatggtgttcaccggaggcaacaacgccatcaacgcacattctatgatgcgagatcagctgcaggctcacttgaaccacaactacgacctagcgcagattgtctatctgcttcacgagacctaccaaccactttcgtccattgccaaactaccgatcataccacacctggcgatcctgcaatctcccaagatccccgttctgtcgttctgcatcattccgcaatcacctaccctgttgagaatttccttccaaggagtgtactgtctcgaggtacgtctccgcggatccggactctgttcgattcgagacggggcctacagtcgcttcgatcgaagtcacgtcgttgaagagttcactcctacgcaaggcctgaaaggcttcctgtccaagtacgtagacgaaacggccgtctaccgacgccgatcgcaatcagaagatgacaacccaccgtcccccatcaccatggaagacccccacggtggaccggcatccgttgggtcaaccttcctcagtggcggagccatgcgtggccctcagagccctcgcgatccaggacttcgcttcgcggctcctctaacgcctccctcggggtctaacccacatactccggcctcaccgcatccccagggcatcggaggcagccagagtcatccgaactttaacatgacctccccaccggctccacatatgccacatccttcgcctagcggcggccttatgccatcgtcaccgttgaaccctcagcccagccccatggctgcgcattccccgggaccaaccaacctaccgtacatgtccggccacaccgacagtccgttcagtgctcattcgccggcagcttccaactggccagggtcacctggtatgccgagaccttcgccccgaccgggacaaagcccggaccataaggcacagactccccaccacaacacatcgcgagtacttccggctcgatcgtgggccggcgccatacccaccctactgacgcacgaagctctggacacgctgtgtcgtgccacgatccacccacagaaggagatccctggaccggaactcagcccactggaacggttcctcggatcggtgttcatgcgccggcagctacagcgaatcatccaccaagaagataatttgacggccatcacatccaacgagccgggcgtagtgctcttcaaggccgacaacctgcagtaccaggtgttcctgaatccgaaccacatgcagtcgctgcacatgaaggtcagccaagcgccgatggccccgaccatggacggtaagccaccgtaccagtggccaccggaagatctccaaatcctggagcagttcttcgatcaacgcgtggccgcaccaccgtatcgcccggccgtcgttaccagctttacccggatgctgaatctcccgtcgcaggtgatgaaggacttcatccagatcatgcgcctggatctgatccccgagctgggccagggcaacaagtggaacgtgcaattcattctccgtatgccaccgtcggcaacgccgatcgtccccgttggaaccaccaccatcctgtcccatcggcagaaaattctcttcttcatccaaatcacccgcgttccatatctgccaaacatggagctgaaggactccgtcaccatgctgctgccgatggtttacgacatgaccgtgaaccacactcagctggcggaacgccgagaacagatcatcccgcagctcaccagcgccgtcagtgctcatctgagacgtttcgtcgagtgcaccgtgcttcagccgggcgaatgctctctcttcccggccgtacgggatctgctcatgaacctaaccctgccgaacgaacaacccccgccagggcagatgggcaaccagatcggaacgatgggtggaatggcaccgggaggtcctggtggccctggtcccatgggaggacaaattgcaccatctccggttgggggccaagtcgtatccagcccgaatccgatgatgcactcgccgatgcagatgggaggcggtggccagcagagcaactatggcggaatggttggcggaggggcacaatccggcgtcccaggaggtcccggggccggtggaccgaactgaggttactgaagggtgactcaaagttatcgaaggtgtttaggtctcctaggataagtttctatcatatacacattatattagcgcactgtagattttactaacttaatctaacgtatcagatcatgcgagagtgaataatcaaaacgaagagctcatagtgcataaaaagtaataaagtattcttcgtaaacaactttaaataacttatatcagatgtttagctttaatatacgaccgttgttgaagatatctaacacagacaaacagacg

SEQ ID NO: 695 - DNA, 3971 bp, Aedes aegypti
gtgtacataataaagattgaacaaatggatacgtgccagtgcggatttgatttgaatagtttttgtgtcaacagaatgggaatgtgaaaactattggtatttactgcgatttgacagcgtgagtaccgggcctcaaagtgtcaaaggccaaaacaaaacattctctgttgcgtgggatcgatcaattaatgaaaaatagcaattaaagataccttagcatgtcagaacgccgtggtacgaaggctctagaactatggtgtcgccgcgtcaccgagggctataaggatgtccgcgtcacaaacatgagcacctcctggcgcgacggcctcgctttctgtgcaattatccacaactttcgtccggacttgatagattttaccgcgctgaaaaaagaagacatatactacaacaatgaactagcattcagcatcgccgaaaagcatctcggcatcccgtctctgctggacccggctgatatgctaaaatacgaagtgcctgaccgattttcaatactaacctacctgtcacaatattaccgagtattcagtaatcaagagccaaccgccaccagcaaaaaagtaacagaaaaggaaaccaaatcgacggacggtttggacggcaagatggccaacccaaccgctttcgtaggagtcccgaaacgcgaaccttgtcgcaagtgcggtaatccggtgtttttcgccgagcgtatcagcttcgagcagaaactgtttcaccgttcctgtttgaaatgtgcccgctgtggagctcagttgacgttgggcagcttctacgaaacggaaaccgatggcgagtattgctgcgaaacgtgcccggatgaagaaattcaaatcgccgaacgacgtcgatcgatgtcctccgaagtgacggagtctccggtaaacggaagtcgagaaaacgttcgcaccagtcgaagtagcaaacttttagagcggatatcattttttgaatcggctcctctcagcgatgaggaaaagacgtccaacatggttaggcgggccaagatgagtagctttctcaaggactcgttggaaaagccggacaagttggatgactttaaagaaccagagaagaatgaccaaccaactcgtcttgaggattcatcggacagcgaagacgagccggaacaagaggagtctcctccaagtctaccagcgactgatccgcctccaagctcaccggcgactgaacctgctcccacaatatctgaagaaactaacaaaatcgttgttgaattgactatcgacgatttacctactgatgtttcaagcaaagtagatatggatgaaaacttgaacatacagaaagaatcggatgctatcattgcagagcgtgataactatgaatctcttgaatcccctgtaaaaagtcacaaacctttagaaacttctgaaaaattgaataaggatgttactgaacccgttccgttgcaagaagatgcaactcttcaactggatagcaatgaaaattcgttaaacgaaatggaaaagattgctgtggattccgaaactcctgtggaacacgacttaaaagaggagaaacataaggagcaagaaaacgacgttgaaaaggagaatcagcctatacaagtgcctgaagtaaatgtgatttgcgatgaaaggattgattatactattagtaatccggaagaagtgcctaagaatgaagccattgtaataagtgatatcgcaaccgcagaaacaacaactatggaagatatatcgcagcctatagaaagacaggaagacgaacctacaactaacgaagcgtacccttcggatttgaatccattcggagacgaatccgatgaggataaagtacgagctccgtccaaacccgttcctccagtaggaaaggttagcacaaatccatttggtagtgacgatgaagacgaaacacaaacggttaatgccaaaccgccacgtcctccgcctccgaaaatcaaacctcctgtaccggctaacccattcgacgaagacggagacgatgagccagagaaagatatcataccagtcatcatcaagccttctcctcgtcgaactccagtcccaacgccacgaaagcagcacaaccatacagattctatcagttctatggaaacatcactaatgtcgagtcaatttggaggctcaaatgcttcactggcttcatctttggatagcgcttcagcgtctatgacgattactcgcagaaagaagtcgaaagcacctgatgctccagtagccatcacgaaaacatccactgaaaacttatcccccagtcactctacaactccgcgcaagaagcgcgtagctcctgcgcctccatcctctacgcctaagtcaaatgatacacattctctctcccctaaccctactcaacgactcatagcacttgatagtagtttaataggaaatgattttgatctaaacgagcccataagtcgagcgcctagcaatgattccgtagtctatcgcagaaccatcgttcctttgaaaattgatgacgacagtttgactctggaaaccaccacaagcgagaggcagtgggaaaaaatgaaagacaacaaggaagctcagaaccgcaaccgacaatcacagacttcgccaaccagcacccaaaacgattcctataatgctttgatttccaacaaatcccagcaagggaaatggaagcgacgcaaaggccccgctccggccctgcccatgccgttgccggagcgcaaggcgatcaagatgctcccgctgaaggagatacggcaagagatggacatcatcgaaacgcaacagcaagggctggaaaagcagggtgtgatactggagcagatgatccgcgagcggtgcgaaggcgtcgatccggagatggacatcacggggattcagaccaactccaaggaggtggaagatttgatcatgcagttgttcgagctggtgaacgagaagaacgaactctttcggaggcaagccgagctgatgtatttgcgccgtcagcaccgactggagcaagagcaagctgatttggagtatgagattcgcctgctgatggcacaacccgaacggaacaaaaccgattccgacaaggaaaaagaggaagcactaattgctcggctggttgagattgttcagatgcggaatgaggtagtggactgcttagagatggaccgattgagagaagcagaagaagacatgagcataaaacaaagcatcgaagaaaggacagccagccaacagaaacatggtaaaaaggattgcgactcggaaaaggctgctgctagtggggactcgtcggcgaagctgtcgaaaaaagaaaagaaaaagctcaaagaggcgaagaagctggtcaaatcgaagaaaatcgattcggaaaaggatgctgacgaaaccgaaagcagcaccaaagagaaaaagaagaaaaagaaattcttttctgattttctgcatcccaaatcatccaactgctagaatgttatccacccggagtatcgcaatcttatgataacgcttgtttgtacttgctgcgcttaaatcaatctatgaagtggtatattttcaaaccgatagctttttactcagagttacaaattctgatctgtatgtcaatctgcgagccttgcttagaacaaccgaaacaatcatacattccagttgctgttgcatagttttcttcaatgtcgctgaagaaaatagtaaagaagtagttaattagctgttaaatcatgtcatcatttttttttctttttttttacatatcatactgatttaacaaagtttatgtttttttttgtatcttgtgatcgtttcatttgtcatttcagaaagcatttatatgtataaacgatacatcgtgtaaaaagacgtgtccctagctcggttaagttttgtttaccttttttatcgtttatgatatggaagcctcttttttctgtgcgatatgtgaatatagtaacaataaatagtacacatgtagaaggcgta

SEQ ID NO: 696 - DNA, 1597 bp, Aedes aegypti
atggatatgcctaatcgtagcgcacaggaagagtacccgacttggatcggtttcgtgttcatattcaacctaattgtcggaacgggggcactgacccttccctcggcattcagccacgcaggatgggttctgggatccggcctaatcgtggtgctggccttcgtcagctacattacggttacgttcgtgattgaaacgatggcctgcgccaatgccatccagaactggaagcggctgcagttcattaagcgcgaccgggtgattgaatacgatgaggacagcaatgtggaaacggtcacacagcccttgatcgcttcgggcgtcgatggtggcgatgtgaccgatgccagcatcgagcaaaccccgttgaatatcatgtattgtcggaaccagtactacagcttgtcgaacaagatcgaactgggcgagatggccaatttgttcttcgggcgggttgggcgttttctgttctatttctgtttggccgtttacctgtatggggatttgagcatctactctgctgcagttgcgaaaagtttgagagacgtgttgtgtgcccacaatcattccgccaacgcaacggacaacgacgatattactcttcgttgctgggaagacagtgcgctatctcgattcgacatctacaggctgtgtctggtagtgttcatcagtattcttgggccgttcaccttcttcaacgtacagaaaaccaagtacttgcagctgataacggttatgttccgttggttggcgttctcggtcatgattagcatagccattcatcgacttctcgcagagcagaataatccgccaattgtgccgaagcgcgcagacgtaaatggcattccatacctgataggtacctgtatatattcgtttatgtgccaccactcactgcccagtctgctgactccgatctcgaacaagcgtcgcatcaagtcgcttatatcgatggactatctcctgatttgtggattctatctgtccctggccctgactggaattttcgctttcagcgacatcaaagacctgtacacgctgaactttgttcccaactccgatcaggatagcctgttcctcaaaggaattgaatacttcctggcactgttcccggtgttcaccttgtcgaccagcttccccatcattgccataacgctgcgcagtaatttgcagacgctcttcctagacacgacccagctggagtcgtacaacttcttcctgcggcgggtgttcttcccactgttggccatcctgccgccgatcgtcgtgtgcttcttcaccgagagtgttatctcgctggtgggtttcaccggatgctacgccggaaccggtatccagtatttgattccgatcttcctggtgttcgcggcgaggcgagtttgcgaaaacatgattggccgcggtattgtgaacgacttccgcagtccgttcaagggcaacttttggctgctggtgatcttcagctggaccctgggctgcctggtgctggtcacgatcgatctcatgaagtagggggtaaaggatgatgtttcatcgtcaccgatcgctatgatcgatatggattactgaatgtaataggtatatacctaataaaagt

SEQ ID NO: 697 - DNA, 3343 bp, Aedes aegypti
gtatgtgtgcaccgtcgaacgaaaagtcgcgtagttaaaaatccgaatggaatcgaagcgagcagttttttctttgcaacatcagccatcatcgtcgtcgtcgccgcggtccgtcgtcattttcgtcggatgtttgtgaaaaactggaaccatgatctgttccggaacgaacggatccaaacagttttgagattgtttagcggattgggaattgtgccgagtggtgaccagataggttaagtgcggaattttcacggcgaaaagtgtgcagtaaagagctttcctacattatttgaagttgcggggagaagcaaaaggaataagaagcagagggtttttttcggaagaaatcgacgggagtggaagaaaagagaatcggtaacaaaagtgtgtggaagtgaaggaagaatctttcttcggtcggaggctggaaagaagcgtaaaataaagtgtgcgtgtgttattgaagaagagggtgttgctttaggtattattttgctctgattttttctccgtgctgaacatccaagaagtggtgctacgccaccaatcgaattctgattgctcctggattcaagattcagggatctgtccttcaaaatgagttccaacaatacggccaccacaaacagcagcagcaccaccagcagtaacaacagtagcagcagcggatcgaacagcatcgaggcggaatacaacgagatcgagtctcgccatggatgggctttggttttccaggaaatccgggagaagagcgaacaggaagcacggtcgaaggatttttccaccaatgagtcgaaaaagttggataacaggcgattgaatcggtacagggacgtgtctccctacgaccactcccggatcgtgctgaagcgaggcgagactgactacatcaatgccaatctggttaagatggaacgggccgagcgaaagtatatcctctgtcagggtccgctaccgctcaccgttggacacttctggctcatggtgtgggaatacaattcccgggcgatactgatgctgaacaaactaatcgaaaagaaacagatcaagtgccacctgtactggccggaaaagattggcgaagagcacaaattggaactcccggaagtacagctggcaatcgagtacgtcaagtgtgtcgagtataaaaacttctgcaaaaggacgttccgattaactgacatggaatcgagtaaaacacgggaagttgtacaattccactataccacttggccggactttggcattcccagttccccggtggcgtttttgcagtttttgaaagaggttcgagagtcgggagcgctagataaggatgtaggtccaccgatcattcactgcagtgcaggaatcggccggtccggaacgttttgcttggtagactgctgtctagtgttgatcgataaggaaggagaagacaaggtggcagtacaagatgttctgctggaattgcgacgataccgcatgggactgatacaaacagtagatcaattgtatttctcatatcaagctatcattgaaggcatgaagcgtatgaataattcgtcattcgaagatttcgaagagctgtcggtggtggtaaccaataatcaggtcacatcggatcaagagaatgacgataccccaccgcctttaccgccacctcgatcgcactcgcttacaatcgctcagaaaccgttgccactgattccaaacagcgaaagtgtccacgaagatttcctaacgtgcaacgagcgggacatggttaacaatttggtgaacctagaaaagagtaagcaatacgagattagtaaggatcgaccgctgccaccgttacctaaggactcgctggagaaggtacacgaggcgaccagttcaggtgatagtggcgcgtccagtagtgatgaggacgagcttattgaggaaaacgatagcgaccaaaacggtgatgacagtgaggaggacaatagtgataacatcgaaagctccgtgttagacgatacaacgataaccagttcgtcctcgtcggcaatgacttcaacgtcgacggccacatctacgacattgacaacgacgaccagtgcaacagcaacggcagccaacagtaatacatcgacgttggaatccaaccgtggcggagaaaagttcgatgccaatgcgacgctgccaccagtgccgaatggtgtggacagcaatagtaatagtgccggagaggaagcagtgtctagcccagagagaggacaatcaccaaacgccgagctgcgccgccggaaacgacttgagcgccagtccgcaatggaggaaaagattcgggaaatcaaacgcaagcagaaggaatcggaaagcaattcgccgaaaaagcgcaggaaacaaatggaatcagagaaatgatatttgcaaataccatggaaaatctatttcatatgttacatctaaaacgatgtaagatttcggctacagaaaaaaattagcagcccagcaaggacaaatgaattgttaacaataaccgtaaaagtgttaatctatggacagcacaaaatgtagtggaggtattcgcgagtacctaggccgcagaaaagtcatctcttcatcagcattcacaaagctcaacaacagcaggaagtaaaaactacagcggtatgatatagggaaagaatatcgataacactggctgcagaaaaaaaacactcatataactaggaatcaaagactgcataatttgtatcgatttataagtagagaaaaacatattccataataaatagtcgatcatgggaaagcattggaaatgagaaagttcaattacaatacaccacaccacaataaataaccattaccttctaatgaattcgtttttgaaaaacatagaacgaatcagcaattcgatacggttagggtaggttcctctgatacattacagtatattcctataacaacgtgaaggcacattttttggcattcaggtattgaaggtaggtttaaggcttagcaactacaagatagatttgggatagtggttatagcggtaggatttattaagtttaccctaattgcatattagactagttcattgatttgtagactttgcgttttacctcacaaggactcgttggttacagtgtgactggtattaggttactttattagtgttgtcatattggtacattcgatttatgcagttttaatccaactctggtgaatgatttgtagcaaacattttgttttagagataaaagctcaaagttgtcccgaaaataattgtttaacaagaggagaaaataaaggaattgatatttcaaacagttatggttacgattataattttccgtatatcttcttcgtagcagttttcgaaggtatt

SEQ ID NO: 698 - DNA, 1398 bp, Aedes aegypti
atggcgtcctgtagccgtgcgcacgccatcaatgcggtgttggtggctggatttctgctgatactgctcaatctgctcggctctcgatgggactccgcaccgataggtctgccacgaatgggaacaacccaatggccgaaacgcacaaggaccagttccgatcggtttgttcaggtccacgcgccacatcagaaccgaagcatcgacagcagaaacatcagcaacaacgtcaacggttcccaccagcgtgagctgcatgcgaaccatgaccctaactacaacaatcagtccgcgccccggcagccaaacaaatccctcaacaataatgatattcctgttaatcaatcgtcaaaatctcaaaagttcaacgaatctcaaccgacgacggcgggtaacagcagcagcagcagcagcaacgatactaaccctagcttaagtagcaaaaattccactagcattagcgactacagtgagaatctcgtagaagttcgtcagcagcaaccaaacgaaacaatacagactgatggtagcggcggtggtggcaatggcactcggcttatcgatagcctggtgagaaagctggcaggaaatagctgtccaccgattccgccgaatttagatggtcccgtcgaagtggacgccaccttcgaaacgctttcgtccgtggagcaaaagctggccaccaagctgcttcccggcgggcattatattccccgtgagtgcacagctcacgaccgggtggcagtgattgtaccctaccgggatcgagaacagcacttgcccgtatttctgaagaatctccacccattcctgatgaagcagcagatcgagtacggtatctacattgttgaacaggccgccgggtcgcagttcaatcgagcatccctaatgaacgtcggttttgccgaagcgatgaagcagaaaaactgggactgcatggtgttccacgatgtggatctactgccaatggatgaccggaatctgtacacctgtccggatcaaccgcggcacatgtctgtagccgtcgacacgtttggcttcaagctgccttatagtacaattttcggcggtgtatccgcaatgactgccaagcagtttcgtacggtgaatggcttctccaattcgttctggggctggggtggcgaggacgatgacatgtccaataggctgaaacacgtagggttccacattgcacgttatccaatcaatatcgcacgctacaccatgctgagccacaaaaaggaaaaggccaaccccaaaaggtacgaaaagctcgttaccggtgcgaagcggttcgacagtgatggactgaattcgctccattataaactgatcaatctgatccggaaaccgttgttcacctgggtccacgtggaaatttcacaagagaacagctga

SEQ ID NO: 699 - DNA, 1474 bp, Aedes aegypti
atgagtcggaagaatgaaacggagcggcagaagcagatccaggaaaaatgccaaatgctgctgacgaagatgctgcgggacgatgacaacaagtactgcgtggactgtgacgccaagggacctcgctgggcttcgtggaatctgggcgtgttcctgtgcataagatgcgctggcatccatcgcaatttgggggtgcacatctctcgggtcaagtcggtaaacctggacagctggacgccggagcaagtggtatccttagagcagatgggtaactcacgagccagagcagtatacgaggcactgttaccggatggcttccggcggccacaaactgattcggcgttggagagtttcatccgtgccaagtacgaacacaagaaatatctggcacgagagtgggttccacctccgccaccaaaagtagactgggacaaagagattgacgaggaaattgagcgacagaagcgcaagaagaaggctgcctctagtgggggaaccatttcgctgggcacgactggttcgttgggaagttcgtcagataagaaaagttcgaccagttcaaactcgactacggcagcggttccattgccaaaacttaaagctccggccagcagtacgaaggcgtcaagcagaaactcgactgaaacggcggcaagtttagctgctaataatagtcagacctcatcagatttgttggggttgtctttgggaggagatgtaactccaaagaagacaaatggcgagagcacgctggatatcttatcgagtggaggaccggataggccaagtgaaaaagccgctggcggcgatgaggtctcctccaacttggcgaaagaagaggctgactttttcaatcaagcgcctagtaaaggtactgatgcgcagggaaagttaacaaaggacaaaatcatggctctttacgggtctgcacctacgacaatggtgaacaacaattttggaggagcatttggtaatttcaacagtttccaacctaacgcttaccctccggcaccaaatgtagcgatgaatccttatcagatgaataacggtcaacctgcgccagcagctggtggatttggtgccttccaggctttccctacggcaaatggccagtacatggttccaggtgctgcgacggcggctccaaatatgcaagctgctaacctgatgtataatggaccattccaatcggctgctgtgccgacgacggctcagtctcaaccagcattcggtgcaattcagtttcccaatcccctgcaaagtcaacaagtgccgtcagccggtggcttcgtcggtatgaccggcgctgttccagcctttgcaaactttcccccgcaaccgacgcagactcaacccgacaagttaagcaatcagttcggtaccatgaacctacgagacgtgtggcaataatttacattaatcaaatcctgatttacttatgtgtatcttctggaacctccgcagacttattttc

SEQ ID NO: 700 - DNA, 7526 bp, Aedes aegypti
ttctcgaagctctctctcgggccgtaaagtcgccatttttgtcctacctctccggtttgtacgtcaagcctttctttcttggagctgggttggagtttttcaagtgtagaattcccgttgaaaaagtgattttcggtgattggaaagtgtgctgggggttagtttggaccgggagggacaattttccggcggaaaagcgtggattccgagcccggtgcgaggtgaatttgtgcggttggaaaagttggcaaattgcaccccttccctcaagttttcttccagagtgggaggagggtgacgaagaaaagaagaagaaaaatccctgtgtttattaagccgcaatggtggccaatggctaagcggggaatcggctgcctttctgtactgtgaggaatttctgttgttttttaattctgtgtgtcgatttacgacgacctggtgccggatttcgaaaggagagcaggaaatcggaactggggcaaaatgagtgactccgacgatgacatcatggccggatctcgaagcagccgtcgattgcggcgcagaacatcggggccagttgctgcttcttctactacgtcgggaccatcgagttccaggggcaccagagccaccaaccggagaagacagctgcggattgatagcgaccaatcgtccggggcagataacggaagcagcgacagtggaagcgaaattgaacaatccgcccggaagaagaaggccaagaagttcgtggaggatgacggtggcgaggcgggaccaagtggaacgcagcagcacgtcgtcaacgatagctccgagtgggaatccgactggaacagcgatgaggagcaggcattactgaatactggtggccaacaggcggctgcagccctggtcagtaagctgggctacgcttcggactcatccacgagcagcaacgaaagcgaaaaatgtcccatctgtttgctgtcgctgaccgacaaggagatcggtgtgccggaagtatgcgatcatatattctgcgcccgctgcatcgaggagtggtcgaagaatgtcaccacctgtccaatcgatcgcaaaaacttcgatgtcatcaacatctacaaaagcgtcgatcggaaacaattggtccgtaagaacgaagtccaggtgaaggcggcggatgaagtcccactcgttgaggatcatgagctgaccaattgcgaagtctgccgccgaccggatcgggaagattcgatgctgctgtgcgattcgtgcaatttgggttatcacatggattgcctgaatcctccactgacggaaatcccctccggatcgtggtactgcgattgctgttttgcttccggttccgacgaagacgatgaagaggttgaagatttgctaaacgacctcgacgagatcggaggagttcgtcaaacacgtctacgcatgcgtatcaatagtcctccaaggattgtccgtaccagacaaagtgaacgcattcgtgcaacaattcttactcgtacttcaactgccgtcagattgaatgttatggaagatctggatcaacccggtccttcgactagaaccagaagtggcacagtcggctcttcaactagagcgactgcagcgccggcaagaacagttcgcaggcgccgtaagcgtcgaacgcgaagaaagattttaagaatgatcatctcagagtacgatgtggacaacaacgatgagaagtttgctatcaaaagaaagaagatatacaacactcttaaaaagctaagcaagaaacgttctaaacgtaaacgtgcatctcacaaaagtaagacggctgaagtaacgcccggtttgaatgaagaaggagtagatctacagcgtcagcgtttcagcactggcattccaacgttgaagatctttggaggagccaacgacttggattacttctctgacgaaaatgctgacgatgacattgaggcggatgtttcgcttggtggtcgaggcgaaaccgccgtttccagcattcgagcaacacttcggaatcctctgggacgtagacgagttctgaaaagtggcttcgaagcaagctcaactagtggatcggttgacttgctcggcagtattatggagagtcaggaacgttggcattccaagaacgggctgggagatgtcaaaatcgataatggtaaaattatcttcaagaatgatagccctcaaaagaaagattcgaatcctccaggagctacccaagctggaattgggaacaactcgcaaggcagcgttagtgtaccagcatctagtactggggcggctgattccacaagttccaatcgtaatgggcaatctgccgaaaccgaaagtgcatctggattcgccgctacgagctcgacatcgggaggagcaggtggtggcaatgaggaaaacactgacagcgtcccagatccatcggatatgtccatctttgttgatctgccacctctgaagaatcctggtgatgaggatgaagatgaaaagaaaaagaagaaggactcgtttgacatgtttggatcggaacctattccactgccttctgcatctgcgtccgcatccaatctgccagcggtcaatcctgccccagaaagtactactgcggatgatggccctgccccaggcacatctaaaggatttggcaagttcaaatacacaatgacttcagaagcgaataactgcccgaatttttcggtttattcatcggaaactctccagtatgccaagactggtggcgaggaaccgtacgatccgttggacagtgaacaaaaaaccgatgatgagtttgaagaacgtgacgaggatttggttcagctggacgacgaagaacctgcagtgcagaagccacacgatactcccgctgaaccagatcaggagcacattccaaacggaacggataagcttccagttggcgatctggatcacgatgcgttcgattccgattccgaagacgagctgaaaaagattgaagaatcatccgctcccattggccccgaaccggaaccgaccaatgaactggaagcgttgacaccgcctctcactacaaccgtggctgctgctttggcctcctcagggacacaacctgtcacaacgactgctggactccagtcagaaacggtggttgtgggcgaagcaagcacaaccactaccagcgctgctccggctaactcggcccagggcgaagaggaccgcagctacactccttgcctggacgaaaagtaccaggaggctcgccgagaacaggacaagagtggaacaacgccaacacttccgccaccatctcagaaggaaggcattgatggcatggatacggaaatgatttccgatgaggatgaaaataccttcaaggaagatgaagcccggccaacatcggcatcgaagccatcatcttcgggtgctagaaagaaagatcttaccttcaagaaggtaaacaagaaaggaaaggaacgtaactatcgtgacaaagaaaccaagaaacgagacaggaatgacaatgacaaggaaaatcacgatcgccgttcgcgagagcgcaatcgccagcgtcgtcccaagaggaaggaactggaacgttatgatgtccgcacggtgattgagaaacgcccaagggtcatgaaggatcccttcggtagagatgttactccgagaccccgttccaagactcgcagtcgtagtcgcacccgtagccgtactccggaacgtcgcagggaattgtccatttcattgagtccagagcctccccgacgtttcaacagacgacgttcgccttctccaaggttcaggggaggaaggaatcgctcaccgttgccgttccgtagaaacgtatcaagatcggtatccagaggtcccagaatgcgatcggttagtagacaacgatcgagatctccggttgttgcacgaccacgcttgattacaagatccatttccagaacaccttcccctcctccacgtgctcgacttccacggtctgtttcgagaacgcccaaatcacgctcccgtacaccggacattcgaggagccaaaacaaagaagaccaagaaaaagaagcgtctagcttcggccagcagaagtcgcagtcccagtgtggatcgtggaaagaaaaagaacaagaaaggtcgcaaaaagaagaacaaacatcgcagccggtctcctggtggtaaaaagaaaaagaccaggaggaggtccgcatcacccatgatgtctcgatctcgctcgcgatcgacgtcgattcctccggcgcaaaccaccggagttttgaccgagagatttgccaaggtaaggcagcagaactcttggactcctccgccaccggtcagaccgaaaacaaacggtaccaatctgacggtaattctaacgaacgaagaagcattggctaaacaagcaaaggaacgcgagcgaaagcgcaaagaagctaggcgccgtgatcgggcacgtgacaaaaatctaccctcgaaggaagtatttacatcaggtgataatatattagttagtgttagttttaacgacaaaaatttgaataaagaaaatgaagcagccgctgaaggtgaagccgctgcgataacacaaaagagattgaaagacatggccaagaagcgagccgaagccgaaaaggccaagcgaaggcgtttggagcgattgaaaaagactcgcggcgaagctcccaagccagttgtaataatcgacctcgacagatcaccgttccgcgtaatgacgccttcgcccagagcggtaattgtcctaagtgacagcgataacgagaaggagaaaaaccgtcgggaagccgaggcaaatagagctggtgcggttggcaatcagcaagttaatgcagaatctagtactaatggaccgtcttcgtcgacgcgaaaatctcctgccgaacgacacgaagaagacatgtttggtccaaaaacacctcctggcttcccgagccaaccacagccctcgcagagcaaacctcaggcgccaaagttttccatgcaagtcaaatcgaaagcttcgaatattcgtcctatgaatctcctgtacgagccaggcgagctggatgaaggcaaaactccggagcggatggataatgctgaaagctcttacagtatggttggcccaaatacacctcccgaaccggctccacaatctccctcgccggatgtgtatgatccgttcgaacccacgaaatctccttctccgtcgccgccacgacgtgacaatgtctcgattgagcgcctttctgatctggacgatgctgttctcccatccagcagcggaaaaccagacggccccgactccggtactgtaggtgacccgaaggctgactcccaaaatcaagacgaagcaatgaatggtgaagccgaagcaccccgaggcaacaaaatcacaatccttagcaacattgtcattagtcaaccaaccaatagcgtatcgggcgtggtcagtggatccggtgtggtttctgccagccaaaacaacggcggagatgactcggatgtgatcttcgatgactttgtgtcatcttcggccccggttcccagcagtaatgttggttacagtagtggcaacgccaatcagtccaaccccattaaatcctacagcaccgcagcaaactcatcgagcctgatctcgaaactaccactgccaccgggagccactgccggacagaagttcaacgacttcatcaaccctaccgattcgccgtactctcccggggcaagtgatttcgacgatctgttcgaagcgggcggcgagttggattctccccctcccgcaccggtcaagcagtcctacaaacccacgaagattctttccaagggagccaagaagggtggcggcggcaccttcgataacctgtttggtggttcgcctgcgaataacttcaagcggggcaagaagagcgcacacaagcggaaagccaaggcgaagggtgacgatgaggaggatctttctaaattgtccacgaaggataggttccttaagaaattgaaccgactagaaagagtggtggaagaagtgaaacttgtcatcaaaccgttctacaacaagaagcaaatcaacaaggacgaatacaaggacattatgcgacgcgctgttccaaagatctgccacagccgcacaggggaaatcaacccgatcaagatccagaagctgatcaaggcgtacgtccggaaggttcgcggcaggcgacgattggccaagaaaggcggtcttcccggtggacccggtccgctgatggcgcccggtgcagcgaatccgattctcatctaagcgtggctacgcgaagaaagtttctgcaccagtacttcgaggagaagcaaagggtttccccttctttccgtaactccagcagcaatataatccaaccccatcaaacaaaccgaacacactcaatcatacacagcaacacataccctattcccgtactgactccacgggatggtagcatgaagaaacagtgcaagcaagtgaaaaatttggtaaaagtttccgtttttactttatttttaatctcgcgaggcgaacattttgatgaaaggggaaaatgtaaaggctaggcagtacagtcttgatgcatccgatcgcgtttgcgtccgttcagtggaagattgcatgaaatcttgtgaacagatttttctcctgttgtagaaaactgacacttttaggcaagaggacaaatgcaaatgattgtttaaaaaaataattgaacaaaattattgaataatgtgaagaacaagcatctacttgaagcgtaagaattccttatcgaatgaaacgactagttttttttttttgttgtatagagttaagtaaaaattagaacacaagatcatgcatcaaattcactcataattgtggtagaaagttgctacacaagaaagtctagtaaaaaagggtatttataacaattatcataataaatatttattgaatatacaacaattactagagttaaatgtaagtcgagtagattgtgctaattatagagaatattctcttattaaggtacagtatccgtgtaaagtttgtccaattacaatctagctattgtctgaagctaactaaattcacaaagccctgtttgttattccttcgatatggtcttctgaacatcaaaggctccgaagagccgactggaatgtgctattccagagggcaacacgtgcaaatataaaaaagatcttttccacagtcgtattgaaccacccttgcttgacgtgctactcagcgtcattcattcattttgatccgtaatcacacagagtcttcaccaagcaaacggccggcagttggtaaatctgtcgaagttaagcctacttattacagtagatgaacaacaagctaccaattcacacatcccatgcgaacgcgtccgttgatagatccaactgactaaaacagccgtcgtagggtttaggcgtaaggtttagcctatctaatactactacctactacaattaaaagtgagtaattttaaatttgtagtattgcctatgaggaacatatgaattcatctaaatacacaacagaggaaatgctaaataaaaatacatagtttaagaata

SEQ ID NO: 701 - DNA, 5145 bp, Aedes aegypti
tgttactattcatacactttttgtcataattctagttattttaacaacaccctgcatcaagtttgtaacgacctatgttcgaaaaaaaaccttctatcataataacatgtgctgatattatgttgttatgtatccttagtcgggaggtaaaagaactatcacttttgaagacacgtaaagatattctcacgagttttgtgaagacactccctggccagtggaccccctctccatcatcagcatgttcgagtagtacactgaggattactcacgacgattgtgctgaagcctgtgtagtagttgaaagtttattgataacgttgcgattcattaaaagctcgaagcgggattattagagttcgcttggggtatgtccataaactacgtcaactattcaaggagactgcgaagtgtgcgaagataactagatgttccgattctgatcttcggaatataaagatgaagctaatagttcatggataatccctaattgtttggtaatgcaataaagcgggattcattcattccattgaatcgaagttgtttaacgctggatgagtggtcagttaggaaaactgcgtcacttggagcgcacacacttgcactcgttcgctattctatcaatgatagggattttattggactgatgttaaatttgagaaaatggattctcagtggattttttatgatgtttgtaagctcagctttccaatgtcgactgaactcctgtccgcgtaagtacttcggattcaaatccagtgaggaaatattgtgacggattgacattcattcaattgaatatttcctatgtgccatcgaattgcttttaaatggtggagtagaactattgaatcatactttttgtgcttccatgtatttaagaaaacaggcaaaagcatttcattgaaacattttgatcagattgtctcaaaattgtactccatatatttcattgaagtaaagctctcatcaatcattgtaaattggctaattttcctaacacttttgtaatgcgttatttaacagttgatttaaggcatgtcgtaaattaatttcttactgtttccatgttactattctttatgtttcgcttttgcactactttacgtttaaagctgttacctaatccttaatgtaacactatttaattacaattgatctttttattcggtcgttaactgtagtcttgaattgttctctcaacaaaacgtaactaattctgtactatccttgtcgacgaatgggcaatttgttgtttcccaactcgaaacagccgtcacagagttcattcgcaagcctcgaatcaacggaacgcagcacatcaaagagggcgacacgatcgagttgacctgcctgttggacgttgccgatacggttaaatttgatatgaaatggaagctgcccaacaagcgtttggccgtcaataattcccgagtaaccgtcagtcggatgtcggtcacttcggacccagatcatccgggctacctggtgggtcaattgagtctaacgatcaacggagcattggtgagcgattccgggtactaccagtgtgaagtgaccgaccacaactcccactccaaccacaagtcggcccaagtgcacgtcgtcaaacaggccgacattggcttcatagagctgaccgacgacaacaagctcgacttcatcaacatcaccagcaagcgagacatcaaaatcgtgatcaagtacaaggccgttctccagccggagttctactggaccagagacgatcacccggaaccgctggaggccggcgaccactactcgatatcggaaaccaatcaacggattacgctcaccatcaagaagtcgaccatcttcgacacgggactgtacacgctgcatgcgcagaacgaactaaactacacgacctaccccatgaaggtgtacgtaagggataaacctgtcgtgtcgatcaacccgatccacgcccggcccggcgagaaggtcaccttcgtttgcaccgccatcgcgtatccccagccagcgatgcggtttgccttcatcccttgcacggaaactccctggaagaactgctccaagtcgctgcacaaagaacacgtcaaacactatggcaaacgtctggaggaaggtggtcaccagtcggacatcatcactaccgagcagtatgaaatgcaagccgaaaccgcagggtatgtcggatgcctggctgtgaacggctacggagaggactttgtgaaggccgatctgctgatcagtgacttgagcaaaccggttgtgatcgagaagctgtctcctgacgaggatgtcaccatcggcgatgaagtgacgatcgaatgcgccgcagtcgtttacaatcataccgatgcgattgacttcttccgcgatggtgtcctgttgagcgggttagctggaattaccatagagaaggactataaaacgttcgcctatcgaacgaagttgatcattcacagcgtcggcaaagagcatcaaggggtgattcgatgccaagcgcagttgatgaactcgaacgaattcgacgaagatgagctgatgctggaagtgtacgaaccaaccgctccagtaatcgtagacgaacatgtccacgaagaactggagatggagatcggtgagcggaacacgttctcttgcaatgtggagggaatgccgaaaccggtaattgagtggaccaaaaacgacgagtttgtaatgtttgataacgacaccttagtgttgctgcccaacggaagcatacacatgccgtttttgaaagtcgacctctccggtgactaccggtgcttggctaggaacaaagttgcccaggcggaaaagatttggagcctacgagtaaaaaccgtcacgatcaaaaagacctgggtatatcttatcatatccatgatactcgcattggtcatcgcagtcgtgctcatctcaatgttctactgtaagaaaaagaaggaactgaaggcgatgaaggcagctggaattgaggacttcgacaaaggtaatgtagagcagatgaatccggagctagcgttggacgagcaagcggatttgcttccgtacaagagtgagtacgagttcccgaaggagaagctgaagttgggcaaacagttgggagctggggcgtttggtgtggtgatgaaggccatcgcttccgggatcatggtcaacgaggacgaaactgtggtggccgttaagatggtgaagaagcaaacagacaatgaagtgatgcgggcgttgatttcagaactgaaaatcatggttcatctgggtcagcatttgaacgtggtgaatctgctgggagccgttacgaagaacatcgccaaaagagagctgatggttattgtggagtactgtcgctttggaaatgtccagaactttctgttgaaacatcggccttacttcatagatcaggtcaataccgagactggtgaaatcgactcgactatcgacacgaacaagcttcggtggtcagctgcgggctatacttacaacagtaattcgactgcctacccaaagaaccacctaaattccaagggttacgtgagacactccggtatccagaatatggccatggtcgatagctgtaacactgaagcgacaatcatgacttccgtagacggttacgacctgaacacagccgacaccgcaaacaacacagtgaactccgggaactccaatgagccactctggagatcaaattacggcatggactacaaaggtcctgctagagccgtaaccactacggacttggtatgctgggcatctcaggtggccagtggtatggaatatcttggctccaggagggtcctccatggagatctggcggcccgtaatatactcctctgcgatgacaatgtggtcaaaatctgcgactttggtctcgctcgatcaatgtacaagagcgaaaactacaagaagaaaggagaagctcctctgccattcaagtggctagcgttggaatgcattagcgataacgtcttcggcacctactcggacgtgtgggcttacggtatcgtgttgtgggaattcttctcactggcacgggtgccctatccaggtatggaagccaaccaagaactgtacaacaaactgcgcgacgggtatcgcatggataagccacagtacgccaatcaggacatttacgatatcatgctaaattgctggaatgtgaagcccgattcacgaccttcgtttaaagatctgaagagccggttcaacgccatgctgccggaggaaatgcgaaatcattatatcgatctcaacgaaccatacttggctatgaatgccgagaaggatcagcgaggagaacccgactacctggctagtttaggaccgccagaaggacaggcacccaaagctccgccaaactacgtcaatggaatcatcctccccttacctccaatttctgacaagccggactatctccaaatgaccaagtccgactcggatgacatccacttcgattttgcctcgttcaacaacagccaaccgtccccgacgctgaagaacaacctggactccagtccgcagcagggcagcaaacgccacaagaagaaggccatcccggaggagatcccgatgctgcagaaccgttccggcggtagccatgggttcaactctgactcggaaacggaagcgaccagtccggtgccgatggttcgcacaactaagcttgtacatccggagcacgagtacaccaatgtgaaacttctggacaagccgagtggcaacggacacagcgcgaccaccaatgggaccgattcggatgcgttcagtaatcccgggtatgtggtggtccatgcacccaacgaaaagagattgaagtagattttaggcgtcactccccgggacgggaaggttttacttatcttggactgagatcgaggacggatgtcgaacgtacgcttgagtgtgctttgaaaagatgaagtattttaatagagcgatgcaatctatttactacttgtgggagagtgtgtgggtcttgtgtgtatgtgaaacgaatggtttacggacaagagtgattatttcacactcgctgcgagtggggaaagcttttaaaaatgttttctctcatattaatgccttaaatgttttagaaactattggatattttactattatagtatataataattatgtgtaaattattcgatcttt

SEQ ID NO: 702 - DNA, 4301 bp, Aedes aegypti
atgaagatcatggacaggggaagttgttggttcgatacacggccaccatccatcgtattaaacaagcgcagtatgcacgttatggaagagggcagcgatgcgctcgtctgctccgatgccgccaagatagtcagtctcaagtcgaccgtcagcagcgtgggggtgagaacggctcctgaggaagctacaaccattaaggatcacaaatccaaggaagaacaaacggttactcctaacgaagtacagcggaaagaaagagaggaagcagtggtgacatccggtgatgccgcgaaagttgtgagtgagcataagaaggacgatgaaaacaaggaaaacatgacagtaaaagataacgcaaaggaagaacaccgtcgggtggaagcagaagagaaagtgaaaaccagagacgaagaaagcattgataagaaagaccgggaagaggaagatggcatagcagaggatatcatggacagtattgatgatattgtcgcagatgcaaagaagcaaaatggctccaggagtgctgtcgacttgtcatcgtcatatgacaccaacaagagtgatcaacagacagatgactcggatgctgtggaaactatcgacagttctccggaaaaggacatgagcaaattcgagaaacctgcacggaagccagaaccacttcaattggacaataaaaattcgtccgacagtcggactagcagcactgaaaaccagatcgtcgtcaaaaaagaagtcgaggatgattccgaggataatcaagaaccaactacagcaagcgcgaaaaagtctagtcctagccgaacagaaaagcaatcagagaaatcacgagaagcggatactgtttctcgtaaacgtcgtcgttctgtagaacaagatgaagcagaagatggcgatgaacccctagttccttctaaaaagcttaagcgagagttggaaactaattacccaacgcatgatcgactgctgaaagagtacatcgaaaccacttccaatcattcggtggatgacatccagaagcacaccgatgccctaacggtcgaaattcagaccttaaacgaaatgattcgtgccaaagaaatcgaatggaacaacatgatccatttgaaaaaagtaaaagaagagatcctactccggcttacgcggaaaaaacatgtcatggatgttatgcataccaagctgggagaagtctctgagtattcccacttcgattcgtcaaaccttaccaacgtgcgatcggcctctgtggggccacgtcccccaacacctccgccagaggttgatattcgtcccgcttccgtgacaccgatgcacagcagcactctcaacaatagcaaaaatgctaacgtttcaatcaattcgatctccggcagtcggcaaattcccggcagcaaagataacagtctgtttgctcagttcaatcacagcaacagctccgtaacaatggtgccattgtcaacgtcctcctcgttgatcacatccacgaatacaattctgcaatctcgggctaacatgaagtcctccgaagtagccaaggaaaagcccaatgctgcccaaatccagcggcagattcttcccaaaccggtgctttccaaccaccagcagatcctgaacaacttggccatgtctgctggtcttacagccgctggcaccactagttcaggtgctacgtcgatctcaaactcttccaccacggctactgttgccagtgccgctaatcttcttgccggattgtccaataacatccttgcggggttgtccgctcaaactgccgctcttctaaatggccaccaccacccatccgcatccaaccatctcagccaagcacaagccaatcagctgcaagtgggtcgacaaggcgtcatcaaagacgttaaaagtattatcgctgactatcggcagaagcatccggagcaggtgcctcgtcgagggcgccgcctgaagaatattcctacatctggttacgaaggcatcactatcaccaataagagcggatcatcgcgaatgccagaacttggattcctactaggagagaactcccgtccctctagcaacgattcgtcccaaagcaattccaacaaccagctgccctttgctggtggtctatcaacctcacccgcggccggtttttccatcagcgatgtcctagcgcagtttgccaaaatgagccaaaccgatcgcaacttgctgtcgaatctaacggccgccgcagcagcagccgcagccgcagctagcagcgcagctaccgcaacctcatccactactacccattcttcatcttcttcccaccaacagcagcagcaacaatcccaacaaaactccgttgcttccaatctgagtaaaaattcatacccggaagtgaccctgcacccggtgatgaattccagctccgcaaccggttccaatgctgaccagaatcacagcaccggaagcaattccggcagtggcgttaatcagtcgcaaaacaccagcagcaatgccaactcgaccaactcgctgctgcacggcattctgaccaagtcgtcctcccgtcccaatgcggccggtttcacgtcgttttcgcccacgttggcccgcctgttgacggcaccggaacggatgaactcgcaggccgctaccgtgacgtccggtgcgttggccaacctgcaggccaacaccggcctgaatctttccaagtcgaacagtgaaatcacgatcactccggtggtggcctcgaacctccagcagtccctgttggctcaccagcaacagctacatgaacagcagaagcagctgcagcggttgcgggagcagcatttcatgagcatggacgacgaagccgacgatagcgtggatcgcttggtgatcgatgagggtgacgatcatcaccaccacggaacggcaaacagttcgcgtaacgagggccatcgcgaatcgggtgtagttattacgacccgcggaggcaacgggcccgagttccacgaaaacgaagtgccagaatgccagggctgcaagaagcgagaggcccagttcgtgtgcgccggctgtggcaaccagtggtactgcagtcgggagtgtcaggtgaacgcctgggatgatcattcggaagtatgcaccggttaaagaagcaccgcaagcatcagagttcaaagttcctgatgaccaggtattactttacttttttatctgaaatgaccattgaattcaactagacaagagacattcaaccggcaagcaagctatagctaactaagagaataaagtgcagcagtggctgacgctgcaccgtcagttatcagtatgaaacgacatgttcttaaattttaccaaactatttcttctattctatagccaatcatagcttaactccctttgagacaactctttcaaacacaaactctacgaatgcaaatcttgacacatgatcctaaatcaccagaaaaaagttcaatttctccattttgataggttcctctgcacggagattcaaactcccagcatagatttaaaatcaaaacttatttatacaaacaggacatcaaaattcaccactagcaaataagttgcattttgtgtcaaacaggcataacaacctttgaattgtacatcgatatctccattcagtttatttcctagttttacgaaatttttaatttttgctagaatccttggttgaacaagtgaatcgtagatatctttagtgttgtgtaggaaaactaacaaccacaatcatctgtattcgccgagaacgaatagtaaccagcagtgtaagattctaacagctaatgaaaaaaaaagaaaagatggaatagagtaaagacgccgcctgccacagagtgcgctgcattcccccacatggcaatacagttcactaaatggtaaatttaacactaacatttaatcaaacgcatatatttacctatcactattgaataattagaagatgcacactgactaaaagtgaattgctaataaatctgataaataacaaaaaaaagatctagacttgcgctgcgagagggtaagaaatacccccgaatagagcaaaagagtaagattacagaagcattgtaacttatcgcggaaatagtacgtatagttgtcaccgtaggtttttttttctcaagaaaatgtaagatggtttaaaaaagtaataaaatgaaagcgagtaataaacgtgagtatgtcaactgagagcgcagtcgtctaaaaacctagacttaggatcgaggatcagtatgtatggatcggaggagatgcagcacttagtaggtgttaatttcaacagaataaaacactgcaagagaaaaatgattagtaag

SEQ ID NO: 703 - DNA, 732 bp, Aedes aegypti
gttggatccacttctgtcaacatcactcagtcgatcttctgggttgatgaaaacgacaagcgctcacacttgctagatctactatcgaacatcaaagcacagaacgaaggcgacgagaaagactgtctaacgcttatcttcgtggaaaccaagaaatccgctgattcgttggaagaatttctttatcactacaaccaccctgtcaccagcattcatggtgatcgtacccagaaggaacgagaagacgcactcaagtgtttccgctctggacgatgcccggttctggttgcaacggcagtggcagcccgtggcttggatataccgaacgtcaaacatgttatcaactttgatttgccagccgaaatcgaagagtacgtgcaccgtattggtcgtaccggacgtatgggtaacctgggtattgctaccagcttcttcaacgataaaaaccgcaatgtggccaatggattagttagactgctacaggaaacccagcaggagattccgtcattcctggaagatatgaccagtgatcgctcgtggggaagccgtggacgtggaggtggcggccgcaatcagcgttatggaggatccagctctacgttcggttccagggattaccgtcaacaaagtagccgtggcaatacccgcgatcagcgaagcggaggtggcggcggccgaagcggtggttatggcggaggtggtggcggctatggtcgtgacgaaggaagctac

SEQ ID NO: 704 - DNA, 1795 bp, Aedes aegypti
atgcattttattgcttcccgaccccagacatcaaatggaatcgataggatgaccaccagcacccccgcccaagcggctgccaccctgccaggagctggaggaaagcataccgtctcttcggcgcccacttctccggccaaagcaggcaccaaccttaccaccagcaccagtttcagcgaacggaacaaacgtttcgaaatggccaacaccaaccgattgaacaaatccttcctaaagccccccgcagcaaccgactacggcttgaatggcactaagcaccactccgaatcgaccccggtttcgccggcgctgtcatccgcttcgcaatccctcagcgcggccaccctcagcggaagctccccgtacgacgtcaaccgaacccaggacaagaagccacggaacatcttcggaacactgcgcaacaagctgtcgctctcgaaaaagtccaaatccctggagaactcccagtacagtccgacgcacgtgcagatcatagcgctcgtcgacgctcagccgcggttcctcgatggatcagccctctcgcggaagtcttccatttccgaatcgtctgccgtgtcgggaatttcgaatgccagtgggcggaccttcgtccacgaggagtccacgctgctgctagaaacgttggagaacaacatcctgcggcattacctggtaccaatcgaagtcgccctgcggcagaaggcctggaagcgcaagggcgtcaagctgcacatctacaatgatcacacattcatcgctaagcatattaagggcggagtcctatgccacgtgtgtaaccgcagcatcctgcgccgtcccggaaaacagggctacgaatgccgcgactgtctcatccagtgccacaaaccatgccacgtgcgaacccctcaggcctgcccgaatccgaaaattctttcggttcagctgttaaaatggccagcccagggcgtttgaaatggacagtttattctaaactcgagcatttaagagcggagcacaagtcaaacgaatcatcactagagcttttgttaattttactgtcagacgtttagaagaaaaaaaaaactactttcacaaaactcgcctaatgttatacacaaacacacaatcgcagccacgtttttatgacgaggcaacgctttagccatttctctagaaatctcttgaaaatcagactaatcgaaaaaaaaaattgaaccaaaactatcggaataccttccagacatgacaattcagtataaatagcgtgaattaaaactgtttaacgagaataaaagccttaaatcggtgataggacataaaatcacggaacacgttctatttattgtcatccattgatgaactaggcggttcagataaggaacacactctaatcatttagaaggttgtgagaaacgttgtcgtaaggaaccaaatacttatttaacaaacaaaataacgccaatcaaagcaagccgagttgccgaggaaacggtcctaagcattgatatgggcgcaacattgctaacattattccggccgctgcgttcacttactaccacatatatttactaaaaaaagttaccttttacaccataaaacgtttttgctggagttgttgagaaagtcataattgttaaggtgcaaacaaataacggacccgttgttaaagatacaaaaaatgtataagttgaaaggagaccatacgcattacggagcagcatagggattattattcgttaagaaaaatggtagcatataggtgaaacaaatgatttcgagaacgaagtgcaattggtaaagtgatttaattgaa

SEQ ID NO: 705 - DNA, 555 bp, Aedes aegypti
atgccaatcgacatcgttcgcctcacgtggaccgaaaccgacggtcccgctcgttcgacaacagtggcagtagcaatcgccggggaagatccacggaacgtgaacggcgacgatcaccacgaagtggccgttctccggatagacgtcgaacgcccgaggaaaaacacggcgacaaacgggaacgcgaacaggatcgtgatcgtgaacgtgacagagatcgggatcgagaacgtgatcgtgatcgcgatcgggagcgcgatcgcaacggaaggcgtaggaatcgttccagttcgtacagctccagtggatccagatcttattcgagatctaattgcagatcacccgcaacaaagcgtggaaagtctccgaaaaggcgttcgaggagcccctaccgagagcgtcgttcgaaaagccgatcgaagtcgttcgacgacagaagacacggtaaacacggcaaggacagacgagaggaacgtcgcgatgaacatcgtggcgagtatcgtgacaacagagaaagatcacccggatacaactctcattatcaaaggtacgtga

SEQ ID NO: 706 - DNA, 2954 bp, Aedes aegypti
tcccgtgtcgccttaagtaacacaatctgatttcaaccctgcaagagaaaggcaggttgctctcacccctgccggttccagtcagctgtttttgtttcgttccactttcccatccgttcctctcattgacagatctctgaaaccagagtgcaccgctggaagaaaaacagctgtgttttttcactcccaacaagcattttgcatccttctggtgctcgttcaaaaaatgctttgaattttctcaaaatcgtggaaattattccgaaagtgtttttcgttgtgttattagtgtattcctccttctgttaaccgtgtcaagtgctcaaataaggccacaaaatgatgggttgttgtggctgctgctcggccctgcggcctcgctacaagcgcctggttgacaacatcttcccggtcaatccggaagacggactggtcaaatcgaacatggaaaagttgacgttctactcgttgcgatcgccggagaagctggacaggattggggagtacttgtaccaacgggcctcgaaggacatcaaccggaagcggtacaagttcgtggagattgccatggaggcgatggatttgctgctgatggcttgccatgcgcagattctgaacctgtttgtggagagcttcttgcggatggtgcagaagctgatggaggatgtgaatccgacattgcagattatggccacgaattcgttcgtgcggtttgcgaatattgaggaggacacgccttcctatcacagaaggtacgatttcttcatctcgaagttcagttccatgtgctacgggaataacgacgatttggagctacgggacagtattcggatggccggaatcaagggattgcagggcgtgatccggaaaacggtgtcagacgatttggtggagaacatttgggagaagcagcacatggagaagattgttccgtcgttgctgtataatatgcaatcgtcgagtggaagcaaaatcgtggaccaggaagcgactccttcgacgccaccggttctggcagaggccgtgctcagagagttggtttcgagggcttcctttggacatatcagagcagtgctgaagccactgttgatgcatttagataatcacaagctgtgggtgccgaatcggttcgcaatcgacaccttccggatcgtaatgatctccattcagccacagtattcatacacggtcgttgaaactctaatgtcccatctggatcagaatctagcatcgtcaccaaagacacgaacttccctcgcggttgtcctttccaagatcatcgccatcgcagcgggcgaaagcgttggaccatccgccttggacatcatcaacaatctcctaacgcatctcaagacttcggtcagcacccagcacgaatccacaccggaagagacccaataccaggaagcattgatcaacgccctcggcgagttcgccaatcaccatcccgactaccagaagatagaaattatgctcttcatcatgaacaccgttccggacccctcgaagaagaacaagggcgatcagctcctccaaaacatccttctcaaatcgctgctcaaagtcggaacccagtatcgcaccgtgtctttcgaaaaagctttccccgtctccttcctgcaaccactgctcaaaatggctcgggcttcctcggttgcgatccgggtgatagtcatgcaaatcttccagcaactgctcgatcgccaccaaaatcagcaccttctgaacatgatctccgtcaccaattatccgacgctgacggtggagcaagcgtcccgatcggatatccttttcacgcacaagcacgggtcgaacattctgcaggccattctggacggaatgtcccaggagaaccatatggaagtgttgaagtcgtcgtacaataccgctggcctgatggtggtggagatggcttgcagcgaaacggtgcaggagtttctgctatttgtgttgagcgtccaacaggtggccgtagccgaagtggaattatcgcctaaacaccgctgtaacttgcatagcattgccatttcgatactgatcctgattggccgctgtaccggcatcggaccgcttgtggaatacgccgaaaaagtcatccaatctcgtacggaagatgcaccgtatctgttgccaccgttgctggacaatgagaaacccgcacctagcaccctgaacaccaatcagccccatctgatgatagacaagttggccgtggcggagtgtctccaacaggccggtctggaacataaccgagttcagacgggaactccttactccctgaaccaaacggacatgtccgctcatcgccactcgtgggtcgacaccagtgccccccgcaacagcattgttgacgccaactacgacgccgaatcggtcagcagttcgcccggagtccaaaagcgcagtcttccggtggacttcaacttcgagtcgatgaagcgggtcctggcggaaccgaccgaggccaacaagcgggaagcccgggagaagcaagcggccatcggacgcacgttccgcgagacggccttcgaagatttggtccgccggacggaaccgcagcatgacgtgctgcagaacaagctgaacgaaatcttcaactcgctgtcggccgaacggcagatcaactgcggcaaccagctgatgacggcggccggggcaaccgtggtggacggggccaacagcaagatgaaccagcaacggccaatctacgagaataacttcccggaattgttcttctattaggaggggggttgtggtgggagggcgatggatgaccttggtagaggaatattgttttaattttgttatcttttgtggtgtatttattgctgttagctagtcggggatgggctgggattgaaagcgtatataagatattagacgttggaaggagcattatcagacactccgataaatttcacacaataaagtattctatgcttaatatcttaaaa

SEQ ID NO: 707 - DNA, 16449 bp, Aedes aegypti
gtcgtttcagggcagtgtagttttttcacaaaagaaaaccaagatggctgcacattcaggaggagtagattgggctgccgttttaaagccgtttttaggcagttcaagtgaaaatgttagcaaaaacgatgtgctcagtttagtgaaaaccatcatccaaagtgaaaatgaaattctcgaccatgacgccggccacaagcagtttttcgacagctttgtcgtgttggcagcagaaaatctcaccaaccaagtcacgtcactttcgcaaacacagcttccgcaaattgccgaagcggccaccgtcctgattcgctacatcctgcaacatctggacacgcaagcaccgaacaagcccagcattctgctgatggctctcaaagttctatgcgaaggccgcaaggaatcggaacattcgacaagcaacacatcggcctcgtccattatctccgcgtccggaatgaaatatctgaagtatccggaagtgcacggcaaatcgccctcggtgggcagtggcggtggaccgtccggtgtcgttgtaagttccggcggaagcggatcggagaaagaaagccccaaaagcgaaatgaaacgctcgcggtcggatctatcgaccgtaatcctgcaacagctcaccactccgctcggtgctggagtgttcacatttgctgcactcagcgaggagcaaatcgattgcacggaacttttcgtcaaatcaaacctacaatgtctacaagccaccaacggaggagatctgctcttcaagtggtgtaccaactccttgcccacgttggctaagtaccgcacaaagtatgaggaatgcaccgttcaaggaaaacccctatacctaccgattacaactgtggaagccggagctgtcaaagccaacctttcacacatcgaatcagatatttccaacatgctgctcgcggtttcgttgccacttgttgaaccactgaccccgaccaagattgcacttctctcccagtgtgctatgtccgccttgtattgcgccgttctaacgtcaacagcgatcagcgttttggcaatggccgctagtggttcgcagaaaagtgcgtcatccacacaactgcagcagaaggaacaacaatcgtcaagcaatcagtcacagaaggaaagcgatgatgaagaagattacgcccgaattgtggtggatcgcgctttggagatattcaccaagattggtaccattttgaaaaactccacccgaactcatatttatcagaatcacgtctgtatgggagcatggttgttgatatccggaatccaaggaaccatgggcgcttctggaaatcccagtggcagcactgtccaacagacggcttctgtaaaaacttccgaagaaagcttgaaaggaagaagccctttgaaaacgctcgacgtgccccaaatggcctcaacggcagcaccgacgcctgctttacgtgtgaatctgttcaaagttcaacaaggcttcggagtacttaacgcggcaattgctcgacacagtatcacgctcctgactgagctgatcgatgatttgaagattgactcacgttcagacgatgaggaatacagtagcattgagtctgcaggattcgacatcctcggccaatatacatccatacaaagagtcgttcgcgttttgaacagcgccaccttacaacaactaatgaccttcttggcgactgtatcatatcgaaaggcatgtaccctgcgtagaataaacaccaagaacacgaacgaaggtgaacccatgagttacagcgactcgacgacgtattacaatgatactttctcatgttccgaagaaagcgaaccggaggaggaagacagcgacagctacctgggcctttggttcaaggaaacactttctcctgaagccaatgaagaaatgaccgaatcacaggagcaggagaagaaagacgaaaagcgtcacggaagcaaccttgttccagccaaggacgaaccacacgaatatctcaacttgagttctttgattttcaacttctttgacacgtcgcttggcggtcatcatatctatctgaatcgctacgtgagaaccggtctaagcgagcaacagatggtgttacttgctaacattctccgtgatcttgatcgcgactcggctcgaggtgatccagaaaactccggctgcctccagtggcaaaacgccatggtcaaattctccggtgcagttggacgttatctccacaatttaatatccaactccttgctaaacgaatcgctgcaatcagctcttctgcttcatctcggtgtttcaccatggactcaggattccaacatctggccgcttcaggtttactccagaacattagccgtgctcgttcagatacttctgctgaaaccatcgcaagaaaaggaagcagcttgcctctcagtttggcatcgcctagtgaacacacttgtcgaaggagtctgttcaaaccagatgatcccgacggaatccgaaatcgaagatctcaacgtagagcatgcacaactgctactgtttttgttccactccctgaaccttatgcagaagaaatccatcttactgcttactgccggaggtgtgattcgttgctccgaagtttgtcgctccgtaactccagagaagccgttacgtgaccaccaaattatgcttttatcgagattgttgctgttcctggaatatctcatgaaacacttgtacaatcctccgaacgtgctgctcgagcaggtccgttggaaccttttcagcgtgttcacattggattccgagcaaaaaattgccgatctcatcaattataaaaccaaaatgatgtccttctgccgcaaagacatcgaagacaagcaccgcaagctggccaatgaattcagcgtcagcggagtcaagccgaagttctactcgttgaccacggtagacacgaaaattcaacaggaattcaaactagacggtctggcgtggaatttcatcttgtgcactccggacaagctcaaatacccctggttgatcgacgcgctcatcgacattctcagcatcacggatatgtgcctggcgaaaattcccttccaaacgctctgtgcggtgcactactgcttcagtctgtgctggaagctgttactcggactgccaccttcgacgcagcatgtggaggctctgatgcaggaaaaggttcccaatttgcactcgctgttgtggtcgatccgctgcttgcatccgatcacccattcgcactatctgattgttaacagtttggtcaaacagggcatgtatacacaatcggcggaggcgctgtggaatcgtcttacggaccatgtatcagatatgaagtacagcttgaagctaacggtgcttggtctggaatcttttgctagctcgttcaatccggagcaaccacgtctgtccaagattatcctactggacagcttagtatcgcatctttacgccatctgttgggccgaaaaggaaggggtcaacattaaaaccaaatcgacgaataacagcagcagctcgtccagcagtaccagcagcagcagttcaaccagcagcaacagcagctcgacgtcgtccagctccaacgctagcgattctagtgtggctagcggaggacaacaactcaccgttacaactggagcagctacaaccgccgatgcttccagcaccactggcccgggaatggaaacggtcaagatggcatctaggaatgatctcactcgtaatttgatgtcaaagttgatggaagttctcgagatagtgaaggaagcaacctacaagacgatgttccagaatctgagtggacagattcctgcttcactgattgagccactgatcgccatatgtggttcgaagaacacattctgtcaagatttatccggccaactggtggccttgatcactggtcaggacaaggacgtaatctctgtggaatggcgtaagaatcttactataggtagtgaggacaactttaccagtggatcattccctgttgaagtgcacaccttaactgtcatcgatggccatttgacggaaacatcgaagcacctgtcctattcgatcctactgtcactgaagcacgctttgaagtcatgcgtcaacttaatttactacatgctaccgaactacgacgacaaacagctcgacgaagagctaaaagagattcttatccctatgatttttgatcttcgggcagaatatctgtatgatgtggtcaacaaatgtctggaatcactgctaggtggtgattcgaattcggaaacctatcaactgttggcatattcaaacattcttcgtcgtagttatcaatttttgatcgaatacacggaattatccgcccaaggacaaacagttaacattgacgaaactgtacttcacaacatcatcaaattctgggaaacgatgttggataaaaccatcggactgaaagccatgcgagagttcttctacgagagcaaaaagggcaatctggtgcaaattttgctctcattcacgggcacgaacctgtcccagaagtattcaacaaaagttcttcaattcttcgagaaattattcgccgcttcggagaaactcgatgcccaattcgacgaggaagaagtgagtagctgcattgctgaacttgtgaacgccgatgcaccgaaactcaaaagctggttgagtcacattctgctcggtcctagaggagccagcctaaccactgggggatcgaatgcatcaagtaacgtaccaaccccaaccaacatggcgaccgtgtcggcgattccgagcatcactgatcaattggccgtttcagccacttctgataacaataccgccaacaatgcttcggtgggaggcgatccggatgccatggacattgattacgagtgcatggctatgccctggcagagggagatgagtcgtaccggaaacgataccgtagatgaagctctggagaaaaacggcaaacttttgcaagctttggtaaaatacattgtcgcagagaacagaatcgcacagtctgtctctgaatctctgttccaggctttgattcaaatcggacacaatttgctatgtcccgttcaagaagctatcgagtttgccgatttgctgcaggtcatgattacattggctgacgctggaaaaggccgtggccacgcaatgctgtttacggcagctatcgattggctggagatctccaagaatcaagtactggaaggtaaatcatccaaaagtggatcaaaggctgcggttcaactggagaatgtaactgccattttgaaatacatgagcgatctgctgcaaggtttgggatcaaatggaagccgttctatcaatcctccatgggacgacgaaacaccacttgatgcggaagatattctggatgatctcggaggcgatgacgatgatagtgctgtagaagattctgacgaagacagtctcagcaataagctttgcactttctcgataacccagaaagattttatgaatcagcactggtactactgtcacacatgcaaaatggttgacggcgttggtgtctgttctgtttgcgcccgagtttgtcacaaaaaccacgacatcagctatgctaagtatggcaacttcttctgtgactgcggggcaaaggaagatggatcttgccaagccttgtcacgaagaagtaattcagggcatggcgaagattcgattctgggatcagcgatgccaagatcatccgatgctgattctgtcttgttgacaagttcattgagacgtagagcatcaagcccaaccggacaaccgaaccagcctggaatcagtcaaatgtccgaaaaggaacaactgctggcgaaaatcatcgaaagctccaaggaagctttaagcaatcccgatcaatggaaagtcgttgtaaagagtattttgtcgttcttcaactcgataatgccaacgatcaaggatcactgcgccaaatattccacagtgggatgtcatcttcgcgctcgcaacgctttagaacgtctgcatcaaccagaaaagtcatactccttcagtgatcagattatggtcgccacccttgggtcgcaagaaggagcattcgagaatgtccggatgaatttctccggagagcaagggcaaaccatcaaacagttgttatcaacaaacctggtacgtcgtgtagccttgtgttgcctggcttctccacatggcaaacgtcaacaactagccgtgtcacatgaaaaaggcaaggtcaccattttacaactatctgcattgctgaagcaagccgacgccgcgaaaaagaaacttacccttacgagacttgcatctgcgccgattccatgcacggtcttgtcattggcgtccaatcccgcgaatgaagatttccttgcagtttgtggattgaaagaatgtcatatcctcacgttcaccagcactggagctacaaacgaacacattgttctaacgccccaacttgaaaccggaaatttcatcaagcgagccatctggctaccatgctcacaaaccaaactggccttggttacagcagatttcgttaagatctacgatctggcagaagatagctacagtccacagtactatttcctcgtgccgagcggtaagatcagagattgcacgtttgtgcatcaagaagacacatattacatgttgatcatgtcctctcacggatatatctacacacaacctctaactgacgaaagtctggccaagcatggtccattctacgtcaccagcactctcgaactggaccatccctcaataaccgatgacaacggacaaatcttggccggaggagtctcgatttattattctcacgtcctacagatgttgttcttcagctacgtggctggtcgaaactttatggcgccactaacgaacgttaatcaaggcgtcaaatgcgtgatcaacctgatctgcaatcctgcgtcgaaagttttctccaaatcgttgacgcaacccttgtgtcagtggaccgaaattcccggacatccaggcctcatctgtgcgatgatgcaaaatctgaacaatccggtcattttcatgatcaaaccagacggttacgttgcccaagagatcaaggcacagaacgcgaaggccaaaatcatggacatggtagccattcgtcattcggtatccggggtggagaagaccactttgattctgttgtgtgaggatggaagtctgcgaatctacgctgctcatcctgaaaacaccggctactggttatcgccggaaattcaacctataggccaccaattccagacaggggcttactcaaagtctagaaaatcgaagaagtcaagcaagcaaagcagtggaaatcaagcaagtggcaagagtggagtgggatccgctccaactttcccgatcgatttcttcgagcactgtaccctgatgaacgaggtcgagtatggaggaaacgatttgctgcagatctacaatacccaacacttgaaacatcgccttaattccaccgggttgtatgttacttctacccgggccagtggattcacactggatgtcatgaataacgatcccaacatggttatgacaggaatccgcatttccatcgggtcacaagacgtcagcaaagctccgcagagcgttactatacttggacgtgttgtgccaacggttgcaactcgtgcccgttggtttgatatcccgatgaccagggaagagagcctccaaagcgataagaagcttagcatactttttggaccctcgcaggatgcggaaaatatcactattctggacagtatcaaaatctacggtaaaacaaaggacgtatttggttggccagaagaaacggaagatgtgggttcatcgcagttgaactcggcaactcaaacgccgggacaaatggcaaattcgctgaatggcggtgataacggtgatggaaatggtggctcaagtttgatgatcactccgctggacaagatggtatccacgatgcttcaagtgctggacagtggattgtctctgctgggcggaccaaccggcgatgagggttgcaaacaggctgccgtcgatgttgccacttccctagtcttgtatcccacaaccaacatggttcaacaagacgctcgcaatgtgcttgtcacatgccatccaaataagacagcataccatgcttacaaggacaaagaaatacttgcagatatcaacgctcagctcaaaaagatggccgatgccagagactacaaatttatcgatccagaagcattctatcgagtggttctgatgactcgtagcatcgccatacagagaccacaagcactcactaagatttgctccgagaatcaattcccaatcttgcaacagctaatgcaactgatgaaggacttgtataaaatcacgcctgcctacgaggaacctttggcaattgtgaaacaaggtctgtcgcatgttgaagccgttgtttactcactagtagagattatctacgcatttgcactgtccgatagcgaaatgattgagtcgatggccaagttcttcgtcgagctgctgttggatcctgcaccgatcataagccatagtgcaaaacaggcgatgattcgccttctgagaccgaaaattcgacgtcgtaaagtgctcatcgaaagcccaccggtttgctcaactcctactccatcgacggtgacctcgattgtagccgggccttcaacatctgctggaccatcatcgtcggccggtgctgtaggaggatccgtagcatcaggatccagtggtcttgctgttggtggtgctgctgcaaacgaggaattcgcaggagcaatgcaagaagtagatgccatagaatcccttggtctggagccatccggtggaaatcaggccttggcatcattggaggctttgttaggagtgggtttcccgcatttgctggaagctcctgacgcagacgatgaaaccattatggaaatagctatcgcattgagtttgcaagacaacgagacggatttggctgctttgcagcaaagtatcgcccaataccagggcagaaatcgcaaccaagctcaaggactgccagcggcgattgcgggaggttcttcattcaacgttgagtccaacgcttcaggtggtggttccgatgatgatgaaatatcgaacgttgctacagaaggttcaacattgcgaacatccccagctggagaacacgccggaagtggtagcggtggatcggaaagtggttgtagcggagttgaaagcattggtggaacatcaggaagaagctcaacctatgaagagcaaccgaatccatctcctccaaggacctccggggttgatcaaattccaccacaaccggtggctcctccagaaactgaagaaaccggaggtgaaaatgcttgcaaactgcacgtgctaaggtactctatcctgaacaaactcgttgataacttcgccacattggacacagttaacggctcgcaatgtattccatttatgcaagttattctgatgttgacttccgatttggacggaagtcaagaagctgaccaacaagtgatgaatcgcttactgcaagcattgattgaccgtctcgagatacccactacgaaaacctaccagatgtcgaatcgcacatcgaaaaccgaagtgcaactcatcattcttcgcctggtcggagtactaatgggtaaggtgaaatcaaaatcgtcgtcatcatctgctgcgggcggatcttcatccgttgtaagccaagccgttctcgacaatgcttccttcgtagcacaagcaactgccaacgctctgatgaagaacaatgcgattccatactgtctgatgattatggagtccttcctccctcactggaagaatgttgccaacaatgaagaacttctttccggcacgaccacggctaacaccaatactggcccagtaattacaacgcctgggggagctccaactaacaatctacttaaagcgaccctctatggactctcgcccgatatgcagccgttctttgcccggcagtgtgtcaaaggctgcaccgatgttttcgagctgtacccacaagttctcacagagatggcagtgcgtttgccttaccaaatacttaagctttcgtcgggtcatccgtcatcacacgattggtatcatctgctgtgtgaatacatgacaaacactctgtgcgagtatatgatgtacatgcagtcgcctgggttgcgtcgacaagttcgcaagcttctgttgtatatctgtggcaacaaggaaaaatatcgccagctacgtgatcttcactcgctggacactcacatgaaagccgttaaagattgttgcgacggcagtgccccgccgatttcatccattggatccagcacgagtgcaattctaagctacgatgcactcgttgaactgaccgaacacttccgagcttgtcaggaaattgcttcaattcgtaccggaaactggcagaaattctgcgttcgtaactccgatattctcccatctctgctgaacatcagctgctgccagttggaagaaggtgtttcttcaatcatcctgcaattgctgcaatcggccatctgtaacacccaaggagtcaaacaggattcgggatcggcatccgcaacgagcatgaaaatatcagtgctgaaagaacgcaaagatcgagacaaatccgaggaatccgacacagcaacggagtcgaaattcgatccggctcaatgcgtggctctagtgactcaaattttcaaccaagtaccgttccaaaacctgaccaaattcattcgaagcttcctcctggagacaaactcaactgccatacgttggcaagcccatagtttggtgtacgccttctatgaaaatagtagcgaagccaacaaggaaatgctcctgcaatgcctgtggggactttggccactgctaccggcgtatggaaaacgaacggctcaatttgtagatctattgggtttccttacgctcaacacaaaatcattgagcgacaagcttcccgactacacggctcaagcagtttctgttctgcggcagcaaaatgagttgctatcaaaacatccaaacgcccccatttacactgcccttgggcacgtcctggagttggaaggattttatctggagtctgaaccgtgcttggtatgcaacaatcccgaagtaccctactcaaacatcaaactttccacggtcaaggtggattccaagttcacaacaactacaaccatcgtaaaacttgttcaaagtcacacgatttcgaagatcatccttcgtattgctgacctgaaaagagcaaagatggtgcgcactatcaacatttactacaacaatcgaactgtgcaggccgtagtggaactcaaaaatcggccctcaatgtggcacaaggctcgtaaggtgactctccagtcgggacaaacggatgtcaagattgatttctcccttccgataacggcatgtaatttgatgatcgagtatgccgacttctacgaaaccgtcagcggatccagtgaaagccttcagtgtcctcgttgcagcgccgtggtagcagctaatccgggtgtttgcggtaactgtggcgagaatgtgttccagtgtcacaagtgtcgtgccatcaactacgacgaaaaggatccgttcctctgtcattcgtgtggtttttgcaagtatgccaaattcgattacagcatcttcggaagagcatgctgcgctgtggatccaatagaatcggctgaagatcgaaccaaaacggtgcaaaccatccatgcatcactggacaaggccgatcgttcgtacaaaacgttacagaacaataagcaaatattggaactgcttgtccagaaggtggctgagcataagctggatcgaacactggatgaaacgttgatcgggtcggttgttggttcgtcgcaggtgaataaagtgatccagttgctggcgcaaaagtactgcgtggagtccaagtcaacgtttgaagagctgagcaagatcattcaaaaagtgcaggcttgtagaagagaattagtggcgtatgatcgtagtcagatggacgcagcaagtggcggaccgatagctgctggatctccgtcggataaggccgttgcgctcaataaatgctacggttgcgccctggcatcgacggaacaatgcttgacgctgttgagagcaatggcatccaacatgccgtgccgtgtgggactctgcaatcagggtctggtgcaggagctagctctgaacaatttgcgtcgtggaacaaatcaaatccaggatgaagttcggcaattgctttgcctgttgactcgagacctaccggacgcgacctctgatttgtgtcagttgttgcaggatcgagtaaaaatggcgctcagcggaacagttccgttggctaacctggactcggccgtacgacacgaaatgggcctgctggaagcaatgacagcacaggacgattcatgttgggaactgaagctgcggacagtaattgaattgttcttgcaagcgtcaagggatgtccgtggacctgcagtagccgtaattcaaccatgtttgcgtatagtgcagtcgttgatgtgtccaccgttgccaatcagcaaaactaacaaagatttgacgacccaggatttatgtaccgtgcagccaaccgagggactcaccataagctacgagaagtggattaccggagatccgcagcattcattcgcggcatggaaagcccgcatgccaccaatcaccggtacagcgacaccacgtgccgaggacagttctatacagatgacactagcggcagattcagctgctggagaaacagacgctacgacaccaattagcagctatcgctcggtattggaacagaaacgcaaccgataccgtaaggcatatcttcatgaaaaatacggaaagcgttggcgtcaaaaagtgctcaacaaaggcgtgaatgcggttccgttggagctgacagcagcctggttgcaaccggttcttttcaataccaactctcgcctgggacgccagctagcttgtgctttggtaacatccctcagtagaactccggaacgcaaacgggagatactggatttgctcactagtttcctcaaaaacatcggcgaatgtggtgaagctagtgctgaattcatcgctctctatcgtattctagccgatgagactccatggcgtcagtatttggcgttaaagggagtcctctcgttgattgccgatttgttaactgtggaaatcgaaaaaatccatcgcctggaggagacaactctttcctcggatctggcacagggttacgctttgagacagttggtagaaatgatggcgatgttcttggacaacccgccaattagaaaagccttcaaaggcaaactgctaggatctgtcttacaaggttacttgaacttgcggaagctggtggtgcaaagaactcgcttgatcgacgatgctcaagaaaaattgctggaaatgctggaagaaatgaccaccggaacggaggaagaaactgcagcattcatggctgtttgcattgataccgttcggaagacacctacatcggacgtcaaaactcctgtgttcatgtttgaacgactttgctctattattcatcctgaagagaacgatgtgggagagttcttcttaacgctggagaaagatccccagcaggaagatttcttgcaagggaggatgttgggtaacccgtatccatcgaacgaagctggtttgggtccattgatgagagatgtcaagaacaagatttgcattgattgtgaactggtagctctgctggatgacgacaatggaatggaactgctggtgcacaacaagattatcagtttggatttgccggtgaaggaagtctacaagaaggtctggcttcaagaaggaggggaacgcgatgcaatgagaatcgtgtatcgcatgcgtggtcttctaggagatgcaaccgaagaattcatcgaaaccctgaatgccaagagccaagaagaagtggacaacgaacaactgtatcgcatggcaaatgttctggcagattgtgatggtctgaaagtgatgcttgatcgaattggcagcctacagaacgtatcgagatcaagaaccttgttgcaagtactgctaaaactgttcttgctaagcgtgaaagttcgtcgttgtcaagaggttctctgtcaaccggaactgggagcaattaacacccttttgaaagtgcttcaattgtgtttgcaaagcgaaaatgatgcccaacaatcggcagtgactgaacagctgttggaaatcatggaaaccattctttcaaaggcggcatccgacactctcgattcgttcttgcaattttcactcaccttcggaggacccgaatacgtacaagctctgttgtcatgtacaaactgcgcaaatgtacgcaacagcccgtcggttttgcggcacctcattcgagttttagcagccctcgtgtatggcaatgacatcaagatggctttgctatgtgaacacttcaaagaagttttcgatttcaacaagtttgacgccgaccgttctccggaagatgagtttaagatggaacttttctgcgttctgaccacaggcatcgaacataactcaatcggtggtattttgaaggattacatcatgagtctgggcatcgtggataaagctttggagtatatcaagagtcatgcaccgtgtgtcaaaccaactctactgaggaccgattcggacgaactaaaagaattcatctctcgggcatctctgaaatacattcttcgctttttgactgggctggctacgaaacatgaagctactcaacttgctgtggccaaggatataatcccaatcatccaccgtttggaacaggtttctagcgacgaacacgttgggtcgttggctgaaaacctactggaagctctttgcaccgaaccggtaacagcgaaacgtgtccaggaagttcgtgatttcacaagggctgagaagaaacgccttgctatggctacccgcgaaaaacaactagacgccctaggaatgcggacgaatgaaaagggtcaggtcaccgcgaagggatcaattctgtcacagatagaaaaactgcgtgaagaaactggtttggcgtgtttcatctgccgcgaaggctatgcttgtcaaccgaacaaagttttgggtatttacacatttaccaaacgagcaaatgtcgaggagttcgaaatgaagcagaagaaaacggttggatacaccacggttacgcatttcaacatagtgcacgtcgactgtcacatgtcggccattcgattggccagaagccgcgatgaatgggaaagtgcttcactgcagaatgccaacactcgctgcaatgggctactaccattgtggggtccagatgtcagcgaatcgtccttctcatcatccatggctcgtcacaacaattacatgcaggaatctactcagcgctgtgaaataaccttcagcagttctatccatgacttgaagcttttgttacttcgttttgcccaagaaaaaagcttccacgaagatgccggaggtggtggtccacaatccaacatgcaccttgttccttatttgctgttctacagtttgtacacgctgctttcatcgcgttcgtattcacgggaggagatgattctttccgcttacataacccataaaccgtcggatcgttggttggaatgcgcttacgagtcggaaggacctctctatttgataaccatgtcgctagctttgcacacccccggaatttggaatcgaaacaaattggctcatctgaaacgaatgatcagcatcggtcatgctcgtcacgttagtccaaacaccatctgtaagtttgtggcaccgaacgataaatcccagaaggactacgttgtctacaaaccgtacctgctgatgtggggtttggtagatttgatctacaaaaacttcttccgtacggtgactaccccgaaggatgaggattggccaatttcgttattcgattacattcgccgtaacgacgaagccatgttgaaacacgccgatggaaccctggaaacgttcacggaagagtacgtaccgtgcacctcgtttgcagagttttgcgatgtagctggtcttttgggtgacatcgaaaatcccgatgaatggatcgacgaactgttgcagtccttaccctcacccggaacgacatcaactgctgcaggatcgactacgaatacgggctcaggaagcactgcggctggtggtactacttcgaacgcttgagtttggtcgctttttgcaagcaacgacgaagatgacgattggtgatggtaatgtaattgccctcaacgtataattgttataacttttcaactatatccataatcgcattataataaattcaatacaattaaagcactgatagtagcgatgctaaatgaatcgtaataaaacaggcaccctgtgtctagcagcttaaaagcactgacgatatatcaaatataactcaataaataacccgcattgttgcaatatgtgtgattaatgaatttcaatacccattcaaataaattatccagcaattcaaa

SEQ ID NO: 708 - DNA, 3726 bp, Aedes aegypti
atggaggtggaaagcaacgtcatcaaggacgattcctcccgaggcagaatcagaggtgttgctggtcagcaccaccataaaggtggtaccaagagccaccatgcgagcaacgtcaacactggcaataccgtcacggtcaaagttggtctgaatatgaacatctgcagactgtgcctgacggagggtacggtcaattcacgattgcaaccggtttactacactaaggataccgcggacgagccactgctgcagaagattctggatctcaccacgatacaggtaacatacgcaacggattttccttcgtctatatgtattaactgcaaggcaaaactggaggagtacagtcacttccgccgacagtgcatagaaaatgatgaacttctacggatgaaatattacgaaatcaaagctgctgaagattaccaccttcaacaacagcagcagcagcagcagcaacagcaacaacagcagctacaccggaatcaaccaatcgaacacgaaatcgtagaggaagtcaaagcagaggaatacattgacgatacggacgatatcacgctggccatcgatgaatcggccgatgcagatgaagaatttcaagaagatagcgatgaacaacaccagcagcaacagggacaagtggttgaacaacaaacgatccagtacgtggcggctgatggcactatgaccgagtatgttgaatcgggcgatgttaggacagtttccagctcttcgcagcaacaacaaattcacatcagtggatacagcgaaggagagactatacaagctggcgaggcacacgaaatttactacactgatggcaacgacacctacgcaattcaaacgacggccgagggctacgtgaatgctgctaactatgttccccaggggtatgataatcaaactgaaatcgagtgcacgaccattgaacacctcccggaagaggaagtttatatggaagagggaggcgaagctggagttggaagcgctatcactccacggggagttcacgatcggccatttgtgtgcaaacactgcaaaactagcttcaaatacgagtacaactatgagagacacatgaagaatcatgcgaaagttctttacaggtgtggcaaatgctcaaaaacattcaccaagcagagaaagtgtcaacagcacttcctgaaggcccattcctctcagcggtacgagtgcgatatctgcttcaggacatacagtctaccaacacgtttggagaatcacgtcatcgaaatgcactcggaaaatggaatctacaaatgcgatcgatgtacagagaccttcacctcctatctagatttcaaatctcaccgcaacagccatcacagtattaacgggtccaacgccgcaactgtgattgcccagaccgtggaacaacaacgaccgcaaaccattcagcagattcaatctcctcagcctcacatagcgcctcatacgaccacgtccgtcagtacacgctcctcggtgtcggataactgcgatttcgaagttatgatcgatgaaaccaagatccccaaaccggcgaccggagccgattctggtgacgaaaaacgaccacttgtggtgaacgctagcagttccacccaggatcaggatatcattctgattgacgatgaagcagcgtccgccagtgcggcgaacaacaacaacatcaacaagccccctacagcaacggtagtagtctccacaagcaccaacagtgtcatcagtggggggaaaatagtgaccacaaccagtgctggtaccgttgtaaccagtgcactggccgcagtgcagccaatcgtcagtagtgtgcaacaaccgccgccagcgacgacggccacgacggtcattacgaatggtatcgataagaatagcatgcatcggcagttgctgcagcagatcgaggaaagtgaagccaactcgacggggcccaaaatctacaagtgtgacagctgtacgaagaatttcgtacacttgaacaacctgaaggcgcacatctacgcggaacatgacaacgacaaacctttcaagtgcaaactgtgccccatctcgttcaagacgaaggagatcctggtgatgcatatggtattacattctcagcacaacacggcaacttaagattgtgcggactgcgcttaagctgtgcatcaacaatccaagatgtttttaaaactaagaaatgcaaaccaacaatgttatttaaacaaatctcacaaggaaaattttctaacccttaaaaggaatttttctccttcctatctaaatatatgtagcaaatgaacaaaattaaaactattacaaacacccacacatgtaatacaaaaacccaatcgtaatacaatatattacagacgcatagaatgctttcaaatagaaacaaaaatcacaaggaaaaaacaaaacaggatagcgaactaaaattataacttctgtataaaaaggtgaaaataactattagtagttagtaagaaagtactagaaaaagtgacgatgatttccttgtttcagtttttttttcatagaaactttaatatatttttatttatgcgaaatttcatgttttctacgtttaagtttgtcctcgaataaaatcgaaaaaaaaaatcaaaaaacggctcgcttgcaatagtagttgctcataggattattttcgtaacgttagtattgttctcgtaaatagataagtgatcccttccctagaacgtaagtttaaaacttgcttcggatggtgctttctcctcctgagatcccttttatcatacacgattcatgaatcgctaatctcgctctcatgtaagtagtcctttttttaatgataaaacagaagattttcctatagttggaggtaagacgagtttgagttaagatggtgtgtgaaatgtaatcacaactgagttgttaattaaacgagggacacaattttgatttccttaaaggtatattgtagttttggagccaagtgtgaatgtgtataaaaatgtttggaatcggttcttccaaaataaaactaaaatacctatcgaaatgcttgattcaatgcgtgtaaagagagctaagtactttcttttaaattcgttagattgcaaacaaatgtgaatcaaaaaatcccttctgtaatgtgatcgatgtgatctggctatagtttaggaatgttaattttgtatatgattttaaatattgaatgcgacagttttccaagcagaacaaacaagttatttttaattaaaactacaagatcactagaaactgttctgttgcaatagctgtgagaaagagagtgtgagaataaactacgaattatatgtaagtgaagaccgtgcgaaagggagttgattttcgatatattttattgtcactgttaggtgaagagattggagtgtctgatgcgagtttcaaagtgagtaaaaaaatgcggatcttacttcgctaaaaagtagcgaaccgactacatttcgttacgttaatgttgctttttatttttcgccccattttttggatcatttcgtttatcatcatcgttgaatgcataaagaacaaaacattatttaggtagacttgcgcactgagtttgctagtgcttaggaaattattaaccgtcgagtgacgagggttaatttatgacacaaaaccagaatgaaactgattaaaataggaaaattgaaactaaattatgagaattctcgaagttcttgaatgtcgccatgaaatatgaatataaagtgttcc

SEQ ID NO: 709 - DNA, 5591 bp, Aedes aegypti
cccatgctatattcgaattatcatggtatgacgcgtgtgtaccgatctgtagacagctgctgttctgagcactgaagttagtccgcgaccgcgaaacgcgacagccacaataccgactctttttcagtattgtttgaaacggccaacaggtagcatcctccccttcaacgttcgcgacttcgatggcgtgcgatagtcgaagacaaggtttagcctcgcgatagcgtttcgatcgaaatttgtttttttttttttgcgcaacagcatcctcgcgtctaccggtagaaatctagccacaacgtgtctaacctaagcgtgacgtgaaacgacgtgattgtcgagatatttgtacacacagagttcaacacttgtggacatacctaatacagtttctcgagagcacagaggaatccagaaaatccagtatctgccggtggtgcctatatagtacatggacggcatgcaaagatgctaaaatcattccctagtggtgtatcaatttcataatcgcaatactgggtggcgtctacgcgcagaggaaacagactcgagattgaacctaaacggcacgtctacggtagtgagtttgcgtttgctctgaaccagttgttcgtgtttatggtagcatatcgattgaagaataacaggaaaagtgatttgtgctcaaaaataagttcgcatagtcggtgatcggtgaaaaagtgtatctttggggccggacgaaatccgccgtccaacagtgagaagaagataagatagcacacttttcttagtcagactgttttatttttcgacaaaattgattaaattcttgcgtataacttgtatgcatgcagtcagttatgttgtgttccttcgtaccgtcggtgtatttgcagaaattcggtgttaacgagcgtagttatttcgaaagctaatagagtgcatcattgtgaattgcatgtgacaacagtgtttgtaacgtttaaattgtaaattgaaccaataactaaacaactttaagttggaaaagtgcacatttctacatttttcatttaaaaggtgtatttctaatatgcgtagcagtgtgctgaaaatacccgtgatcgcgattgaaaataaataacaactgttaactcagtgtattcgaacatagaaaattgaaatctatgaaataatcgtaacaagacgctcaaaggtttgtgatattttcaaattgtaacaagcaaagataattaaaagcacccaactaatacaaacgaaaacgtagtcggacacggataaccaaacgtacgagtttcatttactactctgtcatcgatcactctgagaagggcgttgttgtagcctatcaaatgatgaacaggaaatcgctgaaaagtgcgcggaaggattttttcaaatcgatgtctgacttggctgacacagatggcagtaacacgaacacagccaatgggacgcccacgatcccgacagcgacggcgcgacgcatcggtcagggtttcttcagctccaatgcatcgtcttccggagcgggggcaggatcgacgacgaccacaggcacaatgctctccaatgcaagcatcagttcgtcacaggagctcctgaacgctaccagcagcatcaagagttccaagacgtcttcgtcgacgagcaacagtacaaccaaatcgtccagcagaatggcttgtgaaacttctgccacacagcgatcgacgtcctcctcttcaaagtccgcctctctctcggcgacaacctcttccacagaagcaatcaagcatgatctcggcgatatgaagaattctatggcagagcttggaaacgtgttggccaataccaggggctcatcccagatcaccacatcttcatcatcgacgtcaacgtcttccaaaatgacatcgtccgaatcttcatcatcgagctacatgaaaaagctttccatgggcaatagttcatccaacttgttggaacaccaaaagagattacgagcgtcgatggatagtttggacgagcccatgacagagtatcacgtgacccatccggactccgatggggaattgaacaacatgatagtgaagaagcccgatggtacgatgcaaaacgggcacctggccatgaatgggacggtagacacggtgaagttcgagcagaagaaaaccacttccgaatcgaaaacgaaggtggtgaaggacgggttcagcagcgagcaggcaacgttgaattcggcacagatgaaaaaactgcacgctggggacgtccagtaccaggaggaggcagccttggctgcaatgagcaaccaggtggaggttgatggactgaaacacgaggagaaagctgccatgttgaaggaagcacggtccctgaagatgggcgattttcagcaagccgaagcgaataatattgcggcgcacagtgtcaaagtgtcgggcgatcatttcagctccgaaaaaaaagcaattgctcaggcacaacaaagacagacggtaacatcgtctggactgttcaaccaggaaaaacacgtatctgcggctacgcaatccaactactcgtcgcgcagtacggtcacttctacctcacagatgacctcccattcgtcgaccatgaacggaactatcaacggagactttcccaactttgaagatctcgaatgtctcgccaacaatccgatgaacattgaaagtgtaatcaacaagtattcgaatcatttgacggattatgttaagaacctgcagcagcaagaaaagatgccgatggcgccaagcctattgaacgaaatgaatgaaatcatacaacgagcctgggctgttccaactcatggccatgagctgggagcaagcctgtgcgatacattacgaaacaccggagggttggatttgctcatgaagaactgcataaataatgacagcgctgtccaattttcatcggccaaacttttggagcagtgtcttaccacagaaaatcgttcacacgtggttaaaaacggtctcgagaaggtggtaaatgtggcatgcttttgtactaagaacagtgggacagaccattcacgggttggaaccggaatcctgcagcatctattcaagcacagtgaagacacgtgctctaatgtgattcgattgggaggtctcgatgctgtcctgtttgaatgtaggaaaaacgacgtggaaaccttaagacactgcgcgggagccttagccaatctatcactctatggtggagcagagaaccaagaggctatgatcaacaggaaagtaccctcttggttattcccactggctttccatcacgacgaaaatattaaatactacgcttgtctcgctattgtggtactggtagcaaataaagaaattgaagctgaagttatcaaatctggtaccttgaaccttgttgaaccatttgttacgtctcacaacccgtcggagtttgccaagtctaatttggcccacgcacacggccaaagcaagcactggttacagaagttggttcctgtgcttagttcaaagcgcgaagaagcccgaaacctagcagcattccatttctgcatggaggccggaatcaaaaaggagcaaggcaacacaaatattttcaaagaaatcggtgcgattgagccgcttatacgagttgcaagctcaccgaacgcaattgcttcaaagtttgccgcgcaagcgctgcggctaatcggcgaagaagtgccacacaaactgtcccaacaggtgcctctgtggtccactgaggacgtacgagaatgggttaaacaaatcgggttcaacgagtacgaacacaactttttcgactccaaggtcgatggagatctcttactgcaattaacagaggacaatcttcgagaagacataggcatgaccaatggaatcaggcgcaaacggttcgaacgcgaactgcaaaatcttaagagaatggcagactacagctcaagagattctgataatctacattcatttttgtacaaaattgcgcccgagtatacaatctacacatattccatgctgaatgcaggcgttgacattgaatccattaaaattttggatgacgacttgctgttatgtgcctgcggaatcaccaactccattcacagatcacgaattttgaacgccatcaaaaacagcgagatctcaacgttgtcgatggaaaagagcgccgaaaagaatttggacgtgttcgtcagctatcgacgcagtaacggctctcagctggctagtttgctgaaggtccatctggaactgaggggtttctcggtgttcatcgacgtagaacggctcgaagctggaaagttcgataacaatctgctacaaagtattcgccacgcaaaacacttcctgttggtactgacgcaagatgccctagaacggtgcgtggatgataccgatggaaaagattgggtgcacagggaaatcgtagcagcactcaattccgactgcaacatcatcccaatcatcgacaatttccagtggccggagccagaacgcttaccagaggatatgcgtggggtgtgccacttcaatggcgttagatggattcatgactaccaggatgcatgcgtggacaaactggaaaggttcatgcgtgccgaaaccaacactcgttgcagttcaacggatcacttccgtaacctgctgaaccgaccaggcggcgattcaacgccaacaacaccaactatttatcagcgaatgcacagcaacgattctgtgggttctactggccactcgcagtcccaacaaccgagtagtggatcgaattcctcactgaaccaaccgcgctattactccagcttggcaaatcgttatcgtaagtcttcaagtccagctcgtcagttactgagtggcacaggaagctacgcaacgactgggcgaacttcacgcttcccaagctctaagatatcatctctaggaggtggcatggcgaggaatatccgtgcttcggaaatgcggaggagttctgcggctggattgaatgctactgcacagcgccctcctcttccgcctaaaattgaaaaccgctgccatagctatgagggactgctacgagaggacagaaaaccttctgaaggacaagatcatacggatgcaaaaattccggataccacttcgacggattctgcggctgaaccggtcaaatcaaccgaggaatccataaaaaccaaaaatcgtagatctcgcagcatggatgatttatttgacgacgatcgaaatcttacggattttctcgacaacacccaaagcatggaaaaccttgcatctgaagacaactccattgaaccacaatctccattaaaagttatgggaaacatttgcttcaaccctcgatttgttgaaaccgtcgcggagcctgcagaaactccagatcctcgaatggacacagcatctcctgaatcatgcggcgaacaaccctgtgaaaacgaaactatcactgtagatagcactccacgtagcaagcatgacatcgcagacaaagctccacctgaagatgacgtactatcgacgaactcttcgttgaattcgtttgcttcgacaagcgacacaacttcggtgaataaaaaatccaatacaccgttcatcaataagtatgtcaaaaaagtgaagtcgctgatgaagaaatag

SEQ ID NO: 710 - DNA, 3163 bp, Aedes aegypti
atggccaccataagacaggcgatcaacgatacgatagaacgagtgcgcatcccgacgccaacccgcctgcgtgacctcatccgacagatccgcgccgcccgaacagcagccgaagaacgggccgtggtcaatcgagagtgcgcctacatccgcggaacattccgagaggaggactcggtgtggcgatgtcggaacattgccaaacttctgtacattcacatgctcggctatccggcgcactttggccagctcgagtgcctcaaactgaccgccagtccccggttcacagacaaacggatcggctatctgggggcgatgctactgctggacgaacggcaagacgttcacctgctgatcaccaactgcttaaagaatgacctcaacagtacgacccagtttgtggtgggtctggcgctgtgtaccctgggagccatcgcgtcgccggagatggcccgtgatttggccggtgaggtggaaaagctgatgcgctcgcccaatgcgtacattcggaaaaaagctgccctctgtgcatttcggatcatcaaaagggtcccggagctgatggagatattcctgccggcgacccgatcactgctgaacgagaagaatcatggtatcctaatcgccggcgtcaccctcatcacggaaatgtgcgagaagagccaggacacgttgaatcacttcaaaaagattgtccccaatctggtgcggatccttaaaaatctaatcctcgctggttactcaccggagcacgacgtgagtggggtgagcgatccattcctgcaggtgaaaatcctccgattactgagaatactgggccacaacgacccggatgcttcggaggcgatgaacgacatcctcgcacaggtcgccaccaacaccgagacgagtaaaaacgttggcaacacaatcctgtacgaaacggtgctgtccattatggatatcaaatccgaaggtggcctccgagtgctggcagtcaacattctcggtcgattcctgctgaacagcgacaagaacatccgctacgtggccctcaatacgcttctgcggacggttcatgccgatatcagtgccgtccagcggcatcgtagcaccattttggaatgcctcaaggatccggacgtttcgattcgacggcgggcgatggagctctcgtttgccctgatcaactcacagaacatccgggccatgtccaaggagctgttgatcttcctggagaaggcggacgccgagttcaaggcgcagtgcagcagtcggatggtgcacgtggccgagcggtacgctacgtcgattcgctggcgattggatacactgctgagtgtgctcattgcggagcacgcgaaaactctaacagccttagataagaacggtctacttgtacagttagtggcgaagaatagcggtggttgtctgcagatcgtcatgacagctgtaaataactcgttaaccacactagaacaataccttttccaggctgccgttccccgaagctttacgttacaaatgctatcgccgtcaggttccactcttgcaccgggaggaaccatcactcaggagatgcgagtaaccagcactgcaaaggccaccctccgaatgcgactgcggatatcctaccagtgcgatggcaatcccatcctggagcagaccgaagtgtccggattccccgaggaacccacaccgctcgaatgaggtccgaactggaacgtaaacataacagttaagttttagtttgctcgtcggcctgccgttttgacggcttgggagccgaatttcagttcaggtttcttcttccgtcttcaaactgtggtgagtttattgtgtatggacaagagttttggttttaagtgatctagggacaatttttaacaaaggctaatcgaacccattgtgacagaaaagaagcagaaaatcgtcagtccttccgaaatctactctacttagccgggtaaccattagggtcgttttatttgctgccacatggggcacttctcaacacagaaactagttaactaacccccctaaatcgctatgaattatattaaaattaataatctatatataaaaaaagaaagtaaaacaaaaacactactagtgagatagataatatattcataagaaatagcgtgtggcatgactgcgaattagaggtgagcttctgctagagtgattggacttagaatgagtaaagttgtaaataattcgtaatgaaaactgaaggagaaaagcgatattaatattagtacaccttagaaccggaacgtgcaagcaagaaaccccatgtttttgaaacaactagttactcgggaaaataagaagaaaaagaagaacgttggctcaaacagaggactctgtctctatgctcgatgacatatttttgattcttgtgtagtctttcggttttccacacgaattcgctttcatagtgtaatttctccagactagcaaagcgataaaatactagaagcaagtgtactgttttccgtccaaatacacccaattcgatgcatgatgaatgtgcgtgtgaaaagaaaaaaaaaaaacgatggcgtgagattcggagaatttccggcttttcttccttgactcgcaacaaggtcgagaaaatcaaacttatgtgtatggcaatgctctaaagggcaaaagtttcgctttctaaaatcagacttttaaaacattcttactgctaagtttcgactagtgtctctccgtgttcgaattctgagatgatgacaatatctactacttatctaaacctatcttaaacagttgttttacatccgataaatcgggacgtttcaatttgtttgactcagtccgttattacgcttcacagatacgaagaacgaacacagtatttttgtaccatgaggaaaattagcgatgtgaagtcgaagttataaggaaaaaaaatggaagaaaagcgataaaacatgttattcacaatgatgtttagagaaacacagacaactactaaattgatatgaatgaaatgtagggattagaggtgtgtgaaagtaacctacatagaatgaacctactaaatgcagaatgctgcatcaccaaactagagtggtgtacgctttagaatgagtgattatgtctaggtgataaccgagaaagaagcagttaagacagctataaatatatgtataatacacgatcc

SEQ ID NO: 711 - DNA, 1212 bp, Aedes aegypti
atgctagaggctgccaaacagcaggactttgatagcgtcaagacgaacaacaatagcaacagcagcagcaatcatgacgagtcgcatcatcgtcatcatcaaggtcagtcagcgtcatcatcagcagaaacagtttctccgtcagcaaatccatcgtcgcccgtaaaagtggaagtgctggaggaaggaagcaccaaaagcagcagttacgatttggcacacttcgaaccagtgcgtattctcagcaacaacagcacccacaagtcggtttcgctgttgggacacttcgcgaatctatcgcgggacgatttctccatcattgtgttggaaaagacggccttcaccgaggctcagctgcgaaatacgacgtcgagtgaaagtgaatcgaaacattcatccaccacgactgcagaagctgacactgaagctgagcgcagtatcttctcgaccaaatctcacctgcgcacggaattcatcaacgatatctacgggaatttcctgtgcgtaaccgacccggaagtgaaccaactgaaggtgacgatcgtctacccagcgacggagaagcatatttcgaaatattccgcacacgcccggtacctggtcgaggagacggcggacgactatcagagcgtgacgttgccccacttggagcaggaacagctgagcttggagtggttgtacaacatcctcgagcatcgcaaggaaaaggaccgtatcgtttacgaggacccatcggataaggttggcttcatcctgttgccggacttgaaatgggacggtaaaaccctcgaacagctgtacctcctcgccttggttcgcccaaagggcatcaaatcgctgcgcgatcttacagcggcccatttgccactgctgcgaaacatcaaagaaggtggcaccaaagccatcaaggagcgatacggaatcgactccgaccacttgagggtctatctgcactatcaaccctcgttctaccatctgcacgtgcatttcacgtacctgaaacacgatcctccgggaattcattgcgagaagagccacctactgacgacgatcattgaaaacctggaactcgtgccggactattaccagagagttaccctttcgtgtgtgctcggcgaaaacgataaattgtacgctaaactgaaggcagctaaggaagttaaccaagacgcagaagatcaacccaaagccaaacgtactaaaatcgaataa

SEQ ID NO: 712 - DNA, 1112 bp, Aedes aegypti
ccgacaatgcgttcggcagcgtcgttaataactgctttgactgaccttcaggtccccgttttacggtaccaacagatttattaaatttatcataataataaatataaatctattggacgcttcagtcaaatttgtaaacaggatataaaattttaacaattatatatttttatgaatatttcgacaacatattgtttcagttttttgtagtggctatctgaatattgttacggttttgttgtggtgagaacgttataatgttactaaacatgtaaaccaagtgtttatgatcaagcagcagttgaaagaggattgagctacatctaatccattgaatttccattttcaggtaatatctaattttgatcaacatgacgcaaatgagtcaagaagaaatagtctcgaacactaaaacggttcttcaagggctggaagccttaagggttgaacacttaaccctcatttccaaccttactgaaggcagcaaaaaagacccagataagtcggaaattgttatgaaaaatattgaaaacatcgaattgggcttaggagaagcacaggtgattgtcgtgcttgcatctcatctacaaaatatcgaggccgaaaagcaaaagttacgtacacaggtgcgacgattatgtcaggaaaatgcctggctgcgagatgaactagcaaacacacaacagaagctccaatcgtcagagcagacggttgcccagcttgaggaagaaaagaaacatctggagttcatggcatccgtgaagaaatatgacgataaccaagaaaatgaagagcaacaggaaaaatcacgctcggacccagtggtggaactcttcccggaagatgagtccgaggagagacataccatgtccccaacaccaccaaatcagtttgcaaaccacgccaatgcaggctatgagatcccagcgcgcttgaggacattgcacaatctggttatccagtacgcgtctcaaggtcgttacgaggtagcggtcccactttgcaaacaagctctggaggatttggagagaaccagcggtcacgatcatccggacgtcgcaactatgttgaacatcctggctttagtatacagagatcaggtttgtgtatag

SEQ ID NO: 713 - DNA, 2137 bp, Aedes aegypti
gggctcacattttttacgactcccaattttccgccagcttgaccgacaatcaatcatgtggagaactgcagtcctgtttattgccattttcgggtgcaatgtgtgcgcttcattttatggatttccgttgatcacgaagcccaaagagatatgggataccctaactaacaatttcactgttaacgatttcactgtactgagatatcaaccacagcaagagcaggggttggaaatctttcctggagaggaatgtgatagaacgtgcagtgtggatgaaccttctagaatatgttactacaagtgggtgctggaaagctacgccgccatgggatctgcatgttgggactgcattcggggaaatcgcacgcactgcttccatccacagtgtgtcaccgccaacggaatggaacgtagtattgtttccatcaatcgaaagatgcccggacctttgatatttgtctgccaaggggataccattgtggtcgatgtatcaaacgaaatggagggcatgtcagccactattcattggcacggctttcgccagatgcaatcgccctggatggacggagtgccaatggtgacgcagtgtccgatagctcccagcaccacctttcgatacaggttcgtagcggaagaagcaggaacgcactggtaccattcccactcggggtaccacatggcaaacggacatctcggagccgccgttgtgagaaacccattggacgtaaatatggctttatatgactttgatctgtcggaacatgtgatgttgatatcggactggacattggattcggctgaacggtgggttcccggacagcagagctctcaaatggcggtggactcaattctaataaatggacgagggcggtataccaaggaagaaacgggaaccaaggtagactatacgccattaacggtgttccgcgtacgacgtaattatcgttatcgattccgattaattagcggtggcagtcaatattgtccttttcaattgcagattgaaaaccatcgaatgctagtcatttccacggatggcggtgctgttaagccacacatggtggatacattaatttccatatccggagagaggtatgattttgttattaatgcggaccaacccgtaggtaactactgggtaagagttcgtggcgctggtttttgcagcacattaagtgtagaaacatttgcaattctttcctatgctgatccgtctatttctaccgaaagcctcatgtatcccactcttgagccacccgagtacggcaatgcgtacccgatgggacaaaccctaaacgagcaaactgccacttgctacaattcggaagatcagtttacgtgtgccgcagatttggagacacatgaagcccaccgggatgacaaactgataaatgctacaccggatgtccgtttattcctcggattcaaaatgatgcatcccgataaccgatggctcttctcggagtacaaacctttcattaccgtacgcgaggacttcaacaccattgcagcagccaataacatcagtttcagatatcctagttttcctctactgatacaaccggatctcattatagacgaaaacaaacagttctgcaatagtactcatcttcctccaggatgtgataggttacatctatgcttttgtacgcaccggattaaagtcaaactgaatgacattgtggagctgactttgtatgatacagcttatgaacgtcaaaacttctatcatcccttccatatccacggtcatcggttcatcattaccgatatgggaaggctaccggagagcgccatcaactcgcggctcaagtaccttcaaggacgaaacttcacccaaagacccaacggtcataacccaccctttaaggatacgatatccataccgaatgagggctttgtgaagacgcgctttagagcaagcaatccaggtttttggtttgtacattgccactttgaatggcatcttggaactggcatgggtctagtgctgcaggtcggagaagtatatcaaatgttgaaagcacctcctggattccctcgttgtgatgactacaaaccagagctacgcgggacgtaatgatgcattcatgaacaggaacgggttgtattttttttttaattacaaagatgactg

SEQ ID NO: 714 - DNA, 3568 bp, Aedes aegypti
atgttctctctagctatccagatcaaagccctgccagagcagagtatcaaacggattcgtatgacggctggaattcagctcaccaccctgcgtcatcactctactcttccacagcattcgtggctaacgcagctgatcgatatgttcgacgttgtggactacccggtccagggctactcgccgctgggagttatcactgaaatgcatttgcatctgtgggattgtgcgatagattaccggccgctgtatttcccatatcgagcagtaatcactattggatcattcatgatcagcagcaatataacgacagaaagctctgggttgactttgaggttcattgcagaggatgcagcgatgtgtttggcgcctcaagacaacaagattactgttttgccttccagtgagcttgtttgcttggttgaggttggattgtttgagatttcgctccggttgaatgaaaaagccaccggttctttccccaaatttgatctaagagctgccatgaatgatgttcatgtgaggacatgtgcagattctggaagggcacttgcgcaactgattggatacctagcggcagaaggtgatctgttaccgcaggatgatggagccagtgatgttgaggataatgagagtgtgtgcggtttaccgatgggtaacgaacaagaagcagatttggttccggtgaagcctccccaagcgccagaagtcacacccaagcagcagcaacgagtgaactctttgatggccgaagcgatggaggaaagcatgtcacttcaaagtaacaatagtgacctctcacgagatgatcagttgttggcggacggggaaggtgttgaagtatttttcttcccagatgaagatcagacacgggctgctgctcagaagaagttggctaacaatctaatttccgataacagtaataaactaagttccgatacggatgacgacttctgtttcattgcagacgaagaaaagcctcattgcggtaatcaggaagtgccagtgctggaagaccctatccgcataatagacaatcatttcagtgttcccagtggtaaacctgatctgctgttggcaccgaaagggtttcccatggctgttactcgatacaccatttgcgagatgacggtcacttggcatctatatggaggacacgatttcaccaccgaggaagataaaaagaaaccaaaaccaaaaaactactccaaaggatcaccctcggtaaccttcggaccgattccggctcagaagcttacgtggaaaagtcgcggtggtcccgaacggagacacgacgtaatgatggaaatccagataagcaaggtaaagttctcgcatgaggtgtatccgccgaacacggagcaggcctcccggcaagtacttctcataacggaccttgaaatactcgaccgcctagcaatatcggacatcaaaaagttcctctatcaaacaagcctccatcggcccaacaaaggcaataaccacatgattgtcatcaaagctcttcaccttcggccaaatcccattctgcaagcgcaagagtgctgcctaaggatctccattttacctattcggctgaacatcgatcaggattctctcctcttcatggtaaacttctttaaccaacttggcggtggagacgatttgaacgatccggcaatgcagtatcaacacacgtcagccaatcgtaggtccagtcaaacaacgccctcccatcaacccccggtgatgatggtcgagctaccagaggcggcccaagaactacaagctcgcaaaatggtatcggaaaatctaatgctactaatcgaggaagaagaaaagaacaaggaacagcaggaaacgaccagtgaaatgggcgacgaggcacctccaatctatttccggaacgtcatcttcggtccagatgttcccattcgcatcgactaccatggcaaacgggtggaactgtcgcgtggaccattggccggcctgttgatgggacttggacagttgcagtgttctgagattcgcctgaagaaaatatcctatcggcacggattgttgggcgttgatcgactgatttcgttcctcctgcaagagtggctgcaggacatcaagaagaagcagctaccgaagattcttggaggcgttggaccgatgtattcgcttgtccaactattccaaggcatttgggacctgttctggttgccaatcgagcagtatcaaaaggatggtcgcatcgtgcgaggcctgcaaaggggtgctcagagcttcaccgcccggacagcgctagccgctctggaaatcaccactaggattattcatcttcttcagattacggctgaaactgcgtacgatatggtttctccgggaccgtcggtgcgtcggggtcgtggcaataaaaagggaaaacggaaacgactgcacccgccacaagacatccgcgaagggatgtccaatgccatacagattgtccgagagggtatcagcgaaactgcccacaacttggtcgagctcactgccctggaacacgaccaaaagggttacaccggtgccgtaggagcggtaatgcgacaaatcccacccatcgtagtgcagccgatcgtactggccacgcaagccaccagcaacgtgctcggtggagtcaaaaaccaactagtgccagacgcccgcgcagaagcccgcgaaaagtacaaggacgatgtggaataggtgcgcctctttgtccagatgttctattttatagaaaattgacactaattttagatttttttttgtgattttatcggacctacgctgttctagaacgataggttccatgtttatgattttgttttttcaaacatataattttaagttgatttagttgaagtcgatttaggatctacttacccggtttttagtgaaacgaagaaaataatgtgataaacagttaaataaacaatatactatagcagctaaattgtgtatcgaaaggaatacgcaatctgtaacgtaagtcgcatggagttcaatactaactttttcggaagcaggttttcgacagaatgagatagtttgtcatccaaaaataaaattagcaccaactaactagtaattcgatatgatagatgataaatctctctacaagcttatatttcaatttgataaactttcaatctgataatacttctgagaagagttccatctcttgtcttctaggttattgtattgcgaactaataagagttatcaatatttctacacaatttagatcttactatatatatcctctcagaatcaaaaactaatctgatcgaatcggtaatgatagaaattgacaagttttcccgagagtgcaggaatggttgttatgtctcttctgtcagtcatttattgaagaacataattttgagaatgaatgaaaccacgtgctagacataatttaactagagagcaatgattgtgagtgaacgtagttaaccgaaaggattcgtctaacttaaaacctatattcgataataagtacatttagtatgcatcgatagagttgaggaattattgacgaaaaataaatacaccgccgaagcctaaagacttgacgagttctacaa

SEQ ID NO: 715 - DNA, 864 bp, Aedes aegypti
atggaggacgaaacgatattcggagaaaagcaatcgatacgggactcggcccgggccctgaagaaatatggcagcatttccggtggtggaagtgggagtggcggaagcggaggcagctgtcgatcgccggccctcacctcggaggcactgatacggcacgatgtggacaaaaccgacacgctgcaggggatcgcgctcaagtatggatgtagtatggaacaaatccgtcgtatcaaccgactcctaccgacggacaccatctttcttcgaccattcctgatgataccggtcgacaaggactccccgtactatccaaaagatccatcagccatcatccggcccagttcgctgtcggttcggtcgaccacgatcgccggatgtccggccggttcgtcggcctgttccaccccgatagatccgggcataagcgaggaaagcgccatttcccccgaggaggaaagccgcaaaaacatggaagagttcctagggaagatagattcgtcgatcgcaacgacacgaaagtacattgccgagtcgcaacggaatagcgagttcatttccagccagagcgacgataatatttttagttccggtgctagtatgaacagtagtggctactactcgaaaccgagggcgtactcgacggcatcctcctcttcgtccatctcttcatatcaacagtatcatttccacacgccctcggggactggcggaggggccagttcatcccatcacaaacgacaaagctcctcggggagtgcagcttcagacacgagtcaactgatcgtaatgacccaaggcaaacgggtgcagagttccctccaaaagctggaaaagcaacaggacgagctgttcgaattgtag

SEQ ID NO: 716 - DNA, 727 bp, Aedes aegypti
atgacgagcggaatttcggcaattttctggcgattcttccactggggtccgctgacggcgataagcatcatcaaatcgatcacctttatggccctgtacctgaacgccatgtggtggccaccgaaccgcaccttcggagggttccttaaccaaaccgtcttcctgatgctgtccgccagcaccgggttcaactttgtgatggcctcgctgacggggcccaagttcctgccgctgcggtggcgcccgaagaatcccgaagatgaacagttcctacagtactgcggcacctgcgagggcttcaaagcgcctcgatcgcatcactgtcggaaatgcgatcgctgtgtgatcaagatggatcatcactgtccgtggatcaaccactgcgtcggatggggcaaccacgcgtactttacgtgcttcctggcgtttgccgtggccggatgtatccacgccacggtgatcctgtgcggagcgctgtacgccggattgcaccgggattggtacgtgtactacgggcagtactcgaaggcaacggtgtacttgagtctatggagtttagtcctaggggtgttcaacgtgggattggcgattggtgtgatcatcgcagttgggatgctgttgttcttccaagtgcgggccatcgtgaacaatcgtaccgggatcgaggactggattctggagaagcgagacatctacgggagggtacggaagataactttcagtatcc

SEQ ID NO: 717 - DNA, 2397 bp, Aedes aegypti
atgggaaaaaggtggcagctgaagacgattttggcggtggctttgctgcaatgctgcgcggtgcagagtttctacgttcccggagtggccccggtcgagttccggaagggccagaagattgacgtcaaggcggtcaagatgaccagcactcacactcagctaccgtacgagtattactcgttgcagttttgcttgccgaagaatggaaccctggtgtacaaaagtgagaatctcggtgaggtcctgcggggagatcggatcgtcaatacgccgtacgaggtccggatggcggaagatgtgcggtgtaagctgttgtgcaatagcagggataggccgctgaactgggaccgagagcagtcggagaaggtggccgaacggattcgacacgagtactttgtgcatttgatcgtagataacttgccagtagctaccaaatttgtgaatccggacacaaacgagcagcagtttgaacacggataccgtctgggtcttatggacggcaataacgtgtacattaacaatcatctgaagttccgattgttttatcatatgcacagcgagaatcaatatcgagtggtcggtttcgaggtggaaaccctttcgattcacaaggatcaactcagcttcgaaggcgatacgtgcagtttcccggagagtccccgaccacagcccgtttcggtgcatgctggccatacgcagctgttcttcacttactcggtcgagtggaaggaatcatcggtgaaatgggcctcccgatgggatatctatctcggcatgaacgatgtgcagatccattggttcagcattatcaactcgttggtggtggtgttcttcctctccggtattcttacaatgattatggtgcgaacactccgacgagacatcgctaaatataacacagacgacagcgtcaacatcgaggatacgctggaggaaaccggttggaagttggtacatggggatgttttccgccctcctcggcatccaagactgtttgccgccgtcattggtagcggaatccagattttcttcatggctatgatcacgatcattatcgccatgctgggaatgctgtctccatcgtcgcgaggtgccctgatgacggctggaatcatgctgtacgtgttcatgggtttgatcgctggctatttctccgcccgattgtacaaaaccatgaagggacgaaattgggagcgagcagccttcctgacggcgactttgttccccggactcgtgttcggcacttgcttcattttaaacttcttcatctgggatcgcaattcgagtggtgccgttccgttcggcacaatggtggcacttttgtgtttatggtttggaatctcattgcccctggtgtacctaggatattactttggatttagaaagcaagcctaccagcatccggttcgaaccaatatgattcctcggcagattccgcaccagcactggtacatgaatctgggactctgcgtgctgatggccggtattctgccattcggggccgttttcatcgaattgttcttcatcttttcggccatctggcagaaccagttttactacctcttcggttttctgttccttgtgttctgcatattggtggtaagctgtggccaaatttcgatagtaatgacgtacttccagttgtgcgctgaggactatcgctggtggtggcgaagtttcatcgtgtcaggcggctcagctgtgtacattcttttctacagcatattctacttcttcaccaaactcgagattacggaattcattccaacgttgctgtatctagggtacaccggtctgatggtgatcacattctacatcctaacgggaacaatcggattcttcgctgcgtacagctttatccgtaagatttatggcgccgtgaagattgactaaatggttgctgccagcggggcacccttgagctattaacattaacgatcgataatcgatgtgcgtgagtgtgtgcattacgaatgtgtgataaaaaaaaataattgattttaagactgtccgaaccgagcgactgagagcgagcgtctttatgttaagggaatgagtgcaactgcgattagttttgttctttttaaattgagcgatcattttcccactgaatcattttaatcctttcgccaaatcactgcttctcgatgatgtaaccgagcaaaaattgaatgtcgtacctaaactataactaagcaacagagtgcagaatcgctcggtgatcaacaagtgactttaagttttagatgtggttgttctagcgagatccaatgacaaagcagcagacagcgtcggaaagaatgcaatcactagagggcaggaattgcattcagttcatgtgtaagaacgtctcaactacaaaagtgaaaaaaacattggatataaattcttaaatct

SEQ ID NO: 718 - DNA, 3095 bp, Aedes aegypti; identical to SEQ ID NO: 337

SEQ ID NO: 719 - DNA, 1784 bp, Aedes aegypti
caatcatgaagatggctgacggttctacgatccttcgaagaaacagacccggaaccaaagctaaggacttctcaaactggcccgatgaaccgttcgaagagatggacagcactcttgcagtgcagcagtacattcagcagatgatcaagaaggatccatccaatgtggagcaaatcttgacgatgcccgacgggcaagacgagggcgtatggaagtatgaacatctcagacaattctgcatggaattgaacggtttggcggtgcggctacagacgcagtgttttcccgccacctgcaaccagatgacggcgaccgagcagtggatcttcctgtgcgcggcgcacaaaacgccaaaagaatgtccggcgattgactacactcgtcacacgctggatggggccgcttgccttctcaatagcaataaatatttccccagcagggtctcaatcaaggaatcatcagtgtccaagctcggctccgtgtgccggcgtgtttatcgaattttctcgcatgcgtactaccaccatcggcgaatatttaatgagttcgaggaggaaacgtatctgtgtttgcggtttactcacttcgtcacaaagtactctctgatgtcgaaagaaaatctgatcgttccgattccggaaggagaattgacgcccggcgaaagcgaggcttaataaattgaaactttttacccctaaacctctactgctgtaatgccctttctggactattaatggtgatctaggacagagcgttttatttgtgtaaaggattgattttctttatatttttgttccaaatatgcaaaaacaacaaccatgttgaatctaagttaatttgttcattgtccttcgaaatgcttaataaaagcttatatttgaactttcatttctgtgttgtaacatttgaacgtgtcagcaccaagattttcctatttcgatacatcttatacaggacaacagagcatgacatggaagtttataatcaaaggaaaacatatttatactatttcaattatttaataaccagggggaaacacaagttaatgagaatatgaatatattggatcagcgtcattcgaaatctgtataatctactcgacaaaaaaaacgtgtaaaattaaaagtatttaacgattgaacagtagtgtaatttatataaaaagtatgtagactacaaatataaaaaaataaaacaaacaataactatctcttaagacgtcgcaccgatcttcaaaaggctgaaggaaatattgaaatgtaaaccagaaaacaatgcgctagaccgtgaacaacaaccatccgtcttcggggtcttgtgtatttcatctatctaatgcatgcgcaccctgtttgttacatctacctattttctaaaacacccagttaatgaatgttgtggggcgaaaaaatgtatgatttctttgaaaaagaaaaaaatgagggaagaactaagccgcagtgttaaaacaataagttcgtaggaattttggtagaagcaaaacaatgtacgtgtcagttttttaagctaattgaagttataaaaaatccaaaaaagggaagcattaatacacgacaatttataagattcgcaacagaaaagagaatacacagtgtttagtaactattatcagctaactatatcagtagcgattgaaagaagacaaatgttgaaggaaatcaccggaggtaaaagatgtttacacctgaaaggagagattatgtaattaagccttggaaaggaaagtcaaataaaatcattagtaatatgatcatttaatcgtt

SEQ ID NO: 720 - DNA, 1631 bp, Aedes aegypti
tccactctctccgtgaacgtctcgtaaaatggcttatacctgcggagtaattacggtaattccaagtttgaagaacccctcggcaatcgcaaacaaaagtgcattgaatgacagctgcaaatgcataccagaatcaaaacatcgtgcgttatcagtattttccgaattttctcacaaaacgtggagcatcaaaattggccaagcgcaggcatcgtttcggcacagaagcaccagcgccagcaagcttcgacgacgaaagccgacaacaaacatggccattgggcggtaccaacatctgcacaagcggaactgcatcggaatgttgccgttgttttgttccttcttggccggcgtgtgcctgaccgtattgatcggtggaacgcgacaaacgtgcgaatcggtgggtagaatatatgagccggaaaattcgtactttttgatgctgctgatagtgagtgccccggggaatgtcgagaggcggaacgccatacgggagacatatctgaatttgcggccacggatgttgaacgaaagctaccaagaggaggcgatctacgttccgctgtacgacggtgatacggggcagctgcagctggagagtgtccagaagcaacgggaattgttgaatgggtatcgccggtggcaggagaagaagatcaaaaatataaaggtcatcaatttcaaagtgaagacgttgtttgctatcggaacgtacggtctgtcgaggagtgagaggaagactatctacgaagaacagcgggtgtacaatgacgttctggaactggaggatttgcaggattcttatgcgaatctgacaacgaaaatcgttcagagtatgagtcatatcgataaggtgtatgatttcaagtatttgatgaaagtggacgacgacagctatctgaagttggaccttctatcggaagatttgctcagttactacgaaaaactccaccaagtgcgaatacaccacaccaatccgatagaactgtactggggttatttcaagggagcagctaccgtccaacaacgaggccagtggaaggaaacaaactacaagctttgcgaccgttatcttccctatgcactgggagggggatatgtgttatctaaaaacctcgttacgtttatcgctacttatggttcgtcactcaatgcctacaaaagcgaagatatggctgtgggaacatggctcgccccattcggcaacatccatcgtcggcacgatgtccgttttgatacggcatggatgccacggaaatgtcagaactaccatctagtgctgcacaaacgaacggcacatcaaatgaaggaaatttacggcggacagctgtgtagtcatgaggagcaagagcaatcgccgcagacccagcaaccaaaagagtacttttacgattggtatgtccctccatcacagtgctgtaaggttttagtatagtaggtatatgtaaggaaacaaatcgaccaccagtattttactttcggaccaacaactaatgtttagtttaagacaatgtgaacatgtgatggcagagcagcggaatcgtcacggtacggttctcctaccttgatgcagctttaaacggtagcgttaggacacacgattgggtttattctacgactggggtgaggtg

SEQ ID NO: 721 - DNA, 1729 bp, Aedes aegypti
tgcgtaaaaccaatttgtgtcagtgaaaaacggatatttcgggtgaaaattgtgctctaaagtgttgaaagtagtctcaaacggaagcttaagccaacggccaccatgctcgacctggaggtggttccggaacgttcgctcggatgcgataattgggagtttattctcggcatgcacttttcccaagctgtggcaatcattcagtcgcaggtgggaatcatcaagggcgtgcaagtgttgtactctgatacgactcctctgaacgtcgacattatcatcaacctgccccaggatggtatacgcctaatcttcgatccggttcagcaacggctgaaagcgatcgaagtattcaacatgaagctggtcaagctgaagtactacggtcttccgttcaactcgcccgaagtcgttccctcgatcgaggagatcgaacactcctttggcgccacgcacccgggagtgtacgacgcttccaagcagttgtttgcgctgcactttcgcggcttgagcttctacttcccggtagatagtaaactgcaacccggttacgctcacggattgggttcgttgcactttcctagtggcgcttcaccgatcgtttcgaagatggctctctattgcggtggaagtgtcgcggagagccgtcctcccccgttgccgttgtcttgttacaatcaacagctgtatctggagtcggcatcggtactgagaaactcatctggcactcggggtatccgtttgcagctgtatacggagggctctccacgtgcgttggaaccaagaaagcaatgcttgacacgggaagtcatttttggtgatagctgtcaggatgttgctagtaatctcggcgcaccttccagagtgttcttcaaaagtgaagataagatgaaaatacattcaccaagcgctcaccgtcgtgtgcagtcgaaacgaagcgatttcttcttcaattatttcacgctcgggatcgatgtccttttcgacgccagaacgcagcgtgcgaagaagataatattgcacaccaactatccggggcattacaatttcaatatgtaccaccggtgtgagtttaatcttcagttggcacctgacaaggtcactgaagacaccccgctggattcgccggtaaatatttcggcctactccaagtgggacaccatctcatctcggttggctccggccgagcgtcccgttgtgctgcatcgggctggctcgaccaacacggcaaacgtttttggatcgaccttctgctacggctatcaggacatcatcttcgaggtaatgcctaacaactacatcgcttcggttacgctgtaccatccgtcgccgtattccaacgagtatgccttcggaagcggcagtagtgccagcagcgttagcaacagtacgcgcaatttgctgcaggacggcaacaaaagtaatatccgcgttagcgcatgaccggccatcagcttcaatgaactgattctcgatggacggtatctaagctgtgttaactagttcggaactggcattctttctaaaacgtgcatgaacatattattcttagagggattatgcgggaaggtattcactactccttcctcatctggtaagtccgttttttttctattttatctctaagttagaccgtcaagatcgattatggtaagacacagtagtagaatgtttcaaattggaaaatgtttcatacatatagcatgtgtagtactattttttcaattgaaac

SEQ ID NO: 722 - DNA, 2800 bp, Aedes aegypti
gaaacgatcaaccgccggtcaacatgttcagctttcgctggttgatttcgttcggtcctattctgatagccgcccagctggaagaacttcgatggtacaacgatacccgcgattggtaccagcaaaatctgtacatcccgaatcgggacccggagcttccaccgaaccggtatgttccaccgggaatggacgctccccagtacgagttcgagtgtgacgctcacttcgcgttgatctggaacgagctgagcttcctgcggagtttgctggataagtgtacagggtgcatcaaggagttcacgttcccggttctggataaggattactgctacaatgggctgtgttacagcggcgtagaatgtcacgaacgcagaagaaagccgtactgtggactgtgcccggtgggcttcgacggagacggaaggaactgcactcgaagaaacgagtgccttaagaagccgtgctacccgggagtggaatgccagctggtggaaactcctccgtactttcggtgcggggaatgtcccggaggatacgaaggtaacggagcggattgtcaacggaaggacacatgcgggaagcaaccgtgcttcgcaggagttagctgtcagtgggcggagaatgctccgtacttcaagtgtggatcttgtccgtcgggttatgaagggaatggcagatattgcagtcgaaatgcttgcctacaaatgccttgctactcgggcgttgcatgtttcaagaagaacgaagcgccgtactatagctgtggactgtgcccggtgggaatggctggaaatggagtgctttgtgcaaaggactccgaccaggatggatatccggatgttgcgttgagctgttcggagccgcaatgcaccaaggataattgtttggcgctgccaaattcgggtcaagaggatctgaatggaaacgggattggtgatgtgtgcgagaaggatgcggacttggacggggtggacaataagtacgacaactgtccgtccaaggcgaatcctcggcaggaagatcaggatggagataaaatcggagataagtgcgataactgtccaaaagtgtccaactccgatcaactggacgtggacggagatggaatcggggacgtttgcgatagtgatttggatggggatgggtgggagaacgcaaacgataactgccagtgggattccaattatcgacaagaggatcaagacggcgatggagtaggggacgtctgcgataactgcccggtgaatgcgaacagcaaccagaaggattcggatggcgatgaggtaggtgacgtatgcgaaacggatttggacacagatggagacggaattcaggacaatcgggacaactgctggaatgaggcgaatgccgaccagttggattcggattcggacggaataggcgatgcttgcgacgaagacaaagacaatgacggagtgctggattcggaagacaactgcagattggtgcccaattcggaccaactcgatcataatatgaatggcgtcggcgatgcctgcgaaaaggatttcgacggagacagtattgtggattggttggataattgtccgaagaacagccgtatccagcaacccgatttccgcaattttaaaaccgtagcactggatccagaggggtcaagccagcaggatccttactgggaaatacgaaatcgaggggcagagatattccagaagtttaacagcgatcccggattggcgatcgggcgggatcgcttggtaggggtggattttgaaggaacgttctacataacggatcagtgggatgacgattttgtgggtttcgtgttcggatacgtcaacaataggaaattctacatggtttcatggaaaaaggctaaccaagattactgggaaagctcgccgttcgacgccagtgcgacgtccggcgttcttttgaaattggtcaacagcaaaaccggaccgggcacatatctgcggaacagtttgtggaatgatgcgagtgtgacctcacagaccaccctcttgtggcaagatccggtcaaaaagggttgggtcccgaacacttcttaccgatggaaactgctccatcggccgtcaatcgggctgatccggttccgactgtacaagggatcgcacctggaagccgactcgggcaacatattcgatcggagcatcagaggcggtcgattgggagtgtactgcttttcgcaggaggaagttacctggtccaatctgatgtaccgctgtaacgaaaacattccgaaggatatctatgaggaaatcataccgaagttacgggccaagcagctcaagaagatcgaactgctgagggttgacgacaattggtaggacactgcaggggtcattctggatacgatattggtttaccaaaactttgaccgaaatatatacaaattttagaaatccttagagcaagatattgaatagggtcgatagatcagtattcgccaccttaaggagaaacaatgttttaatgaatcagtcaatagactgctgaatactatcaatacgtacaataggttttaatccatgctaagttagaagaatataaaaactgatcacaaacttcatatttatagcgggaattgaggtcgcgattactggatcacctgctccagttttcgcgccatggttttaatttctgttcctgaattcgccatatagattgatttcttacgggaaggggcaaatacaggaacactataacaaaaaaaagaagcaaaaacatcttaagattgacgcttgatatagcgtgtgctatttctcttgatcgttcctctctttgggaatagaga

SEQ ID NO: 723 - DNA, 2570 bp, Aedes aegypti
cgacgtcttctaggcagcaacgatgtgttcggctaggaagtgcaaaaatccgtgaaaacccgtgcttgagcagcgttgaaaaccgagcgattatcgattctaattaggtttgcgacatactcatacgaataaatattcttagatcaaattaacaatgatgaaatccccggccaccatccccatcatcatcggggtttcactgctcagtctaggcggtgcatacatttacaccgttttgaaaaagaaaaaagaagaactcgatgagtcagcatcccagccggatggaggaggattctccaagattgccaaaatagtacggatgatgagcaaagaggaagttaagattatagagataacactatccaataaagtaattccgctggtaatcggacgaaaagggtacaccttgcgccacatacaggagactacccacactaacatacaatttcgagatctagatgactctcatcagatttgtgagattcaaggatcagaagcgggcatccgcgctgccgaagacctgatcatgaaggaagcttcacgacagattaccgaaactgaagagatgctcgttccacagagtgcatgtggaaaaatcataggtcgttgcggtgatgagttgcaagaaatttgtcgcaagtccatggccaaggtatggattgaaggatctcgtacgttgggcgatagtcgtcgcatcatgatcactggaacgcctaagcagataagcgttgctaaatcgcttattgaaaagaaagttaaggaagacgccgacttcaaaagaagccaagagcacctggacatccgtcgtgaaccacgtattcgaactccgccgagcagcatcacggcaacaccgatcccgagagaagtgcttcctccggctatcgaaaaactcaagtctacaggttcagtcagtcagttggaagtttttgtatccgcagttatttcaccgagtcgtttctacttgcaactagtcggtccccagtcatcagaactagatgttcttgtagacactatgacccagtattacaatcagcaagacaatcggaacatacaccggatacgtaaaccataccttggtcaaatagtggcagccgagttcaacgccgatggaaagtggtatcgggctgaagtgatcgccatcttaccgaatgagttccaacccggtgaaatagtgttggatttgttcttcgttgactacggcgataatcaatacatcaaaccttccgatgtgtatgagttgaggccggacttcctagcccttcgcttccaagcaatcgagtgttttctggcacacgtagagcctaacaacgtgatcagttcaacaacgggtgaagaggagtgggatcctttggcgatcaccagattcgaagagcttacgcatgcggctcagtggaagaagctactctcccgcatagctacatacaagaagaaaggacatcgtaataatcaagaatctcgagaaggttcacctattcctggcgttgagctgttcgatgtcttagcggatggtgacaacgtcaacattgctctggaattggtaaccgagggtcatgccaaggttacgcccaactttggtgatctctgccggagtcatgtactgcggctggacggaggctcacaggcgtctagctccgaaagactcaatgaactttcatcagcttccaacactaccgacacagtatcgtctgtagttacgacgattcatcccatacggatgccgccgcaggagacggctgaggcggagaaacctagttcaacgacatcacctagaagggaaccagcacacaccagtagtaatgaacctgtcgtatcatcaattgagacaatcccacaagagcctaacaaaagtctcactgatcatgatgcaacttccaacggaagtcccaaagcagattttgtttcaactaacgatttcctacaagctgaaaagacgaattcatcaacacttcgaaacgaaagttttaacgacgtaacaagtaatagctatacgaatggtaagccgaaaagcaacggttcaatgatgcgagattggaacgaacttgtggaagaagagcagcaaaacaatggtctgataaattaggattaaccaatttgtcctttttcgtaaattcaattttaactatattgatactcgcctttaactgatagatttattagtgtaaatagcttgatttggtttcttactgtatattgtgtttgaatatattgatttccagttcatcaaaattgttcttattattattaagtagattttagtcttgatgaagataaaaactattgtacttatgaaaaaagatatgatgaaacaacatatagctcatggaatgaaaaaagtgaattatatttttagaagaaaagtgtttaaagcattgtttgagatgtattataggtatgttaaagacaaatagatccaacaaagattcaatgaattctgacagtagcttttgaagcctagttgaaattaaacatgtctgaatagactttttagatatagaggtcgctgattatctaaacaatttgtttaattatacaaaattctaaaataaacaaacctttgatgtttagcaatg

SEQ ID NO: 724 - DNA, 1053 bp, Aedes aegypti
cacaaacattgaagcgaaattgttgttgtttggtagctttttgttgatatctgcagacaaggattcggcttgatgattcgcacatttcgattgtcgttatctcttgtggttggctgtttgtgcctgtagaaagctgctttttcgttcagttcaactggttgatcttgcgctagtgctcgaagatactttcgtttttgttgttgtttttaatttgtataattaaaacatgaagaagttcagcttaatagttgcagtttgtgccaatggtggaattggcatcaaaggagatctgccttggagattgaggcaggagttgaaatacttttctagaatgacgaagaagatcactgacacaagcaaacgcaatgccattatcatgggccggaagacttacttcggtgtacctgagtcgaaacggcctttgccagagagactgaacattattctaactcgagatcccagtgccaatacttacccatctgatgtgatggtgtgcaaaagcatgcaagaagcactgacaaagctagatgaatctccgttggctaatgaaatcgaaaaaatttggattgtcggcggcaatgcagtctacaaagaagcaatgcaatctgagagatgccaccgtatctatctgacggaaatcaaggagacgtacgaatgtgacgcattcttcccggaaatcactagcgagtttcaactggtgaagaacgatgatgatgttcctgaggagatccaagaggaaaacggaattcagtaccagtaccgcatttatgaaaaacttcctaaatgatcatcgcaacatgttattaatcattgttatattcattccactaacataatagtgacaaatatgccctaggcaaaagccacgttaataaaaatgataattacgaaaagactaattaacagtgtatctttcttagccttgtagaccacacatttttgtaacgcccatgaatatttctgcccgtttcgcccaggagctaaaaatatgttgtaaattaaagttcagtttcatgcacttggagcatcaaaataaacttattaaaatcgcgt

SEQ ID NO: 725 - DNA, 1750 bp, Aedes aegypti
ttcttctatctgtttctgttgctacgaatgggagtggacggtgccaaaagtttcaatcgaaccatggaaaaactgccgcagtcttttgccatggagcctcaggatcaaacggccgtcgttgggtcgcgcgttaccctaccttgccgggtggtaaacaaatcaggacagctacagtggacgaaggatgactttggattgggaactcaccggaatctgagtggattcgagcgttactcgatggtgggcagcgacgaggaaggagatttttccttggacatttttccggttatgcttgacgacgacgccaagtaccaatgtcaggttggaccggggaaatttggaactcctgggattagatcgcgctttgcaactctgatggtgctggttccacctgagccaccgaaaatagtacaaggcgattttatggttacgactgaggatcgagagattgagctagaatgcgtttcgattggaggaaggccagtagcagagatcacgtggatcgatggcctggggaacgtgctggtgaaaggaatcgagtacatgaaggaggcgttaccggacgcacgtcgttttacggccaaatcaattttgaaactgacgcccaaaaaggaacaccataacaccatcttcacctgtcaggcacaaaataccgctgaccgtacgtatcgttcagctaggctaaagctagaagttaaatatgcaccgaaagtgagcgtcaagataattagcggcgacaggattgtggaaggcacagacgttcggtttcgctgtcatgcagatgccaacccaccggaggtatcctacaagtggtacataggacacgagatggtgaacggaaacttctccacggaattggttatatcgaacatttccaaaaagtttcacaatgctattgtcgagtgtgaggcacggaatgttgtggggaaaagtgaagaaagcgaaacactcaatgtgcactacaggcctacctttcgcaccttgccgaaatccgtcgaggctgacctaaatatggtggtgactttgtcctgcgatattgatagtaatcccgtggcggatattgtttggattcacgatgaaaccggtcgtgctgtatcctcgctagccaaccttaccattacggtgacccatgaaacggccggtcggtatctgtgcaaagcttctgttcttggtttcccagagatagaaacggaagcgaccgtctatctcaagggaccacccagtatcatctcacctcggcagcagtttggaacgattaccgacaccggtcaactggagtgtgaagcgttttccattccacaggcgaaacatatcatctggctgcacaatggtcacgaaattaacactagccacgaaacaggctacagcatcgtagagagtgtgctgccggaaggtgtcaagtcaacgttaatcatctacaacagccagcaggagcactttggtggctacaattgcaccgtcataaatgattacgggatcgactttgtggaaattgatttcgtttcgaaaggtaggtaattgctctgtggttcgaaactttcgatgtgcatgtgtttgattgaatgtgagaatgaagaatggtagctgaacgtgtgcaatcaatagttgttgtaacttttgtgaaatcattaattaaacccaagatgaaaagaatatcaggttttggataattcgttgaagtgtattgcattaagattatttttatggcctaatctaatacgcattcctcaaatatagttcctatttcgag

SEQ ID NO: 726 - DNA, 982 bp, Aedes aegypti
atgtcaaaatcaccaatcacaactttgtgtgaagcctgcttagcgtgctcacatatcttcgacgtcgatgtcgacgtcgtcgtccctgtttttagttgttctctcgttgccaagcagtgcggttcggttttctacatcgttttggtgagtgcgcggcggtttttgtttttcgggcgttggattggaaaaaacagtcccaaaatcactcggaacattgacggcgtttgtttcgaagttggtaccgtttgtaagctggaaaaaaatgcacgcaatgtattgaaaagcagtggaacacttagtggaactttgttggcaaaattgtgcagtggaattgacactgtttcaactcgaagcagagtgaagtgattcaagcaagtatatctaacaagtacagaaagtaaagaaaaaagaaacacgacgacagcagttgtgtgttgttggcattttacatggtaaaagaagaagaaaagtgagtgtatccaacggaaagagagcgattcttattgattttcgcgaatgttttcctcctggcttgcaataatagtccgcggttgacggcgggaagaggcgaggagggattgtggttgtggccgtgagctgggaaagcgatagtccagttctcgcggctggcgaagaagcctcaaagtggaagagtggcgaagtggaatccggttctacaaacgaccataagaatacatacgtacacgtactgcttggtgctactccaggggggtttcttcttctttcccgatccgagatagatgtattgtacggtgtccatgtagacgaagaagcaaaagtgcgaagaatagttcttactgaagacgaccgcgacgaagacgacgacgagaccccatcaacaacaacaacaaccagatcacggatgttgggtctctgagaaaggaagtgaacataaacgaccaccgctcgcgtgattgatttagttagttttagtttcgtgaagaagtgaaaaaacccatcg

SEQ ID NO: 727 - DNA, 1680 bp, Aedes aegypti
ctgttttcatatagtttattgttgtttatatatatttaagttcatgttgtatagaatgttataattgtaataattatagttatttcaccacttttttgttgttttacacatcatacctgtttgcttgcgctcaatatattattagcaataataattattttaataatagtaataataataatgatgttctcagtttcggcttttctacaaacccccaacttatccgccagtaaaataaaaacacgtctactactccctactgtttaccatttgttttacatttgtgtgtgtggttgatttattcccgataaggtttgcatttgtctagacataaaatccctttacacacaatcggttacgactatgtatgtacgacgatgacatcactgtgtccagttgtgtgctcctcttgattccgttagttctagcccctaggtttgtttctattgttcgttctaacaatggggggaaaaggggggggggggcgaacggtaggtgtgctattattgttactagattttctcttacctcgaataaatgctaccaaaaaaacacaaacacacacatgtttatttcttcggataaatttcctacatttgtctcggtgtgagtgtgtttctcttacttctgttctcttcagtccttcgtgttactgtggtatgggttgtcccccttttaaatttctgtttctcgtccaaaattttggaatcttttcttctttgttccaagtacatgaatcaaaacccaagtgttcctttctggtgtgtaaaaacctatccagctctcacattccgtcgacacgattgctgcaaaattcgcaaaaaggtactgttttgtttacatattattttcagtttcttaatcgtttcgaaaacaacaacaaaaaattgcaagagagacctctaatgttcgtttttttttgttaagattatccgatttgactcaagactaagaagagaaagtttgaatggttagatttcagcgtttattttatggcgcacaattagtactgaggggcatcctaaagtagaggggggaggggcatacaacaacgaacaaaaataggaccctaaactaactatcactaatggagttttgtgtttttttttatctcggttttatcttcccttgcttcagaacacaatttgtaaaccaccttacaccgaccggatggtttcttcgcaagggtttgttcgtttacttacattgttttagtatattccacttgttgtaacacacttttgatttgttttcaattggtttctacaaagtacatcaacactcgctacaaacattcctctcaggacattttcattctctgcgtacgtggaacaaattgctttctttttttcttttgcttcctactcggctatttgtatatatggatacgtgggcaggaacgaatttggaacggaaaccgaaagctactgtagttttgtatagtttacgtttagattgtgagaatgtatcgattaggaatatataggaaaattggcaaggcagcggtttctgttttgatggaattgtttgatttcataatggcgggcgagcgcggaacgttgtacgagcagagtcagcaaaatcgcgatcccaagaatagatcaaatcagataactcgtctgataatggaccagagatgagatttagatactgttagtatcagcaaacaatcattgtatt

SEQ ID NO: 728 - DNA, 828 bp, Aedes aegypti
atggaggaggaactacgttgtcctgtttgtaagcaactgttctctagtccggtgctgttgccgtgctatcatgcgctttgcttagcgtgtgccttggacatccagacaacagcaaatcaagtccaccacgctccggccgctcatttgcatcaacagcactcgtcgcagtcgtcagcttcatcagttagcactggcagttcaagtgctaccgagagcgtttcttcagatcaggatcaggccgacaaagttagcattttgagtgaagcagactctggggtaatttgctgcacttcacgtccaggctcgtacgccggcactccgaatcttcaagggctgttgttcccaccatcgggttcaggatcggtattctcgctcgcttgccccatttgccgtaagatcgtattctttgacgaacttggcgccagaaatttgccactgtatcgggcgatggaatctattgtggatcgcttctgcgaacgtgaagccttgagatgtcagatgtgtgaaactgaaccaccgaaagtggcatcggtcgtttgcgagcagtgtgaaattcgttactgcgatggatgtcgtgaactttgtcatccggcacgtggcccattggctaagcacacacttaccaagccgcgtggcgcctctcagcttcgagagtcgatctgcggcgagcataacgagccacttgccatgtactgcatgggctgcaagctgccgatctgtagtcagtgcatggccgacaaccgtcatcagtcccacgacttgcaatcgatcatggcgatgtgcaaagctcaaaaggtgagtcatttttgtttttggttcctattgtaa

SEQ ID NO: 729 - DNA, 1101 bp, Aedes aegypti
caacaacaataacaacaacaacaacaatgaaaaaccaaagggagacatccaccatgacacaggcctgaccgacgtcgtgatgaaagtggcccgcaaagaactacgcgaagacaaagcgatccgcgagcaggcccttgaacagatgcgcgaatggctcaaacaaaaccaagatgtcgagaacgttcgcactgacgatctgttcttactcaaatttctacgcaccaagaagttcagtgtcttcatggctcagcaaatgatcttgaagtatttgaaccttcggaaggtccacatgcacttgatgtacggactggacttcctttcgccgaaattgaacaaactgataaacaacggttacatgtttccatcgccagtgcgagacaagcatggcagacggctgatcatcggatttgcaagaaacttcaacccggaagagcacgacagttccgacatgtcccgagtgcacgcgataacctacgaaaccctacaggaggacgctcagaaccaaatcatgggctatgtacacattggagacttcaaaggcattaccacggcacacgtctcctgctggaatccgaccgattttctacgcatgatgaagtggggtgaacagtcgattccaatgcgccacaaagaggtgcacctggtgcacgttccgtctgcagtgaaatacgtcattgaagctggaaagtcgatgattagcaagaaaatgaaggaacgacttcaggtaacgattgggatggcattctgttacgactcaaatcgttgagttggacgttatgttatatacatcgtctacacttctttacagtcgctaaggataggagaaaggattaaagcaaatgttgatgggaataagattagtaggttgatcatcaaaattgacctaagaagataatctttttccttttagggagctttatatgcaattactcaacaaacttccaaagattcccacagaaggttctttcaagaaaatagtcattttttctgtacagagtttttaagaaataagttaatgtttttttttcgggaatcccaagtacttctcaaaatgttcctacgatgatttctcaagccattttcaaacgatttccttcgtga

SEQ ID NO: 730 - DNA, 816 bp, Aedes aegypti
atgattaatacaaaggacgaagtcgtaaactggttcaaagagttacagagctacaaccggatagatacgatgtgcaccctgctcaatatgtgccttccattcgagctgcgcttcctggggacgtgtttggaggagctcggccggcgagatgcccaggaattgcgtggcatcgaactgcgggtcaacaacccccaggagttcatctcggatatcgcttcctgccagagcggagaacccacggatcggaagaaccgccggaagatggccatgttcctggcgctgatccgagcctgcaatcatacttgcgtgaacgaactgttcaagacgctcgaaggctggggcaatcgggattttgcgcgactctttgacgaggacgtactgcaggagctgctgttggtgtacaccatggccacgaaccatcccgtcttctcgttcgagcaacgcatgaagtgcggggacatattcaacaaactgaagagctgcgagctgaaaaccagctcgggaggaggtggtcatcacccccaccatccccaccaacaggagactgatagtctatcgaatgcgacgcccccgccgcctaacagtgcggggacgcccttgggaatgggaccagggtcggcgcaaactcagcctcctcagcctcatcccatagcatcccaacagcagccaatccctatgcaaatcccgttgccaccccagcaggcagtaccgccgccacccactcaacaacagcaacaggtttcgcttccgatcccgggttttccgcaggcgccgatggcacaggtaggtggcttgttagcgaatcattatttttag

SEQ ID NO: 731 - DNA, 1475 bp, Aedes aegypti
atggtaatacttgaaggagcagctatgttacaaatcggaaataaccagtatctgcagccggattacatgtcgccgttgccaacttcgttggacgccaagaaaagcccgctggcactcttggcacaaacatgtagccagataggagcagattctggaaatataaccgtcaagtctttggtttccccatcggaaaagaacaaaaaatcttcatcgtcatcatcgtcgtcggtttcatcggctggttccgtcgagaatggacctcactccaacaactcaagatctccgtcggtgaagacagaaaaatcagacgcatcgccagaaatcaaacttgctttcaagccatatgaaatgaatgtgctaactacaaaggtgaagaatgatgatcgtccgtcgtcaaagatgagcagtggaaattatcgctcatcatcgcggggtagtgcagaatctcctcgtgcaggaagtgttaatggaaacaagaacggtgaaataagtgaaaatggtaaaagtacacccgagggtagcagtaggaaaaccaattctccaaatgatcgtgacaaaacctctgctagccctattattcgtccgggtgccgaagttatgcaagctggaaaagatatgtcaggatacaaaccaagtgcttacggaataaacccactaaccggattaccgtcgccgtcgggcattgatcatacaaatccagcgttcagacctccgtttgctggagccttcagtcatcaccatgctgcaatgttagcggcggcataccctggtgcagctgctgctggtgccaatccatacctaagttacaccagggtcaaaactccatctggcggtgaaacactggtgccaatttgcaaagatccctattgtactgggtgccaattctccgcacacaatcatcaaatgatgatgggtggtcagtgccctgcaggttgcacgcaatgcgatcatcaaaaatacagtctcgccatggccatgggaactcttccgccgggatatccctatccaccagcggccacgcaaccaggccgtccctacatgtgcaactgggttattggtgattcatactgcggcaagcgtttcaacacgaccgacgagcttctgtcacatcttagaacacacactgctaatttgtcggacccagcggcactggccttgcagcagcaactgatgccgttgagtggaatctttccaccttcatcgctacatcgtggatatccaaatccacctctgagcccgctttccgctgccagatatcatccctacgctaaacctggagcattacccgctggccttcccggatccccttatggagctgcattcaaccctgctgctttcgggcaatattattctccatacgcagctgccttgtacagccaacgaatgggagccgcagttcaccagtaaaagcgccccttccattcaaagaatgcccaggtgttattttctatgaatctgtgatattaactttattc

SEQ ID NO: 732 - DNA, 1213 bp, Aedes aegypti
aaacagtctattacgatgaggaaaatacagtctactatgtttgtcgcttccaacagttttccataaggtttcttttacgttagtcgataagtccatgagtcttcctatcgtgtaggtccttttgaattcgactcatagaaattttctagcatacagtagatcagctgtatcacagaaaattgcgtgaaatacttcacttccataacagggtacaataggtataccatagcgcgcccgtttcaccaccagaagatccaagcattaacaaaccacgtcataaaatttccaatatgggtctcagtaatgcttttcaactgtgcagtttgatttatgctagtttgaaggtgatttacctgacgatagcactgtatcaggtggcattttgttcaagtgtggagtgccccaatgaaaactctataccagccgccttcgtaatcctattggtgatgatattccccgctttgatgattgccggaatattgaagaaaaatctccaaatgcttcgcatctgcaaagtgtacaacatcgtggagaaatcagtgatcatattcggccagctggtgatgatcatcatgatggaacgagtctaccagctctaccgtcgacgccattacgtatccgacgaggaagcaatgtccgttgagctggcctacggactaatggcaatcggagtcctgcttacagcactctacttgattttccgcaactggatgatcgatggaaccatagcatctatcaaggaggatctctacatcttgaaccgggacaagtatgtcatgcaatacaactgcgaggcatgaacgcatcaacctactttgttatgtgtggtcccacaccgcagaatttgattgttgtttaatgcgatacatttttgtacatcgaaggttactaaaaagtaaccagactaagaaagttgaatagaaagtaagaaagttgttgtgaaatgatcgaaaaacagtttcatgcattattattttcattattaatcaaacgaagtataaaaaagactaactatgcttcagaaaattgatttcttcaaaagaaattcaagcttctcactgttagtaaagtagtttaaccttctgtctgtgcgagaaaaaaaaatacgttgcctgtgctttgactccaaatttaaatcgcgatagcttccagacatttgaacgaatttcaatttttctacagttctagaaataaaattgaattgagtttttct

SEQ ID NO: 733 - DNA, 3915 bp, Aedes aegypti
atgctgatagagtattgtgatggtggtgccttagatagcattatggttgaactagaaaaacccttaaccgagccacaagttgcctacgtatgtaagcacatgtgcgctgggctaaaccacttacacaagaacaaagtgatacatcgcgatctgaaggctggcaacgtattgctgacaatggacggtggtgtcaagttggcggatttcggtgtttctgcgaaaaacaaacacacgcttcagaaacacgatactttcattggaacgccgtactggatggcaccggagctggtactgtgcgagacctttcgggataatccgtacgatttcaaagtggatatctggtccctgggcatcacgttgatcgagtttgcccagatggagccaccgaacagcgaaatgtctccaatgagggtcctgttgaagattcaaaaaagcgatccaccaaaactagatcaaccttcaaagtggtctaaaagttttaatgaatttctcgccaaagcgctagtaaaagatcctcaacaaaggccttccacggacgttctcatgggacatccatttatcgctggtaatctggattccaagccaattaaagacctgttgcttgaatacaaagcagatgtcgttgaggaggaattggtggatgaagaagcagaggaaccccgcaattctgcgctcccactcgacttggacgatgactcatcgtctctacaaagtcaagaaacctataaacttccagatactcccacatccctatcgaaatcatccagagattcgaaagaatcgactcccgttcctgttgaagatgatagcaaagcgaaaccgggagcagcggtcgcagtcgcaaccacggctgcagtccaatcgccttctgatgtcgtcaattcttcggcgcccagttctcagtcagcgacagctgcaacaacgcctgtggctagtgatagtaatagtaatgtacaaagtgatatcaagaaatcacctacaacggttcctgctccagtattaccacccaccgcacaacgacctacaaaagaaagcgaaggtgaacagactgaaagtggtaacaatagcaacagcagcagtgctgaggttgaaaagaaaggtgtcatcaaaaaggagaaaggaccggctcctccacctcctcacactccttcatcgccaagcagtcgaaatgctcctagcgttgatcgccctgatactacagtgatttcaaaaccagcttccccgttgacgttggaacgcgaaacaagcgtagacgaacttgtaaaatcacccaaaaaggaacacgctccatctcctccaaaatcttcaccgaaagagggtagtccatcttcatcgccacaaccttatgaagatgacggtgtagtggtgacaagttctgccagcagaagacttattccagacgacgacacagttgatctaagaatcgaatcgccaaagcccaaagatgaagaacttttaccacttcttgccagtaacgtaagtcagataactgtggttacaagccatccgccggtgataatcgacaactcggtcgtaccatccggctcatccggcggtggtgacgaggtggtaatcgtttccaacgagctgaacaaaacccacgtaaatgaatcgtccacggacgatgatttccaatcgttggacagcttggaaaacctctcgccgaagtataggaaacagcacccgcaattgcaacggtccggcagtgggcagatagcacgtaagttagatgaaagtgaagtgctgatcgtgagtccggtcttcattggcgaggatcaggacgaacagcagcaggagcaggacgatttcatcaatgatgagctacatttagttaataataataataatcatagtaacagtaaattattggacactagtcatgtttcggtggtcaccgttggcgaggaagagatcaaggtcaaggactcttcgcatctgatcaacagtggtaccagtcatcttcttatgcagcaacagcagcagcatctgcagaaccatcaccatgattccattagcgatctatccaacgtgagttgtggtcccagcgaatcgagtgatgatgttaaggtggtggacatgatgcttgtcggatcgatggatggtggaggctcggtacgatcggccagtacaccgttgcatcatcaccttcaacaacaacaacaaccgcaacatcaccagcagcatgcgcctagcggcaaacagctggatcgtagcgatgccgaaagcatagcaacaacaactagtcacgacagccgcgaacaatcggtagaagaggaagttcaacttcgtcgaaagcctccgcccgctgaagtcgaagaggacaagcagcgaaatttcagcaaggaagaaattcatttgcaaaatttgaagaagaaaacgcgaaaacggacgcgaaagttcgagattgacggtgttcaagtcacgaccaccaccagcaaggtgatctacagcgatgaggacaacaacaaactgtacgacgatcatctgttccgcaagcaggaactgcgggagctcaagatgctccagaaggcggagaagaagcagttttacgacctccagcagaaggaagccatcgccaaagagcagcaggagaagaaattcgagcaggaacgtcttcagctggagcgaacgttcgaagccgacatggacgtgttggcgcggcagcaccggcaaacggtggaaaagtacgaacagcaacaagagactgaacttaggaatacttccaagaaaattcgtgccgaacaggagcgagatttaaaattgttccgcgacagcctcaagcaggaaatcaggctgctcaagcaggaagtcgacctcctaccaaaagaaaagcggaaagatgaattccggaagcgtaagactgcgatggaaatcgagcacgaagaacgagagaagagtttcctgtccaccctgtcggagaaccacgagctcgctctgcgacggatcagtgaaatctatcgcgagaagctttccgctgccgacaaagggtatttgcaacagaagcaaacggcgatgagaactcgagaggccatgctttgggagctggaggagaagcacattcacgacaagcaccaactggcgaagcgacacgtgaaggacatctgcttcatgcagcgacaccaaatgatcattcgccacgaaaaagaattggatcagatcaagagaatgatttcccgcaaagaagaagaactgctgaagcgacaaaccatcgaaaggcgagccttgccaaagcggatacgggccgagcggaaagcgcgagatatgatgttccgcgagtcgttgcgaatttcgatgaccacggatccggaactggaacgggagaagttgaagaagttccaggagcaagagaagaagcggtacaaccaggagcaggctcgtttcgaaacgaagcacatgaaacagctggaagagctgcgagctacctcagacggttccattagggagctggaacagttgcaaaacgaaaagcgtaaacagctgctggagcatgaaagtgccaaactgcgcgagtgcgacgaagcgctacagaaggaactgcgcgagtggaaatcgcagcttttgccgaggaaacaggctatacagcaagagcttgacgagcaggtgaacgagtacgagataaagtggggtccagtagaccgacgcgaattcgatggtgattttgtagttcccccggaaatccggaatcgcaccaactccttgaattcccgttcctatcgactacatggtggtttgcttagtatttcccggtcccgcaccttcctcgcgctaccggtggccaatggacgcaacagtatacacagttcagtgccagatttaagccgttccgttccaaatactcccaattcggctcataagctttcgctggcatcgtcctacgattcggtgctggaggaaaacgagaatgagaatatggca

SEQ ID NO: 734 - DNA, 483 bp, Aedes aegypti
atgttggaatggcactgtggcgggtggtgtgactattcccatcgccgtcccggctgtcgaggacactgttggcggtggcggaggaggtggaggaggcggcggaggccccgggaacaccagcgagctggcagacgatcccggacgccggccgcgtcttcccggtcggttctgcggaggcggatggtgatggtgcggcaacgaggtcgatgggagatagccaccggacagaccggcaggggacggaacttcccgtccctggtcctcatcttatttgccgtccctgtacggtttgcagtacgagtagcggtggttcatgtgctggctgtaggaacccgagtgcgagaatcgcttcagacacttgcagcactggaatggtttctcgccgctgtgcagtcgcttgtgctctgtgagatggtgtttgtgcttgaaggcctttggacactcgacgcatttgtaggggcgttggcctgcaggagaagatga

SEQ ID NO: 735 - DNA, 1337 bp, Aedes aegypti
aggcttgtagctaggttttattgattgtgttcagtaagaaatgtgatcaaatcaagttacattttgttatacaaagatatatcttgtttattttactacaaaatatgtcaacgtgattaggcagtatctcttcagctgctttgaagcattaggaacagtttcctgatgctgatttacctggtatagcatttaatgccgtattgattgcaaatgtcggttcaaaccgtaacccaaaaggtgacctacctgtttcttcaaaaaaatacaataactttctattcttacataaaccaaatacaacgaacaagagttatttccctggttctacaagttgggcgccacaaagttcaaaaacttcataaacacctcgaacccgatgaagcaagcagcgttggcggggaaggctcgcaacatgaccggagttacgcccttatacagtgccagcgggccttcgttcttcatcagctctcggaatacatcgcgaatgccattcctgtaggttccttccggggccgtctgcagtcgagatttgagcacatcggccggcattccgatggcccagttggcaatacctgccattcctccggcaaagatcgttatgagcagagcctttccggcgtcgtccttctcgccctcttttggcgcgaaagccttcttcacgtattcgtacgtgaggaaatacattcccgatgccggaacgtctcgaagcaaggtggcaaacgatcccttgtagatactgcggattcctccctcggcgtaaagctgcttcgcacagtctaccatgccgttgtatttctggggcacgttaccgccctgttgaatctgcagcaggcacttgatccgttctcccggggccatcacagttgtcgtgaacactccagagaacgctccagcggcaaacagctgaaggttactcagttcttcgtccggagtggtctgttgcaatcgctttcccacgccaaatccgaagaagctcatggcaaagattggcgccacgccagctatcggagcggacattcctttgtacagccctcggaacccctcgttgcggattgtcttcttggcgcagtccagagttccggcatacatcgggctttgaccagttgccgggaggggcatcgtttgtagccgcacctttatcgtatcgagcggatgcccggccagaaccgtacagatccctccgaaacctccggagagaaagtacttgatcggactcacattttcggacattttcctgcttcttcttcgccctagtctactcgggacgtattatacaaccagcaaaagctgatatcaaccaacagaaaaaaaatgaccctgctcgaaaatgtcgctat

SEQ ID NO: 736 - DNA, 1797 bp, Aedes aegypti
atgttaaccgaacatcctacaacaacagaatacgtaccatattctaaacaaatcacttccagtagcaaattgtcgacaccgtcgtcgtcgtcctccgagaagatattgctaaatgtgacaacgacagacacggtgacaatcccggaacagcaccaggaaaagtcctctacacctcaacagcaacacgaggcagcggcactattgcagtccacacctacgacgggtttaccgagtactactgcagaactatcgaaagccactggtgctgtggtgccaacatcgatggatcaatacaaaaccaactatagcataaagttcacaacttttcgaccattactagtacctactttaccagatattcgacataggattattcattcgatgccttatcagtccaagcatcatcacgagcgacattggggtccatttttcgaagagccactcaacgtgacctccggagcactgcaagtgggctaccatttgtcaacggaagcaatcctcaactgtagggtaggaatgcttaaggataaaacggtgatgtggatccgaaggacgaccgataaggtatcgctcctgacggtaggcaacaatacgtacagtggcgatccaaggataagagtcaagtttcaatatccgaataattggcgcctacatatcaacccaatcaagaatgacgacggtggcttgtacatgtgtcaagtgtctacacatccgcccagagttttcgccaccaatctcacagttctagaaccagcagttcggattgtggacgagatgggatacgagttctatgatcggtactataaattaggtagcacaatcgatatatcatgtcaggtgtcgttatcgtatttggcaaccctgccaacaaaaactccaccagcagcgccggccaacacttttcagctgatggcgccaatcgctggggatgcgaaaacgaccagcactaagctttcgaacgagggagcgacaactagcaataacaataaagataagacccggcaatcgttgccacagaacgtcgtgtggaaaaaagatggcgtcgcgttaccgaaagatatcaaactcagctcaagcctttcgaaacaatggttcaacagcaggctgtccataatacaggcggaacgagttcacagcggtctctacacttgcaccgtagccgagaagcagacgacatccgcacagatccaagtgctgaacggtgaaactccagctgctgttcaacataacggttcacacgcagaaagggccatttcggcacttgtcttctattgtgtcctttgctggattcaactgcacatatcctatacgtaatgttaccggcagaacccgcatccagtccagcgacaatatatcaatcactttgaaaaaggcgcaaccatcaagattaattattccgctggcagcaagtcactccgattcgctgatttctggtcgacatccgccattaaccggcagaagcagaagccctgtgcagatggtcacaatcagcgaaattttcgactagcatccgattaggaaggactgcccgtgagaataatgaagcgcctccggtggagataaagcgaagagaatggaacccaaaagtcatgatttatgtatcatttttcatctcttgtacaacttgaccgatctcatcccgtaaaagcgctcgtttaatcgaccgtttcagtcgaattgttcagttattgaattatgtcagcgattcacaacggctttgaatatgagttttaaatgagtttgatttttttgtcaaaatactgaaactatgtaacatatttgcagccttgatttttt

SEQ ID NO: 737 - DNA, 747 bp, Aedes aegypti
atgttgaaaattatttgtatacttgcgctaacaatttccagtgttattagcattcctgtagaaacgactacagggtctaagggtttggaaagaccttctcccatcaacccggatgtaataagtgagccaaaaccaaaagaagcttccaccagcactcctgatttagcttcatctacggcagcaagtcacatacaaaaaattccagctaaaggagctaagttaagttctgaagtggaccaacagaagcagactctcaaaagagattcaatcaaagaagaccaactgacaagaactacgacgagcaaatcttcaaaaactgagagtccatctactgcttccatacctgaatcccataaattttctgatgatacaacgaagaaagtgaggcgtgaagtcgaatcttctgaaacttcaacaaaccgctcaacaactactactcgtgctccaattctaagcaatgccgacgagaatgataacacacctccacactttatccgaccggtaccagtcgatcagatcttgaagaatattcacgacgcaccaaagcatcacgaaccatctcaggtggtctcactacatgatcatgtgacttccattgctccaactactattgcgccaacggacagtgaggatgtgcccaagagcagtggcgatcataagctccatcacgcatataaaaataaaaagaatgatgatcaatcttctgaagaggattcaacttcaggagaagatgaaaaagatcagtaa

SEQ ID NO: 738 - DNA, 1508 bp, Aedes aegypti
ctctcggtggccaacatcgagtgctctccgggtagccagcaaggtgataactacatgtcgatcatcaagcgcattcaggtgcgcggcaaacggagaatgtgcaacgggaaaagcaaaggtaagaaatgggaaacatatgtcttatggcggcaaattgtgaatctccagcggcgaaagctgttccgggcggacgaagcctttgccaacgaaatcaacgcctatgggcagctggtgccggtgatgaggcgattttcccaggatcagctaccatttccggtgtgccactatgccggcaaggacaccgaaggggacctgattgtgatggaggatctcacctgcagcgggttctacatggtcgaccgcaggcggaatctgagctaccggcagtgccggactgttctggaggagcttgccaactttcacgccgtttcgctagcgatgaaactagtcaaaccagtccaattccacaccatgaaggaaaaggttaccgaaattgtatacaacgacgctgcagccgaattctacacccactcgctggaaacttcactacgcggaacgctggacagtctacactacagcaatacggatggcagcctcgatgcccccatcaaagcaatagaaaaactcagcggccgactgtaccagataatgtactcggcagtacgtaacagtcatgagccgtggaaagttttgtgccacggtgacacctgggtcaataacctcatgttcaacgaaggccacgatcaggttaaactgattgacctgcaaaccatgcgatacacttctcccgttattgatattctacatcttctctacactagcaccggtgtagagataaggaacgcttacggagatgaactcatccgcaactaccagcaagcgctagtcacagctttgcgaatatacgtacctgccagcaaaagcttcgtccttccggcactggaggccaccttcagctacgagaacatccaagccgagtacgacgatcgaattttgtacggattgggcattgccatgtggctcctgccagccgttaccttccatccggatcacattcccgacctggaccaggtcaccatgaacgatttcaagaccaaaaatcatgaaaaaaccatcgcacagatgctgtcgaccgattaccacactcgcatgaaggacaccgttttggagttctaccggaagggctttctggataatgtttaagtagtaggggtagctcagagggaagattttttaacattttagtattaatagtcgaaatagccacgctcgaatgccattccatttatttcgattttaaaacagggtcatatatattttagttttaacaagattttttgccaatactgcagtacacaaactagctagtcaaatcagatattggaaccaccctagaataattaacttaatattgacttcacatacaaggaaatagctttcaaacgttaaccaaatgttgcaatagactaaatgtgaatatttatctaaataaaacgatattttaccgg

SEQ ID NO: 739 - DNA, 918 bp, Aedes aegypti
tttgaaatatattattttatttgcatcactttgatatttcaacaaaaaaaagtttttccttttacaagtaaaatatcattctcctctcgttttcttacacgcctaaaagtgtatttgtggggaaaaaggttatatccattaaatcacatttgcttggttcttacttcgtttcaggggttccccaccctcaaatcgagcgtgtatgtgtgcgtgtgtgtggcaccacccaccgctcaaacgaaattttctttttctacagttcaccaattcaagtcaacctacaagctaagagagatattgcttccttaccggctaaaatcgcttactcaactaaattctttaactctccaaacaatttggaataccgttggatttcgtaccaaatttctacgcgcgttagattcgattcggttttttgttctggggttttggttctcgatttctgagaaaaatgtgtattattatatgtgtgtatttgtgtgtttaagaggttttgatctttgttgtgtggatagattgttgcattgtcgactaacatcacgcttcacttccgtttcgtccgctaaaatttgatacaaaattattttgcttaaaattggctgtcatttccgactaagactatacataaatacagtggttttttgcttacaaaaacacagcggaagaacaaataatttacaaagcaaagccttacgtgctaggaaagtattttcattgtattctagtgttttcttgatcatcacattggctcgaaggatacttcgagtggggtaattttgatatctacgaggaagtgttcgaatcactaacacacggcactgtatgtgtctccatttatgataagggccgaggactcatacagtccgtgagtgttctgatggcacttcctccagggtttcgaattttttggattgtgcc

SEQ ID NO: 740 - DNA, 5745 bp, Aedes aegypti
atgtcacaaaccagtcaaggttctacgaaatctacggaaaaaactttaatttcgaagcctatcagaagttcatcttgcacaatcccttcggaaatacttgaatttgactactcctacggatacgattgcaaacggcctttcaatttgtgcaaaattgacgatgcaacgcttgtattcgcttccggcaatttgatacatttcttcgacgtggcaacgcaaaccgtaaccacgcggcgaagttcgaccggtggaggaatagggtgcatacaaacgaatcccaatccagagctatgtcacttgaccgtgggagaaaatggagtcaacccaccgatcatcatctaccagtatccggaaatgagcgtggtgaatattctgcaaaatggaacaactcaagcgtacagtcgcgtggattacagtgctgacggggaactattggtttcgcaaggttgcgatcctgactacatgttaaccatctggaactggcgcgaagcggaaatcattctacgttgcaagtcgttctccaacgatgtgataaacgtaatgttttcaccgacagttcccggccatctgacgtcatgcggcctaggtcacataaaattttggaaaatggcagaaacgttcactggtcttaaacttcaaggagagcttggccgatttggaaaaaccgaaatttccgatatcgtaggaatacttccgatgcccgatgaaaaagttctatcgggttgccagtggggaaatgtgctcgtgtgggaagccggtctcatcaaaatagaggtttgtcgcaaagggcggaaaccatgccatcaaggtccaataacgcagataagtgtacgtgacggtgaagtgatgacctgtggaatggatggatacatcaggatctggttttgggaaactgttgagttggcagatccaccggatgatgatcgagtagtgcagattgaacccattatggaatatagaattggaaacgatatctgtcacagtgaattgatatgcttgataaagaaggaaggagactttcaatggtatgctcaagacggtaatggaggaatttgggaatgtgacataacaccggcctacaaaccagcagaacctcaacagctgctgaaatgccactctggaccaataatggcagtgcaaaccagtcctactacacaccatgtggccactctagggcgtgatggtaggttattcatgtatgattattcgaaacggaaaatggtgtttgaacacagattcaactcaagtggtcatgccatgatttggcttcctgtgacactggaaccttctggtatgatcttagttcttggttttggagacggattcattcgcatcatcaaggttaacctgaattcatcgagcaccgaatcgcctgtttgtattgtacaaataattaaatctcactcagaaccaatcacaaccctggcaattaatcagcgagaaactatattagtatcgggttccgatgacaaatctatatttgtacaccaattgattagaggcctgtccgtcatcaatatagaaccgataggtttagtatacactccatcgcctgtttctactatcaactggaaaccaaacgcttttgctactgctctgattgggtgtcgtcatggacaggttctggaaattgaacttcctgaaaccccaacagactataccaacatatcataccatctgaaatccatcgatataagacaattaacattccaattagtgaaatcagaaataaagcgaaacattcggattgcggaaattgaagaacataagcaacaaaagcgtgctagaaaaatgaaaagcctggaaagaattcgggaggagaatccaggagtggaaataaatgaggacgcgtttttagaggattcggaagacgaagaggagttggagccattatacattcccaaggttccaaacgccgtattgtgggctcaatacaccgaagataatactttgtggttatcgatgggtggctacgatgccggattcgtctatgaatatgaattcgatgacgaagatcctgtatcttgcacacctgttccgggggcagaagataccgagattaccacatatatctacgatcaacaatatttgattttcggaatgggcgacggatcgatacgagtaaacaaagcgaaggaagatttccgagatttgaatgaatacttcaccctcaatatgcattacaatctgaatggcaaaatttctggactggcctttagctacgacaatcggcaccttttcagtgtcggaacagacggtaatttgttttcctacaagtggtatgcttcgacagtaccgacagccccaccaaagccaaagtcctttgatatgtctttaccatgcgttgaggatattcaggacccgacttatttgtcacttgaagaacaaaaaattaaacaagaaaacgacagaaaggctaaacttttgaacgatcagaaaaatgaaattttaagtacagtagcagactatcggaaacagtttgagcaaatactagccagaaatcaagctctcccggagtctcaacgattcacaatggacgagtttactctagatgaaagaataacagcagacttgaaacaagagctgcaggaaaagatggatctagtccgacggaagacggcatttgatgtggaaaaggcaagactttcaggagagaaactaaggaaattctttctagaagaaatggaacacgcaccaattgaagttctgggagtgatagttccaacttcagtcaaatcgttcaggattggtaaactcacggatgaatactaccagactgtagaagatttggaacatcgaatcgaagaggaggaagctagaagaagaatgataaaagttcctgatcatgccaagctagatcgtcgtgaagactctcagttcgacaaaaaagaatcattcctcgatgggctaactcaatcaacaattgatttcaagctagaaacaaaaatgcgtcgcctattggctaaatatcgtgagaggaaatcaaaggaacatattcgtaagctggagtgggaagatctgaaaagccgaaaaccagacccaaacgtcaaccatcccgaagatgatgcagccatcaaggatgcgacaagtaccatcggggactacaaattgaaaacggatcacgaatatgaaccaaatgaagaggaactagaaactacactcaccaaataccgcgacttgctacaggtgagaaaagagatgttcactatccgcagcaactacaatgaagaagtgtttgcactaagagagaaaaagaaagcactcaagaaatatgtagaagagaagaaacggaaactcttagagatccatgaagaaattcctgaacatcagcggaaaattcctccagttgaagtgatcatcaataaggctcttgagtatcctgaaaatgagtttgaaatggaagccgatttgaactcatgtgacgaagatgataaagtcaagaagcagccgttagaattgggaagcaccgaatatgcagaacgaatgcaaaaatatgttctagggttggcaaagttaccaaacggtgctccttacacacctttgggaacagagtgggaaaaggagctaagggaaatgagattaatgaaaaaaatgttcaaacaggataaaatcatagataaaattagtaaaagaattgatgaatttgatcttgagctaaccgagctttccgaacgtcgaatgcaggtcgaagttgatgccaagtatctagaaatttatcaactgaccctttatcaagaattatggattttgaaagactttgaaaaaattgagcgtaagatgatcaacactgtagaagaattaactatagagaggaacagtttacaaaattctgttgttgaatccaaactgtacatagaacaatccaaacaagatatggaacaaatacgatcggaacaaaaagccatatttcatcaatttacggccagttgtgcagataacagtttttcaccgtttctgaaacgtatctacaaaaagaagtacaagccatgcaaaatcaacaacgacagagacgaaacggagtcctcgagcgagtattcttctgaggacatagatgcgttggagaatgctgttgatacagaagtcagtaagatattcctagatgaacagccgtgtccaattgggtgcgatccggaattgtatgaactcactatcaaactgaggaatgagaaaatcgagttggaaaaaagatactacgaagagaacagatcactgaacgaaacaataaaaaccatggaaggattcaagatgaaactggtatacgtagaagcaagacttaacgataagaaaagagagctactaaacttcaggcgagaaaaacaagcaagattgaatgatatagatacacttgttatactgagaatggatcaaatgcagtatttcaggacagaaacagaattctatgacatcgaaaatagtttgttgttcaacaacgaaaaactaatgaagttgtatgctagggttggacagctggctatggaaactctggaaaccaaaagaaagcatcggattaacgttgttcatttagcacgaatgcgcacagatattaaatacatggatcaacaaattatcgtactcagagatgaaatcaatcaagcaatgatcaaaaagtttggacgaataatcaatttggacgaattagaagagactatattacgaaaattcgccttcgatatgagagcaaatatggatgatgttaagaaaagctatgcggaaagaactagagatctcaaaagcctttactctaagaaacaacaggagctgacaaaagtaattcaagaaggcacagagaagttacacgtcttaactgtattacaggaagaatataacaatctaacaaaaatgctagcgcaccagaaaaaggtaatggaaaagaaagatcaagtgccggttaattatgaatcagatttggcaaaacttaaagaaatcgcaaaagctcagaaagaacaaatcaatatgcttcaaagagaaattcgaacattgagcatgaaatgtaagccacttagttctgatactgctcaaatcatggaatctttgcaaccgggaatgaaaccagggaaagtaatggatgactcttcatatcctaatgttatggattcagcacctcccagcacaagagcaagttctccggacaacttcttatataatgaaatttcatcattggttgacgatttcctggttgaccatttgggaacatttgttcaaaagtcggatatcaagcgagttgttacccacttgtctcactatctatccaatataattgctaattttgcacctgaacacgccagcgatctgcttccacatattatcgaaaacttcaagtcatttattccagaggaacttctcttgactattcctcctcagtctatcgccgagttgattgagaatatattccgcacattcaaggaaggctatgatattgacaccaaagagatcctcaacgaaatcatcaacaacagtttggagatggtgcctcctgcttcgcaaaactactcttacaacatcctagcagatatactcaaacaagtcctatccacgctgcacatcaccgacataaaccatccagaaacggttaacttcattgctaacggccttcggaacaaaccgggaattgatccaccagcagtcaatgttgaacagctgtcatatgagctactacaatatgcatcagagaacatggtagatgatgtcagtcaagacactatcagacatatcattgaaggaatcctgcatgttagcgctaagtaa

SEQ ID NO: 741 - DNA, 579 bp, Aedes aegypti
atgaggctaaatgctcttttagaagacgtttttcagctccacgtcgaagaccagagtgctgttcggggggatcaccggggggcttcctcgggttccgtaggccaactggtggggcacggtcaatcgtcgcttgcctccgaccttcattccggacactcccaaatcccatcccttgatgacttctccgcggcccagggcgaacttgaagccgggtcccttgttggtcgaatcgaacaccttgttgttcttcttcaggcgaccttcgtagtagacggcaatcttcttgcctggcttggcttctgcgccaccgccgactttgaggtcttccacgaccagtccaccctggagggtgcgtgtcttagcttcctgctgctgttggccatccttcttcagttccttgggagaagctttgccattttcgacgccgttctgcttggagcccttcttttccactttggcaaccttggctttcggttgttcgtcttcggattcgtcctcctcgtcatcatcatcatcctcatcctcgtcttcatcatcgtcatcttcatcgtcgtcgtcactgtccgcttctccgtctaa

SEQ ID NO: 742 - DNA, 1265 bp, Aedes aegypti
cattctgcttctttcagatgtttactcacaaacgacctaattggactgacgggcatgttcgtccagatgtacttgcatcgatacctgccgcaggaaatcgtcgaagctaacatgcaccatttctgcatcttccgggtgatttggcgcgtgttcgggatcagttccggctgtgtcgcgtttgtcatggctctggagcggtacatcgcactgacgaagccgttcttctatcataagcatgtgtctgataaaatgataaggagatcgatatttctgctctgggcggtgggagcattcttcacgtttctccctttgttcggcttcgggatctacttcgacgaaaggaagcagacgtgcatccgatatcgggacgccaccgacccaaccaacgtcgcatacgcctatctgttcttcagtgtcggcataatcctatgcacgggaatagtgatatgcaatctcagcgtacgcagggtattatatcagtcccatcacaaaatgcgaagacagttccgctcaatccaaccgatgccgatggtggaaagagccaccctacggagctcgcagaaatcggcaagctttactgactcgtccatcttccggatggtcggcgaaccaacgacagaggaaatacggttcgccaaactgatgacgttcctgagcatcagtttcctcgcttgttggcttcctcagatggtctcaatccttctggcgcagctgctgaaaccggacgtaaaggcacggtttacctggttcttcgctctgtccgacatactgatcctgctgcacttcatgctcgatccctacatctacgtgctactgcgacagagtggccgcagcgacttacgaaccatgatccggttggcgtggccagcgcgaaaagctcccgcgagggacaaaggacgagacacggttaccacgacggatacgagtgactgagacgggggatgctttcctctcgtcaggattgggaatgttgtgtcaaagcttaatcaaaaaagcctatcgctgtaccaaaatacagtaaaacaaatgcacacatacctattctagtactgcaggaaaaaaaaatactcaggaatacatttttttggatgttcctgagcgccgaaacgcaattttatcagtctaccatcatcgctttggtcaaagttcaaataactagtgcatacgtaacaaaccaagtttggatgtgatcaaacgttgtcgaacaacatacattatgttaccaaatcaagagaaatatattatccattggatatggttaaaat

SEQ ID NO: 743 - DNA, 1628 bp, Aedes aegypti
gaaagctcctggtggaaagatcgggtttcggttcgaggatcgtcactggaaaaaaaaggtggtgcatctgaagaaagcctttcctttcgtttttcgttgatcgttgatatcgatatccagggggagcgaatcggcaagagtcatcgtcatcgctgctagatctggactaaagaagcagcatttgtgtggattctcgacggtttctgaactgcaagtcttgatatcgatttattggttggtttttgaagcgcatcacaatgaaatttaccccgccgccaagttccctccgggggccactcgtcatcccggacaagatcatgatgggcccggggccgtccaactgttcgaaacgtgtcctcgcggcgttgaacaacacctgcctcagcaacttccacgacgagctgttccaggtgatcgacgaagtcaaagacggcctgcggtacattttccaaaccgaaaaccgaaccaccatgtgcatcaccggttcggctcacaccggcatggaagctctgctgtgcaatctactggaagaaggagacatcgtactcatcgccaacaacggtatctgggcagagcgagcgatcaatatggccacccgatatggagcggacgtccgggtattggggggaccggccgacaaacctttctcgatgaccgatttcaaaaaagcgatcgaacaacacaggccgaagtgtctgttcgtagttcatggagactcgtcttctggacttctccaacctctggaaggtctggggaaaatctgccacgactatgactgccttctgctcgtagatgccgtggctagcctttgtggtgtcccgttctacatggacaaatgggagatcgatggcgtctataccgggtcacagaaggtgctgggagccccacctggaataacgcccatttccatcagcccgaaagcattagaagtaattcggtcacgaaaaacgccatccaaagtattctactgggacctgttaatcttgggcaactactggggatgctacgacgagcagaaacgttatcatcacaccgtgccttccaacctgatatttgctctccgggaagccatagcccagatagctgaagaaggtcttgagccagtcattcggcgaagacaggaatgtgccgagcaaatgtatcgcggtctgcaggcaatgggtttagaaatattcgtcaaagatcccgagtaccggttaccgaccgtgacctgtattatgatcccaaagggcgtcaactggtggaaggtctccgaatacgccatgaacaacttttcgctggagatccagggcggatttggcccgacgatgggaattgcgtggcgagctggaatcatgggcgagagttcaacacttcagcgggtaaacttctatctgtatgcgttcaaggaatctctcaaagctacccatccggattacgtatttgagaaaaagaacggccaaacaaatggaacgaagtaacctcgtcgtacagttgaactactgtatgcagaaaaaggataaaatcaatttttaatgttgtttttgaatgatcaaactaaatagaagattaaacaactgatattcaataaatttatcaatatattaattttaatcaaattatcaatttattaattttaatcaaatgat

SEQ ID NO: 744 - DNA, 1332 bp, Aedes aegypti
agacggcgcataataaagaaatcgccaaaaacatttacttgcgatacatgtcaggcacagttttccaaagtaatggaatatttccaacatattagaacgcacggtgcaaagcggtttcagtgtaaaacgtgctcgagatggttttcacgcaaaacagtgtggaaaaggcatgaggcgaaacatttaagtactcccgaaagagtaccgtgtaatctttgtgggaaagagtttagtcacaaacaatctgtggttcggcatataatagaaaagcatcaaaataatcgaagatttgagtgtactatttgtggggttagatttgctcaaaaaacgcatttgcaagctcatcaaagtgtccatagcgaagcacaatactgttgtacaacatgtgatgcaaaattcaaaagctatatatctcacattaattctcacgttttacatttgcgaagacatacaggtgaaagaccctacaaatgtcaagtttgcggcaaagcctttttagctaacataatgctgaaaaatcacatgcttattcatacgggagaaaaaccccacaaatgtgaaacttgcggtagatgtttccgaataaaagcacacttgacaactcactacctaacgcatacacacgagaaaaaattttcatgtcaaatctgttccaacgcgtttgcctcgaaacgtactttgaaatcacacatgaaaactcatctgggtacactaaaaagactaccgtgtaacctatgctcaaaggatttcagctgtaggcaggctttaagacggcatatagtacaaattcatgaagaacggcgtatgttcatgtgtcctatttgtggcaaaagtttcacccaaaaaacacatttacaagctcataaaacgcacaacctaattcataccggagagaagcctcataaatgtgaaacttgcggcaaatgctttagatccagaactcatcttacgacccatcatttaacccatacacaggaaaagaaatttgcatgccagatttgttcgaaagcttttacattgaagacttcacatgttatacatgaacgcgttcatagaggggaaaaaccttaccaatgcaaagtttgcgacaaagcttttccctgtagtaacaacctatcaaggcatatgcgtattcatacaggagaacggccgtacaaatgtgaaacctgcggtaaatgctttcaggaaaaagcaaatctaaagacccataacttaactcatacaaaagaaaagaacttcgtgtgcacggtttgtaacaaaggttttacgctgaaaagtacgttgaagtcacacatgaaacgccactcagtatgtgaagaaggcgatcagtaa

SEQ ID NO: 745 - DNA, 480 bp, Aedes aegypti
gcgtactcttgctcgctcgcacactctttctctcctgctcgctcttctttgcctatccgcttttcctcggctccttcaaattacaacaacaataacataaaaaataccttctcgtctcgaaacgacacacaatgtggaaaattgatcaaagacgatttttcattttcatcttctttcgtcatcaacgcgaaaatacacaaattatgcgttcacacacacgttcaccgacattccccgaaaaagagaaactctagaactgaagttgctgcgtgctgcggcttgcacgggaaaatcactcttgatattctcgttggaccattcttcgctttgactaattcctttcggtcgttccttctcataaatcatttgcacctcgagcgatcaacatctacagagaggcatgcaagggtgctcactttcccatctcaaacgcaccaccatccggagaaagagcaaagtagcactttgatttttcagtaa

SEQ ID NO: 746 - DNA, 666 bp, Aedes aegypti
atgtccgataaggtcttcccgaacgatgaccagagtgattccggcagggccgatgttcttctgggcgcaaccaaagataacgccgaacttcttcacgtcaactggtctggacatgatgttggaagacatatccaccaccagagggaccccattcgtgtccggagcggtgttgaactccacgccctcgatggtttcgttgtcacagtagtagacgtacgaagccttcgggtccagtttccactccttctgatcgggaacacgtgtgaacttgtctggcttggtaacaacttggttcacctttccgtattttgcggcttccttagccgccttggccgaccaagatccagtcaccacgtagtcagccgttccggttcgaccgatcaagttcatggcaacggcggcgaacaatccagtgccaccgccttgcatcagcagaactttgtagttgtcgggaaccttgagaagttcccgagccaagtcaaccgtatcgttgtgcagtttcatgtacgaagatccccgatgggacatctccatcacactcattccgctcgatccctgctcgacgagttctttctggacctcgagcaggacttcgcggggcaacttggccggaccggctccaaaattaatcaccattatgcattagatcaaccgcttctcgattaa

SEQ ID NO: 747 - DNA, 1281 bp, Aedes aegypti
tttatcgtgtttcctcaagcaaaattcgggctgcggtgaggaaagaaaaaaatcctccattgatagtgagagtgagagcgcgttggaaaccgtcaagtgttggtggcgagtgaaaaaaacgcgaagaaaattcgaaatcgcgtgaagattttgtggtgttgaaaaatttctatctaaaaggtggtgcatttcggaatccgtgacggaacaatcgtgtccgctgactacccgtgtcgtgcagtgtgtgaggaaacgcaggagtttgggttacccgggggaaatccggaaggacaacgaagaacacaagacttatttgctgatcaagagtattatcatttacacacaccccgaaacaaggaccccgaaaagtttttgcttccgagcggattgtccgctcttgcaagcggaagggcgacggaatcgtgtaaacatcagtcggacagcacatcggaagctcgaaaatggacaagaggaaactatccacggccggggatacgttataccaaactctaggtttgccaaaaaccgccacagcagacgacatcaagaaaacgtacaggaaacttgccctcaaataccaccccgataagaaccccaacaatccagatgcagcggaaaagttcaaagaggtaaaccgggcacattccatcctcagcgatcttaccaaacggaacatctacgacaactacggttccctggggctgtacattgccgaacaattcggcgaagagaatgtcaacgcatacttcatggtcacgtccccgacgtgcaaggcaatcttcctgatttgcggcattctgaccggttgctactgttgctgctgttgttgttgctgctgtaacttctgctgtggcaagtacaagccaccgcacccggcggaccagtccggagattaccaccatctgcacagggacggtggtgccagtagtagtgccaacgcaggcgaacgaccaatagttactgaacagcccacgcgaaacacggaaacggtttaagtttgagagaccatcagtatttgagcgaaaagaaagataatgacgatggacggaagaaaaccaagccttatttttgctaaccaaagtagagtgggaagacactgaaatagatgccataaactaattacgtaatcttgttttgaaaaatgatagcgtaacaccgaaagggcacttagttgtcgtttattttagtctcttattgcgtactttaaagttttttttttgttcttgaatatgtgaagaggtctcaagctgttcgaaaacggatcaataaatttgttaatcg

SEQ ID NO: 748 - DNA, 3383 bp, Aedes aegypti
catagtgctctttgagaatttcaccaataaaatcatcacatggtgaggcaatgtggtgatttctgcggtagcacgtggccatgtcattttggtgagcttcgcaagatgatcacaatagttgaatgaaacgcacagtactgagatccatttctccagcacctcctcaatgcagcactacctaatgtaaaacgcgttcaatcattgccataatcagaactcgtccgattggtggcgaaggtgtcccttccaagtccgcggtcataatcctaccacgcatttgaatgaatcaaatagctgcgatgacgattgtctcaaccgacacttgatccacgtgggcgacgccaaaacaaaacagtgattcactttgtcgtcgctgttgtctcatttgagtccatttatagagcaaagttctcaacaaccatcagtagtagtaggctttggttctgaagcaatgaggtaatgcgaccgcgcttctagaagctttacagttgaaccataagttgaacagtttttagtcgggtcacccttttggtgagagcattccattttttgagaatttcgctgtgtgcggagcgcgcgctctcgcgctcacatccattcaactgagtccattcatcgagaaccattcaaataaaagcgatcgaatcgcgcggagagccattcagtcgcagaagagagtttgccgtatcgttatcctacagtaagaccaaccagttcagtttatacaagtgaacgtcaaacttttgttgtccctcagtacagagtgtgaatctggtgcaataaaaaaaaaacgcaatcaatcggtacaacgaaaaagggaaggaaagtgtgaccttgccccttgacaaagaagctcgcttttgattacgattgctagtttgctcgtttgagagtttggtgaaagtgagagtcttactcctcgcgaaaacgaaagtgattgatttttgacagtgcgcccaatcgtcgaacgattgtgtttattgtgtgttatcacagcctactacaacaaacccggtgaaaaatggccgacagtgcaaacaagcgcaacatcccgatcaagctcggtgacttcagcgtgatcgatacggagtttgccagcatccgcgagcgcttcgactccgagatgcgaaagatggaggaggagatgtccaaatttagatcggaactgatgaaccgcgagtccaactttttcgagaccacctcgagtttttccaccaaaaagacggcgacgtccagcagcaccaccacatcgaatgcagcctcggccctgcgaccacagaccggcacaagcaccagcagcagcagcacacaggttcaggacatcaactctccgctgatacaggaggatggcgataacaaagttctgaagctgcgcttcgacgtcagtcagtatgccccagaggaaattgtcgtcaagactgtggacaacaagctgctggtccacgccaagcacgaggaaaagtccgacaccaagtccgtctacagggagtacaatcgggagttcctgctcccgaagggctgcaacccggagctgatcaagtcctccttgagcaaggacggagtactaacggtggacgctccactaccacagcaggctctgaccgccggcgaaaccatgattccaattggccatcactaaacccctaaatagagtttcatccataaatctttatcaatgtgtgtactcgggaaagctgcgcgtggtttataactcacacacatcgctttcatcaagccataattaccagccgatacccaattattagagacatcaccagtgagagagggcgagaagagatacataattcactaaaaaaaagtagacgtgctttttcaacgatatttgtttcgatattagatcttttacgagagcaatggctgcaatggccaccaatttagaaaactaagcaagcatcggatccaattaagaaggaaagttttgaactggaacatcgccaacgctacggctagttgttaggcccttataattcaattcatctatctatttttataacaaaaaacggaagatatttcaaacttgtgataaccctctgaattaaaaccaacggtcatcgcacacacctaattaattaatattctttccgattgttaaccacacgcatcaccatcgaaaaaccatcgaatcaactcagtaggcggtgcactctaaccgtgccccacagcctacttacttacttacgaaccagtataacacaaaatgaaccgaggcctttatgagtttctgggattaattacctttttctactgaactcacttgagattttgtaacgggaatattttttactcgaaaaacatcagaaaaatgtcactgcaatttagaggcagctacaatgacacagtttggaacaacgtcaaagcaaatattgggcaaagggctttcgaagaacaatgttagtaaaagaaagacgctacttagaagcaagaacaacacgagtcgactatcacttaatattacggcaactacctactacaacagcaacaacagcagcatgcaacaaccgtttgtgtatttgtgctttatttattttatataacgtaaattcggagaacggtttaaggaattaaatcaggacttgactaggataggagccggtttttctctcttattttgttttggaaagaaatcttccctgtaaaacgtgttcgctaacctatggtttgaaaccttaatcgatggatgcaaattcgggttttgattatttgtcaagttggatgacttactcaaatttgttcatattgttcaaacatgtttttgattaaaagctactttttttggattcgactcatcaacaaggttaaacctccttcaacggagcccaggtgaaatccgcctggtaggtgtagtagcacaaccagtagagcacgttgaaaaaggtgaaggacgctgggaagagcaccctggcggcttgatcgatcagcgatacgctgttgacgtgacggctggcgcctcctggagaggaaaggagaacattttaatcattgtttttgttattacacttatgtttatggtttgaaacaaatatcattgaatatcatctcctcgatgttaccgttgataactttttctgttttcccctaagcgtcaaaaattacttgctcattagcgcctcttggtggcagaaaatcgaatgacagcgctcaacttactaaacatctactgttttcattgtaatagaaataatgttgtactttctaaatagtcccaggatcccgaggtaatcggcaaatcaaaaaatggcttgctcactagtgccaggcggaattccgtatctaagggaacaaattatctaaaaaataattattgaagacattccttgaacaggggttgaattctgagcaaattgagagtatctcttacttat

SEQ ID NO: 749 - DNA, 597 bp, Aedes aegypti
cttgactaacgacatcacgtgtaatttaaatattggacccaacacaaatcagtcaacaatccaccgtggtcacgatcagctcgttgttccgaatattcattacacacgatcaagccggcaatatgagatcaatttgcctaattattgtctgcggtttcattatcagctgtcaaggttatacagccattttccccaattccgaaaacaaagattttcccggtgaatgctacgatactgagaccaaaattcacttcaaacccggcgaaaaccgacagcgacccggaatgtgtgaagaaatgtcatgtggaacggatttctcaatccactttttcgggtgtggactggctattttagacgatgacccagactgcgagccaattgtacaggacttcactaaggactacccacaatgctgccataagtacaaatgcgtacgcaatggagaagttaattatatttaggaaaactgtaataaacttgtgatttgaaatagttaaacaacttaaaactttaattataaatgtaagcagttaattatatatttacaacaataaacatatatttaaaagtgagctctttctattatcatttttactt

SEQ ID NO: 750 - DNA, 1752 bp, Aedes aegypti
cttatcgctcatgacgggggaattcccttagacgtgtgttgcacctattagcagagacgagattccgtttgcgagatcatttccagtttaggctccggttagatagaacggtttatttttccagtgtcgaaaaatggcaaaagccaccatgctgcatattttgtggatttggtccgtcgtgggattggcaaacgcagaggagatggtcaactgtttcggcaatggtcaatgcaatgattttcatgcgattgttcaaggaccacaggatgttgaagcagttatccgaacttatagttactctaaaaaagccgacttccacggtaatctgttgacacggtttcttcccaatgtacagaaaccaacagtgcaatgggaaaagttgaatatttcctataacttgttggaaagtgatatttttgaccagattaatagtcctaagctgaaatatgttgatattacctataatcagctaacgacggttacagtaccagcttcagttattgaatttattgcagagcgaaataagttaaccagcatcacaatcaaatcaaccagcctaaaaaggcttattttaccaaaaaacaaattagactcattcatgggactcaataaccttcgtctgttacaagaattggacttatcttgtaatcaactcgaaactctcaatataaacgaactatcgtcaatgagggatctcaaatccttgagcttagcaaataatcatatatcatttattgatgggagcacaagccagctttcatcactgaaatatctcgatttgtccaacaacttattgactatggtcgatgaagcattcaaaagttttccaaatttgaacaatctgtatctacaaaacaataaaatagtcatgtggatcaaggaaatgcctatttctaggactctacaagaggtcaatatccaaaataacgattggtactgtagcaatctggaaatgctgaaatcaaaactcggcaatacaatggttcgaggtccagagattgcatgttccccggtggagtctccctatgccaatcgagtgatcaagtatcgaaaaaaaaaattcaacgctctcatggagggggcagctcaacgagtaggcaatataacgtgtgattccttcaagcctaacccatgcgatggagatgacaaccgggttaaggaagtggccggatctgcaatcagcaatgccggtgatcttgctcaaagcagcgtccagcttcttcagagtgacttggcaaagcatatgaatattttgagagctattcaggaccagattgctgaagcccagcagataaacgatcagatgacgaatgagaacaatgatttggccaactacatcagggagcaatataacgtcgctgggcttagtggacatatcgatccagttgttcagttcaataagttattcgaacactacgagagtaataacgctaaattgagggccgaaataagagctgaagagcaaaacaatttggatgtgttggacgaaataaacgttatagataacgaaatggaagataagaaatacgaggaaagtcagttgcttgaggagttgaatgcacgcaatagcaccgttattggctatcaaaaaagaatcgcccaactgcaaaagcaacttagccaacagtaaagtgaagagaaaggcgacatgaatattgaaatgttatatcaaatcgaattgttacctgcaactttacgcaataaataatgtttcaatagcggtctacttttattgtacaaaagtctaggaat

SEQ ID NO: 751 - DNA, 1881 bp, Aedes aegypti
atgttgaataatcaacttggatggaatggactgataattattcaacttttacaaatatattcttccagtacccagcaacgacatatctgcaccatatcaacggaattctacgattgccagatcgaaggagtacacattaaagatggagaaattcatgagttcagacctgaaccacacaagcatatcacatttagggattctgttttacggtatctgccaaaatcattgattgatgcattcccaaacatgacactgctaaacttaaaccaactcaagatcactagcatagaaaataatgcttttcataatgctggagaactggagcatttatatcttcaagaaaaccgtttgaaggatttccctagaaaagtgctcgatggtgcacgtaaattgaaaacattagttttatccgacaactcaatagaaactatgccgtataatttcaagaacaataataatttagacaatctttatataaataataataatcttaatttactgccatcatttgaatacataacacaattacaaaactttagcgcatcacgtaatgaacttggacaagttgatagtaaacaattcatgaagcaaaataaaatcgaaaacatcgatctatcacacaataaattggaaaaactgaatctacgactaacatctcgagttcttcgaattgttgatattagtaacaataaattgactcagctggatataacgttgcatatggaaaatctgaatgttgaaaataatgaattgtcatcatttctagtaggaaatgagtgcttgctgaaatcattgaaaatgtctaacaatacactcgaatcacaacctgttcttttaaattgtcaattattagaattcttagatttatccaaaaattcattgttatcttttcaatatccagaaactttaagtagactacgatatattaatctcacacgcaacaacttatttgaattttcaacaccaaaaataaataagaacttcgaacttgttacgctggatttgtctcataaccaactgtcttatttatattcaatgcagccatttaaacatttgaaagatttaaaactaaacgataacgtattcattgcgatccagaagaacagcttaccaaaatcattaacttttttgtatgtagcaaataatgaatggaaatgtgatgatgtgcctaattggaagagactggctcaagatgcaaatgatgattgtaaaaatggatttacgcaaacggaaggtatttgttgcaagaactacaaaaaagctttcaatgatgtactgaacgaaatgatgagagaagcctattttcatgaacgagcaaaccaaaatgaattgaaagggaagtgtacatcttatcaaccaattagaacgaatgatgacgacttggagcgcattcggcaattagctgctagcacagataaaaataaagcaaaaatttacgaacagttagcaaacactaaaaattcgatagcgtctagtaatgccaatttaaacaatcttaaacaaaatcaggctcagtctagcagtgtcaaacgatctatggcaatgaagatcgaagagaagcgtcaaatgtatcatgtcacaaaagaaggattattgtccgacaagcaaatgctaggcagagtggtcgactatgttcaagaaagagacgcattttccaaaaccacgttgaatggacgaaaggaagacacccaaaacactaaaaggttgttagaacaaaagaagctagagaacaatcaattagccgctaatattgaaaatataaataacagttctttcgagtttaaaaataaggaaaaagaattgaagaaacagattgagagacttatgaaagaaatcaacaggaattctccttcaatccatggaaagacaggtagatcataa

SEQ ID NO: 752 - DNA, 3443 bp, Aedes aegypti
acttgtagtgcagctgtggtttcgagcgggtcgcactttgagtaactctccgtcttcttaggagttcagagttctcttgggtatttaattgtcctgtagagactgattggtgaactaaacggtggtcagcagttgttgagtgatttcgtggtatagccgaagtgattgtccgaaaaaatgtccaaaccacagtccgatgagcagaagaggaagcagatcagtgtccgcggtatttcggtactggaggatgtgaacgagatcaagagaggcttcaaccgccatctccactacaccttggtcaaggatcgtaatgtggccacggtgcgagattactactttgccttggcccacaccgtaaaagatcatctggtgtcacgctggatccgaactcagcagcattactatgaaaacgatcccaagcgcgtctactacctgtcgctggagtactacatgggtcgttcgctgcagaacaccatgatcaacttgggcatccaaacgtcctgcgatgaagccatgtaccagctgggtctggacatcgaagagctggaggagctggaagaggatgccggtttgggtaacggaggtctcggccgtttggcggcttgcttcctcgattcgatggcaacgctgggaatgcctgcctacggttatggtatccgctatgaatacggtatcttcgcccagaagatcaagaatggtgagcagattgaggaacccgatgattggctgcgttacggaaacccatgggagaaggctcgtccggagtacatgattccaatccatttctatggacgtgtgatcgataccgccgaaggtaagaagtgggtcgacacccaaaccgtgtttgccatgccttacgataatcctgtgcctggatatggcaacaacttcgtgaatactcttcgcctgtggtcggccaagtctcccattgacttcaatctgaagttcttcaacgatggtgactacattcaagccgtgttggatcgtaacttggctgaaaacatttcccgtgttctgtacccgaacgataacttcttcgagggtaaggaattgcgtctgaagcaggaatacttcatgtgcgctgccaccctgcaagatatcgttcgccgttacaagtcctccaagttcggttcccgtgatgccgttcgcacatcgttcgaagacttcccgagcaaggtcgccattcagctgaacgatactcatccgtcgttggccattcctgagttgatgagaattctagtcgacgatgaaaagctttcctgggacaaggcttgggatattgtagtgcgcacttgtgcctacacaaaccacaccgtgcttccggaagctctggagcgttggccagtgtcgctcctgcagtccattctgcctcgccatcttgagattatctaccacattaactttttgcatttacaagaagttgagaagcgttatcctggagactttggcaagatgcgttctctttcgctggttgaagaggatggtgataagcgcatcaacatggccaatctttctattgttggttcgcatgctgtgaatggtgtcgctgccatccactcggaaatcatcaaaaaagacatcttcaaggacttctacgcaatgactccagagaagttccagaacaagaccaacggtattactccacgtcgttggctgcttctgtgcaacccaggtctgtcggatcttattgcggataagattggagatgaatggccagcgcatcttgatcagctgaccaggctgaaggcatttgccaaggatccaacattccagcgagatgtagccaaggtcaagcaagaaaacaaactgaagctcgctcagctattggaaaaggattacggcgtcaagatcaatgctgcctcgatgttcgatatccaggttaagcgtatccatgagtacaaacgtcagctactgaactgcttgcacatcatcaccttgtacaaccgcatcaagcgtgacccaacagccaacttcactccacgtactatcatgatcggaggaaaggctgcccctggatactatattgccaaacaaatcatcaaactgatctgtgccgttggcaatgtcgtcaataatgatcctattgttggcgataagctgaaggttatcttcctggagaactatcgagtcacgttggctgaaaagatcatgccagctgctgatctgtctgaacagatctccactgctggtactgaagcctccggaactggaaacatgaagttcatgttgaacggtgccttaaccatcggtaccctggatggtgccaacgttgaaatggccgaagaaatgggcaacgataatatcttcatcttcggcatgactgtcgatgaagtcgaagacctgaagcgacgtggatacaacgcctacgactactacaactccaacccagatatcaagcagtgcgttgatcaaatccagaacggattcttcagcccaggaaatcctcatgaattcacagacatcgccaacgtgctgatgaagtacgatcgctactatctatttgctgattacgaagcgtacatcaaggcacaagatatggtttccgccacttatcagaatcaatcgaaatggcttgaaatgtccatcaacaacattgcatccagcggaaagttctccagcgatcgcaccatcgccgaatacggtcgcgaaatctggggcattgaaccaacgtgggacaagctgcccaacccatccgaagcaccccacaataagtaaagcaccttcccgttggagtcggtgtacgagcgaaacacgtgcagcaaataggtacactgccactgagcaaaatcggttactgtcacagcagaatgggaagaaaaatatgcttagaagcgttggcgaaaactattgagactttgattcactttcctatcagtgtatggtttgtctgcgcaaagaacggacttttcgtctctcaacgtttagtgttaggaatgcaagcaatcatttactcgaaacggtttgcttgaccgcaaaatggatggaacgaggagtaggcaacaaatgaaacaaaacctagttaaaaataaatttcaaattgtcaaataaatactgttatcgatgtgtgtcgttagatgtaatttgcatggttaaataaaaatagaacacaacacgatccacaagcatgcaaacaacacaactgtgtactcatcaaatcaaacattttaattagggtgccatcaattagatattatgcttttcatttatctatagcttagcaacaacggggaaagagacagcaagtagaacaaatgatattagtaactaatcgaagcaaaaaatgtagcggctaaaattgtacatcatcaagttcagcagatggagcaaattagaaacaaaattaaactacctaacaaagattctgttgcaaaatttgagcatcttattattgttattaatatatttccttttattttttatatgaaataaacttattaccttgg

SEQ ID NO: 753 - DNA, 801 bp, Aedes aegypti
atgatccccataaaggccgctctcattgacctgagtggaacgcttcacgtcgaagatcaacctaccgatggtgctgtagaagctcttaaacgactgcgacaactgggagtttcggtgaaattcgtaacgaacacaacgaaggaaagcgtttcatctctatacgctcgactggtcaagattggattccagctggaacaaaccgagatctacagttcgctgaccgccgcctcccgctttgtgcagagtaacaacctcaatccgtattacatcctaacagacgacgcgaggaaagatttccctgcaaacgactccgccaatgaatacgactcggttgtggtcggattggcccctgagcgattctcgtacgagtaccttaatgaggccttcaggattttgcacaacagcaaggggacagcccggttggtggccattcacgaaggaaagttttacaaaacgaaagacgggattagcctaggtcctggatgtttcgtgaagggcttggagtacagcaccgggttgaaaagtgagtgcattggaaagccgaatgcttacttctttcgttcagctatgccggacgggttggaaccagaggagtgtgtaatgatcggcgatgacccgaacgatgactgcctaggagccatggcaataggaatgagaggattcctagtggaaacggggaaatttcaacccgagttgtacgataaggatgctcttccgaaagttagtggaatcttcaaaaactttagtgccgttgtagaacatataagtaaaacgttaaatcaataaagggtcgccctaagt

SEQ ID NO: 754 - DNA, 1926 bp, Aedes aegypti
atgtcttcaatgacaagccgcatagctcagccagttaggaaactgtcgaaaacaagccttggccatggtctaaatgagaatcgtcgctcagcttccaacgatcggctcagtgcccattctaatgtactcgtccagcaaactccggcaactgcccgaaaattgcgcagtcagagcgcgactccagcgagtcgaaccccccttagaagcaatgaaaatattcccatcccttctacggtcgagaaggataagccaccgttagaaaaccgcgaatggatgatggcccaatgtgaacgaatttgtgactacctggaaacgatacccgatttgccacaagagttcgtcgagcggcgaaatttgcgggccatgtctacgaaacagttcctggttatcatgaatcatcttttccggcaaatcggaggcaatcgctataaattgggtacaaatttcatcgacgacatcatgaaaacgatgatagaattggagtatccttacacaatcaacaagtcgatgcttaagacgccaaacgttccacattcagtcaaccacattatagtcatgataggatggctggtacagttggtgcctccgatcaaccatgagatttcacatcttaaacgcgacgttgatcttgtagatgagtttccaaactgtgagttccaaaactttttctttgcgaaagttcaggatggtttcagtgtatggaatttacagaaaatggacgaatatggagcagtcgttgaagagctgactgataaattggtggaagcacgaaccaatggtttgaatcagcgccaagtgcaagatagaatcgggcaactggaacaagaatatcaagatttaaataacagaacagttcaacagggtcgcgagcaaagtatggatgcttttgttgaaaccattcaagaccaacaagagctaaggaaaaagctacaagaagaagttaagaccattcaaaaacaggctaataagcttgataaagaatattatttgagacaagacgactattacgctcgtgaaaaaagtttagaagagttaaagcagcagattaaaattcaacaggttgatgccaccgaaagagacgaaataatcaacactatatcaacgaataagaatctcctaacagcaaagaggttgacagtgagtaacctggaacagtcttcttatgaccatcaaattgtcgtgtcccgcctgataaaacaaaagtacaacgtaatatctaatcttaacaccagtttacataaaatggcgaataccctgaagccactaatcaactttgaagctccgatgctagatttgaaaactgaaaattatgaagagctatatctgaatatacagaacattaaaacgcagcttcagcgagtactttccgagcaagcttcaatatactcacaactcaacgaagagcaatgcacactcgaacgacaattatccgacctgcaaatccggtacacctcagttgaaaaatctcttcaagagacaataactcgttacgagcaactgaaaaagcaacgtggagaactgatcgaccagctaaataccatttctgccgagaatgcacaggccagccaacggaaggatgacgaaaggcttcagagaacccgagagatccaagagcttcaggaacgatgcgagcaaaacaaaaaagctatcgagaagctgacgatagagaagcagaaattgatggcacaaaacttggaggaatgccatcacattttgacggagaagaaacggatacagaaggaagtgacggaaaagattgaagcaatggaagccgtaattgcagacattgaacgggaactgggacccctcgactgatgtgagttttggggataacaggtttgttttgtgtttcagtaaatttttcgcttttaattcgtttttaaaattgtggttcataatgtgtctaatatatcacctccactttgg

SEQ ID NO: 755 - DNA, 2123 bp, Aedes aegypti
atgtacgagattttgtcctgtgccaagaacacccagttgcattcgttcccttcgctggaagtcctcggccaaggtgcccatgccaacgatggcaaggacagcaacgaaagtgtttgccagttctttccccgcactaagctgttcctccgaaccaaccggaactggggcgtggaattattgcggataaaggaaatcgccggaaagccaacaatggcccacgtccagaagcgcacaattgacaatctgtattgtgtggcctgtccgaaaacggccgtcgaggaagtggccgtgggcatgacgtccggctcgatccggctgatgaacctcaaaaatacgacggccggtttgaaacggttggacacggaccgcctcaccaatggggtgattttcatggatttcagcgccaacgatgactttctggcggccgtttatgaaaacggaaccgtgaacctgtacgggactaaaacgaacagccgcgtcggatcaatgacgttcgacaagcacacaaccaaagttcgtttccatcctctgaagcggttcttactgtcggtcgcctcgtacaaaggatcggtcatgctctacgacacccagtccaagaaaatcgttttcaatcaaacagaagcccattcggaaccgtgtcgagatattgccatgaccgccagcaattcagaccttctgttcacagtgggatacgacaacctgatcaacatatacgacacacgcaagaagcaatcggccacgaaaatccgttccaattacccgttcgaatcgctggacgtttcggaatgcggcggatatttcgccgtggggaacctcaagggacaaatttattgttacgacatgcgtagtttgggggagcctttgaaaacagctaaagttcatgatagcagagtcaacagcatatcatttgttccaaaaactgcggaaaaaggtggacatcgagtgagcttcgatcccagacaagttccgaataccgcagagataacagtcgcaactcactcggcatcgacgaccgcagtggtcaacgaatcgcccgttcctccgaagcccgatcgcgatagtttcatgaacgacatcgacgcctttatgcagagacgagactcgatggattgtctggctaggctcagcacttcatcgcggatgagcaccgagtctcggggaagtctcaacatggccggtaacaatctgatgggctatttggacgatatctccgatagcaatttcgacccggaccagctggaggaagggcccgccgaagaaagctttgtgaatgttaatcgactcatcaagagaactagcattaaaaagcagacgtctgttgatcggacgcaaaaatctgcgatcaatttggagaacatccgagaggaaccggatatggacggcactcgggcgttgacggaaatctcaaccgattccaatgtcgagtcccagcaaaggccgggaagtggtggaagtacaaagagatcctccgttcggcgctctgcagatgcagaaaataaagaaaatcaagccaccgcggtagacgaccccactccaaacccggatccggcccacaaaacatcccagacaacaaaagcagagtcggaaatgtcgccgaccgtccaggccgctttccgggagcttaagctagaaatatccaacatgcgtcaggagttgcgagaggagatgaaggagcacttctttcagaatcaggtcgatcggaaatatacggccatggccacgcgcagtcaaatttggatgggatcgttcaatctgtggaaggagtcacagaagcagctggaacggatcgatgaggttacacaaaccggatttgggctgctgttgaccaacgatgagtttacccagcagtttatgcgcctccagcgagagaatgaagaactgaaaaggcgaatagccgaaatggagcagggtggagggaaaaagtgaatgatccgtggttgatgagaattaagttttactttaaagattacataaaacaaaaaaaaccctttacatatcaaattgaaattttgaatactagaaaaaatgagaaaatgtaatatttatgtcttttggaagctgatgaagaaatttcgtgttgtttaatgcttacgccgaataaaaaaatgaattatcgaattgtg

SEQ ID NO: 756 - DNA, 2024 bp, Aedes aegypti
ttcagacgctggttccactccgtgatgtaacacacgtttagtatcggttcgcaaccataacgaaagtgaaaaacaaaacttctgccctgtagaaccggtagtagctacttccagtcccagtgtgtgggacaatttacaacccgaaattgagccggttagccataaatctgagcttttaatcgcgaacgcgcatcgtcgccggcgtccgaaaactaaaatctcgtcgtcgcaaatcgcatcggattcgtgctggtgaccttcgtcaaatagtcaccgaattgtgtaagcatcgatggggacccgattgcagcttggttggttcagatcttctggagcagttcttgtggcggtggttttctgcttagtaaccgccggttcgctcgttgcctcacaaggaattgaagccattccacccaagctatatgcaaagctcccttccagtaatgtaccactcctttgccgtagtaacaaacccgccaccagctgcagcgttagaattcccggctattccaacacctatgacgtccacgagcttcccaatgggatcgaatactacggcgaaagcttacagcgtggcgagtgcgggatcatgttcaactcgcttaagtccactaacttgggcaaattccagtgtaacatgaccatcgacggagaggtattccaacagtcgatcgttatcgaagccgccttgagtccggaaccaactgatctggctattggcgaaggaacaatcctcgaacagggagcgtttgcaccgaatcaaacattgcgggtgacttgcagttccaacaatgccaatcccgcttccaatctgacgtggctgttggacgaagagcctattgacccgtctaaccttggccccttggaaaccagcgaaaacgttgactcccgaggaaggaagttagtatcggtatcgcagcagttgaactactttatcacactgaaagactatgggaagaagatcatttgtcgggcggagcatttcgcgattcagaaaggcttcttccgaggattcctgccgctcaatttccgatttcaacccgagccagtgccaacgatcaatatcggtgaaacgatgatcaacgtgacaatcaaagccaatccacgccccaccacgtcttggaagataaacgacatgacggtcgttgaaggtcaaagcttgggaccgtaccaagcctacatacccaaagatttgggtttcggcaactacttggtcctgctgaggatcaacgagccaacgaaccaatcggagctgatcgagctcaccgccagcaacgagctgggatctcgaggatacgtgatcagagcgcagaagatcgaaccaacggcgcccggacgggggaccaccaccttctggctcatcagtatatggacttatctgtgctctgtgatagtgacctgtgtgttgagaatgccatgagctaaaacagttccttcatcttaagccgcgagatgtttttcccttctgcgggcgttcgagatcggttttgctcattggttgagagctcaacccatgagcaaaactagactccttacgccgcagggggattcagtattaattatagtgtttcctacccgagagttttgtccgaagagtggtttgcgtcgagaaatgatctcgaatttaacgaagaacggcacttactttaattatcgaaggtaaacgtgatctctataaaggagatttgaatttatttatcaataccttcgatttattgaatatttaataaaaccaaattgcatttaaatcgccatgattacccaaattttcctaaagagtcggaccagattcgaaaatcgggctttggaaacactacttgtaaaaataacttcatgagatatgaatgtcaacaagaatgttacttcatcgtttatacattttcttcattttttttctagaaacagtcataagtgaacgttagtgtaggatatttatttattgaatatagagtataacagtgtcgacaaatccgaggcagccaataaagatttcagttgcttttcaaacggggaaagagcaatgc

SEQ ID NO: 757 - DNA, 1597 bp, Aedes aegypti
ttttgaaacgctcgccccgcagttcattcataaaacaaaccaaaatacgcaaaacgcgacacgcaaaaacctaacctcagcgcctcgagaggacggacggacattgtttttattattgtccttgctttcgctgaattcggtcgagtcaaaggaacggttccttgtatcgaaaggttctttagtgcgtatttgcacgtcgtttaaagtggttatttgtgcagtgattattcgaagttaaataaagttacacgtgtgtcaattcggttgaaaaacggtgaatttagtgctttttatgctcaacgcaagcgaacaaacattcaagtgcttaaatcaagtcgaagccattttctggtgtgcaatcgtgaacagtttttcgtccttaaatttgacgacgcgtccgtgtcttaaaattcgtttcagacaaaatgttccgtgttccatcaaagttgtccactttggcagctggcagctgtttgtccaagcgtggattggtagatttggccaagttgagctccctggttgacattaaaccggaagtccgtgatgccctgaccaaggcacctcaatcggtagtggccctcgagtccaccatcatcacccacggtatgccctatccgcagaatcttgagacggccctcgaagtggagcagatcgttcgccaaaagggcgccatcccggccaccatcggcgttgtcaacggccgcgtcaaggtcggcgtcacttccgacgagctgaaggtgttggctcgcgtcgacaaagagagcaccttgaagacatcgcgccgtgatctggcttatgtggtgagccgcaagctcaacggtggcacaaccgtcgccggaaccctggtggtagccagcatggtcggaataagaattttcgccactggtggagtcggtggtgttcaccgcggtggagaacacagcctggacatttccgccgatctgatcgagctcggtcgctcgccagtcgccgtcgtttccagcggcgtcaagtccattctggacattccgagaactttggagtatttggaaacccaaggtgtctgcgttgcgtcctaccaatgcccggacatggaattcccggccttctacttccccaccagtggatgcaaggcgaactgcaacctgaacaacccggttgaagccgccgagctgctcagcgccaacaattccctgggtttgcagtccggattcctgatcggcgtaccactgcccgaggagcacgcaatcgaccgcaaactgattgaggatgccaccgagcaggccctgtccgatgctggccagaatgccgtcggcggaaaggaaatgactccgttcgttttggcagctatctcactgcacactaagggaagaagccttgaatcgaacattgccctggtaaagaacaacgcgagcgtcgcggcggaaatcgcggtcgagttggcacgtttggagaatggcgggggcgctgccaagtccggcagccaacgagcaccggtcagttaaatatcttgtctagcaataatcattctccttgctgtgtacacatctaatttatctacctcatagtaatgcaaatgtaatgtgattaaagtaatgtgtttagcgatagtaatcgg

SEQ ID NO: 758 - DNA, 3248 bp, Aedes aegypti
ctgagcaagcgtgctagctactatcgtttgttgtgttacattttggtatgcgcttgtctgtgactttcaatgtagctccgtcggtgtctaccgcttctgcccaactgttggcagtatattggccaataactggtacatgtgttgcaagtacttatcagtcacgtggacacaactgtcttgaactcttatctaatgatacaaactggttccacgtctggtcgacattcggtacaccgacggtaccaacaccatcaaaagctggtccccgtatgaaaagatgcacttggggagcagaagaaatggtctctcgaagtcccatgaagaccagtattcctttagctcttgtcgtgtcgtggcgtggcgctatcgtggagttcgtctggccgaaaaagaaataaaatcttcccctactgccaggcgtgaaaggtgtgcgggcgtgttcggagtgtgacaaatattaatccaacgcgtttgatggtgatattgctggagtgattaaccattgaaacttaaaactcttggagtgaaattggagcatagtcagctatcggaaggcactgcggttgcaagacatcccggaacggtttaatctgtgtggcagtacccgaggacgatcttcttgagtaaggatgagtcggcgcttttcgcgagcagagtccagctcggacctgctggctttcctggaccgtggccactctgcgaatactgaaaatcgatggacttttgaaattgcatgggaagtcgccaataaggtgggtggaatctacaccgttattcgctccaaagcatttgtgtcgacggaagaacttggcgatcagtattgcctgattgggccatacaaagaagcatctgcccggacggaagttgaagcatgtgagtttccgaacaatgggcccctgtatggagcagtgtcagcaatgcgaaatcaaggctacaaggtacactgcgggcggtggctagtcgatggaaaccctcaaatcattctgttcgacgttggatcggcggcctggaaaatggatggctacaagcaggaactgtgggaatcatcaaacgttggaataccgcatttagacgttgagagcaatgatgccgttattcttggctatactatcgccacctttattgccgagttcaaacgttgcgctgaacaatactcgcacgacaatgaatacggaccaccgcgtattgtagcccatttccatgagtggcaggccggcgttggtctaattgctctgcgaacgcgccacgtagatgtcgccactgtgttcacaactcacgctactttgttgggtcggtatctgtgtgctggtaatacggacttttacaataatctagacaaattccctgtcgatgaggaagccggaaaacgacagatttatcatcgttattgtcttgaacgtgctgctactcatctctgtcatgtgttcactactgtctcggaaattaccggttatgagtcggaacatttgctgaagcgaaaacctgatattatcacgcccaacgggttgaacgtgaaaaagttttctgctatccacgaattccagaacctacacgccatggcaaaggaaaagatccatgagtttaccagaggccatttctacggtcacttcaactttgatttggagaagactttgtacatgtttattgccggtcgctatgagttctcgaacaagggtgctgacatctttatcgagtccctggctcgattgaatcacttgttgaaatcacacaatccggatgtaaccgtagtggcattcttaattttccctgccaagaccaacaacttcaacgtagagtcacttcgtggacatgccgttaccaagcagctacgcgaaactcttaacaccattcagcagcagataggaaagcgaatgtatgacacttgcctgaaaggacatctgcctgatggaggcgaaattttaactaaggaagacatggtcaagatcaaacggtgtttgtacgctctgcagcgcgatggaaatccaccggtaaccactcacaacgtcgtcgatgactggaatgatcccgtcctggagtcagtacgacggtgccatctgttcaacacgaaatatgatcgtgttaaaatagttttccaccctgagtttttgaactccaccaatccattgtttggactggattacgaagagtttgttcgcggttgccatttgggcgtatttccctcatactacgaaccatggggctacacaccagccgagtgtaccgtgatgggaattccaagtgttacaactaacctctctgggttcggttgtttcatgcaggagcacattgccgaccctaagtcgtatggtatttacattgtggatcgacgtcacgtgggactcgaggagagcgtccaacagctgtccaagtttatgttcgagttctgcaaactcaaccggcgccagagaatcatccaacgaaaccgaactgagcggcttagcgatctgcttgattggagaaatctaggaatttattaccgccaggctagaataaaagcgttgcaaaccgtgtatccagattacgtcgatgaatcggagagctatctgaggcgagctgctgacttcaattaccctcgtccagttagtgccccaccaagtccaagttcttccaggcacacaacgccagctccatcactacacggatcggacgatgaacaagattccgttgattctgaagaagaattggaagaactgaagaaagctaactcgcatgactaaaagaacttaaccaacttttgagaaatgtactacagttactgacacacaaccactcaccgttcacaaattcagattagatcatagtgaatacttcccttagttgacactactagatgaggatggtttaaagaattgctgcacatgatactcaacgcaaaacgttagattacccatcaaatatccgtcgtacgtatgctggtactattttacgattttatgttaacttttgttgtgtcttttaattagctaggataaatatttcaaaatctattttctgtacattttgattgtttcgtccagttttgccttccgtgttgctaccgatgcgcatgttcagccataatattgaataatgatgttatttgtcgataattgaaaagtttatttagtcagtaagcaatcgtgcgcgaagagtttcacccaattattcctgttaattttaacaaaacaatcacgtagagctcaaatggcagtgaatcaataaaaagcctgttatgaaaccataaaatatatcattgattggatccgaac

SEQ ID NO: 759 - DNA, 1110 bp, Aedes aegypti
atggttcggtgccgtttttgggcgattttgttcgccgtgatatattgcttcaaggggattgcgtgcgcggtaggttcagcgttgtcaagtagcagcgaggcagaacccggtctcgattaccagaagctagttgcaaaactggagatattggacaccaaaatcacccgcgtggaagtgtcatcacgggagcagttttcctcacttgagtcgaagcttgataagattttgcaattggttgataatcttggccagtcgatgcacacggtacagaaaaacatcggcgctgctagagaggagatccagcaattccaaaatcactctcaaggtcaattacaagcactggccggtagtgtatcgattattgagtcacttttagttgaaagtcaccgacaaaagcaagttcagccaacgagaagtgagtcgactgcgattcgcaagacggttccagttgagcaaagatatttcgaaagctgcgatgttgcgccgaggaatgtgtccggaattgctagacttctacccgatcttggatttggtgaaccattctttgtgttttgcgatcaagattacgaaagtggagggtggatagtgattcagaatcgttacaatggttcggtaaatttctaccgcggatggagagaatacaagaatggatttggaagtttgaatggtgaattttggctaggtttgaacactattcacgctttgacctattcagcgccatatgaattgcacgttttgttggatgatttcaataatacgacggtagtggctaaatactcactgtttgctgttggcaatgagcacgaatccttcgctatcacgaagcttggtgactatagtgggacggcaggagatggtttatcttaccataggggatcgaaattctccacaatggatatgaacaatgatattccaggaaataatggtggagtagactggactggtgcatggtggtatcgaaaaggacattacagcaacctcaacggtcagtatttgtccggaaaagtcgatcacacgaagttccatgggaaaggtatgacatggaatcccttcaaaggcgatgattactcgttgaagcggtccaggatgatgatcaagcgtatattgtag

SEQ ID NO: 760 - DNA, 5981 bp, Aedes aegypti
cgatgatgaattcagaacgttcaatctgacggaatatccgtcgctcttcagccttctggctgcggttaacaaaaaaccaggttgaaggcggctggaatattctcctcaatatagtatccaaatacaaaaaatggtaaaaatggaaaattttgttaaaggaaactttcaattaattattgtagaagtgtttgctacaacaccaagctgaaaacaacttctattctgttccagttatgatccaatgtcacgaaaaatatcaataagaagatgaaactttgctcttggatagtgctgcataaaattcatggatatttcctgccatatcctaaaaaaacgttggaaattgtaatgaaccttttttcagttagaaattaagcagttattcaggtattaataagaatgacccaataaatttattaaatttgcatctaaaataggtaataataaaattaacagttctcacagagctgcatgcgatgttcattttgttcctcatgaacgttgatctctcttgcctgctcagcttgagaatatgaatttctcacccattttcccactcacgggtacatcacattgcttctcaccgatgcatttcacaccgatgaccgaccgtctatcaactctatcaactgtacgaacgacgaggtacatatctgtagataggctccgtgccgatagaagtgtacaacacacattcattacattacaccaacgatagcgactttaaactagagctctcgcaaacgcatcaacataaaaaaacagtgtgtttcagtgtgcgattgtttgcattttggtcgaaactagacttgctctgtctgagtctggtgtcctttcgaaagtgctgaacacccaacagacggcttacgcacgagtcatccagttggccccatatcattggaccctttttccgtctgcagcgcgtgataatctcggaagcaagtggaagtgacattacgtgtgaagtgacagtgtccttgaggaagcaagaacgagaagaaaccagttcctacccccagaatgatggaccccgatgaaaatgatctgatcgataaactaatttccccaacgggatcgttcggcaccggtgcccagcagaaggtaatcgtgcaacggaattcgccaattctgttccccggagggacaccgttgaccatcaatgctacgagttcgctgttagtgccaaattcggtgcccctggccgtggctccacagcaactgtcatttgccacggcatcagcaggaatagatggtggaggtggccctggagtggattccacttcggtaattgtgctcaacaaggacactccgcttccaccgggagcattccccatcaacgtcatggcagccgatccccaacagcagcagcagtttgttcatggtggtggtggtggtttgcagaaagtcatcgtcgccgccaatcccggaacgagtggaaccgtagctggccacggtggagtgcagattgtttcagcgggtaccatgaaggcgttccaacagaagttgcacacacctggcttcaaagttcaaattggaaatacgaacatcatgtcactgcagcagaaaataattgcgccaatgagtcatcaagctccccagggaccgccttccatgacaatgattcagccaagttctcttgctatgcccggaaccgccgatcttaagcgtcttccatcgtccatcaagatcctgaaacccattgccccgaaaccggtaattgctaactacgccaatacagtgatcaaacctgcccaggaaagcactatccaaacaccttcgccaaacgcgtccagtgtttgtcatcatgtgcttccattcgggacaaccatcaaagtcactgccggaaatgaacaactcccgcttgccatttccaaaccccagcaaatcatccaaccgccctctttgatccaacaacaggcgcaatttcagcaacagcaaccccagcaccctcaaatgcaaccaattcaacagcagccacaatccccatctacatcaactcttctcaaacaaatccggccgctttcgccggccacgatggctacccagccaaacaccgtactatcatcaccaacccaaaataaagtcatcatcaacaaaattatctacaaaactccggaaagtcatcttggaccaggtccaactgccggacaaccgcggatcgttgccgcaacgccgcccctctcaccagtttcaatcccagatctgaaacgcaagatcatcatcgccaacaatcccaaccgtacgcggctaccatctccaggccagtcacagtcgtcgattccacaacggtcgactacaatccaacccgctcaaacccagatcttcgtgcaggcagccaaccctacattgccactagcaccggcacttgcagcagctagaactaccatcgataacattccaactaccatgcaagcggtcatatccacctgcagcagtagcaatataaccgtaacaccgatgatggttgatcccactccaccgatgttcccttcatttcaagaagagaaagctcaatccacggttgatacgcccaccaaacaaccggatgatcttcccgaatcgtctgaaccatcgttccatagctcgtttgaggagtttagcaaaaccatatcacaaagcagttcccaggtggacgcatcggaaacggaagtttcctcgacaacaaccgaacagatgacggcaggcgcggaagatcaggaacccaaggaagattcgaacgacgaagaggcagaagcggaggaaattgagcaggaaatgttggacagctcgcaaggttcggcacgatccaataccattagtagtgagaagatcgaaaaagatgaaaacgaagaaaagaacatcgagccacatgtacaagagctgccagaaggtatgaagactccaacgaaggaacgtgatgaagaatccacgccggaggatattctgagtgaacaactcaaaagtcctcggcttcataaaagagccaactcagacgtgcagcagcattcaagtccagttcgcgctcgacggctttccgaaccaaccaaacctgatgatcccccaaaagagaatgaagaggatgtgcccccgatgccgaagcctttggcaatcatcaaaaagacccgaaaccgaagatccgtcagccgaagaagcaggtcgtccaagtcatcaatccactcgtcgcttctttgtaacgaaaagttagaaacggagtcggatgaaagtcgcagtgtcaaaacttcggcatctagtctgcatacgatcagtcccccgaagaaggaagacacttcggattcaccaccggcgtacgatcaggataagctccaagcggcgatcgagggctacaagaagaggcaagctatggttaagtcaagccgcgagaagagccgttccgagtcacgatcggtagtggatcgcgaagaaaaagaggagaaagatttcatcgaaggagatttcggttccacaccgtcggatctcatcaaatggaacgatggaatcggatacatgcggagcagtttcttgcattttcagttcaaccagtttggattggtggaaccgatggatatcaaggaatacctgaaacacgtcaacacaaatgtatacgattcgctcaaggatccagttggaagtcgaccgaccgcaaaggcagctaggaagaaacgtaaaacgccaagtacggaaggatcataccactgcaagggttgtcgaggtcgtggcactgctggggacttcgccacccctgattactgttcaatagcttgtatgaagaaaaccaaaaatgaacccctattgtcgagtattgcctattcgaagtctcttcagcgtaaaggcatcggatcttccgagtcgtcaacatccaacaccacgccattccctacgagcgacgacgactctctgggaagctcgcttaactttgccaatgcctttaaagagaagagcattttcccgcccaaagaaagtagcactcccaggccaacggttcaggaagcacccccgattcaagagctgaaccaaccaaaattctcctgggaaacttacctggccaagacccaaggcacgccgtcgccgttggatttgttcacgaacccttacccgagtggactgaaccgattccgcatcggtatgaagctggaagcaatcgatccggaaaacaattctctgttctgtgtgtgcagcatcgtggacgttcgaggctaccggttgaagctgactttcgatggctattcgcgcgattacgacttttgggtgaatgccgattcgttggatattttcccggccggttggtgccagaagacgaatcgtatcttgcagcctcccaacgggtacgacagtgattttagttggatcaagtatctcagcgagaagcaggcaacgccagccccgaggcatttgttcaaacatctcagtgtaacgtcgaatgagaacaagtttgaaatcggcatgagcctggaagcagacgatctgaagaaatcgggcaaagtttgcgtcgcttctgtgactgataaaatcgacaatcgtatactggtccatttcgacggttgggacgaacgatacgactactgggtggatattcactcaccgtacatccatcacattgattggcaccacgagaatggctacaatattactccgccaccagattggagcaaaggtgacttcgagtgggccaaatacattcggctgaagtcacggcggataggcaaggccataatcccggcggaccagtcgctttttgccacgcgacaaccgatggatttcaaaccgggcatgaagttggaggtggtggaccgcaagaaccagatgctcctgcgaccggcaacggttgtggctacggatgggtacgaaatcaaggtgtgcttcgacgggtggccgaacttttactcgttctggatcgaggacgacagctcggacatccatccgatgaactggtgcaagaggacatatcaccctattgaatttcctccagatcatcgacctgcatccatcaaaagtacctgcgaagtttcctactgcttggggcaaggcaatgccaaaattctgagcaaatcgttccacacgcgagaagcggaatgtccttacaaggccaacaactggttgctggaagataggaaaaagatgcgactaacgcatgaacaaatcatcaccctgaagagcagcagtgctccacatgaaccactgcccccggaggcgcccccagcgaagaaaatcaaaaaggaacccgaagaacctctcccaatgcaaccggagcaactcccggcgtcgataccgccccttagaaacgtccaacagacgtcaaccccctcgaatggcagcacagttccgctggatccactgataaagacggccctcccggtgatagccgacttcggtcctcggttgaagcagtcctacaaactgtggaggtccaccagccggatactggaccgctgcacggacggcatggcagattacgaccgtaatcccctgtgttggtccgtggaggacgtcgcatcttacgtggaacggtttccgggatgctccatggtaggcaatcaaattcgcgaggagcaggtcaatggaatggcgttcctgagtatgactcaggaagatctgatcaaataccttgacgttaagctaggtccggcaatcaagctatacaaccggataatacatctcaggttgcaagtggaaaagcatttcataaagttttaagctatatataataaaaattagtcataaactctaacacatgttccgttgggcatatatagtttgtatgtttagcaattgccacccgtcattaagtatggtggacgagcttattacaaaacgtatccaaatttccatgtgaaagttggagatgtctcttgcgaaccaaaataaggctcaatttggttttcgcaaaatgtaaatagtcagtttaaatatattcttccttttcccctgaataaaggattagcagtatctataacgaaatcaaatttaaataaataattattcctacagtttttgaatacagcaaa

SEQ ID NO: 761 - DNA, 2661 bp, Aedes aegypti
atgaagttacaactgtcgcttgatccgaagcaaacggatgccaaaacggagcaacgaaaggacacaatgcagaaggtaatcgatgattccaatgagaatgatgagtttcaatgggtagatgatggtggtcgagattggtcactgttcaaacggtgccgtccatcatgcattccgataacgatgatactggttctgatcgtgatggtagttttattgccactgctggatcacaatgagaagtttgctgatcaacgctcgagacaaaatcgtcttcgaaacgatgtttgctcggagggatgcaacattcagatagtggagagcattccggagggattggtttatcccaaaggaagtccttcatttatgtccacctacgaggcttggaagactttgatcggtatggcgaagaactccatcgaaataggatcgttttactggactttgaatcgtcaagacgtgtacaatcactcgagtgcttggcaaggggaagacatcttcaaactgctgctggagacgggattggctggcaatgtgtccatcaaaattgctcagagtgcaccgacttcagcgaatccatgcgttgataccgaaattctagccaatcggaaagctgcagaagtacgatcggtagatttccctcgcctttttggaggaggcgttcttcacacaaaagtgtgggtcatcgatagaactcacttctacgtcggtagcgcaaacatggattggcgatcgttgacgcaagtcaaagaattaggggttctagctacgaattgttcctgtttgacgaaagatattgctaagatattcgatgtttactgggacatgggtgttcctgattcacaaattcctgaacaatggccggaagcgtacgcaacgaagtacaacgccaataacaccctctccgttgtgttcaacaacctttttaaggtggatacctacatatcgagttctcctcctccaatgtcaaccaatggccgtagtcacgatatagatgcaatcctcaatgtcatacagaaggccgagaggttcatccacatatcagtgatggattacgtcccgttaactctgtatactcccaaaacacgctattggccaatcatcgaagacgcccttcgcagagcagcaatcgataggagagtctcaataagattactgatttcctattggaaacactcccgggaatccgagaaccacttcctcaattcgattcaagcgctatcgggctgtatgaagggagtgaacatcgaagtaaagcgattcgtggtgcctgcttcggaggatcaagagaagatccccttcggaagagtcaatcacaacaaatacatggttacggacaacactgcctatatcggaacttccaactggtccggagactatttcatcgatacggccggaatagggctggtcatgtcatcgatcgcacccaacggaactatcgtcagcgatctccaggccattttcgaaagagactggaccagtgaatacgccattcgattcgattagtttatttaaaatggtttatatacgatctatgtcatcttttacaatgaattcgatttaaaaataaattagttttttgagaaagtcgcctctttgctcttttcgtgcgttttcaagtgaacttgcagcggtctcagttcaatgaatcccttaggacaaatgtggcacttgaacgtgcggattccctcgtgcttttcgcgaaagtgtcgtcggagagctcgctgatgaacgtaagatgccggacagcgatcgcacttgaacgtcttccgtccagaatgttccaagacgtgggaattcaggcgattcttttgggtgaacgtcagaggacacatgggacatttgtgaggcctgtcagtggaatgaattcgcagatgtgccttcatcagacctttcttccggaaacttttgccacagtattcgcaattgtaaatttcttgagcatcgtgataccttacatgagcttgccaggaagctttcattgagaacttagcgtgacaaactggacattcgtacctgcgaacattccgatgggaatcttcgtgtccttccagttgcgccttttcccgaaaaattttaccgcattgagcgcatatcaagtttttctttttgaagaatcgcaaccgatgggctttgagatacttgaagcatttgtatgttttgtaacaaatgttacactccactgaattttccccatcgggactctcacgctgaggtaagtgaacttcaatggcatgttctttcaattcctcctgggaatcgaattttttccgacaaccgcaacaaatgttactcctcatacgtagctcttcgagttcacgaagttttagttttcgttggtggttcagttgtacatgtttctgcaggacgtagacattcgcaaattcttcatcgcattgtttgcatgaatgcaacatatcgacgtacattttacgttgatgctgtagcaataatttcctcacgtcaaatctcatgaagcaaactgggcattcaaatatcctatccccatattctttcgggttggttacacgcaacttgagatggtgtttgctggaatgttcttcaactttgtcttgcgaatcaagtggataattcttgcaagaacaacatcgttttggttgcgaattggcctttacgccataatatactcgctttttggttcta

SEQ ID NO: 762 - DNA, 1846 bp, Aedes aegypti
aaacgaaaagcttctgattaagcatgaaaacgctttacgaaactcaccacaagtttgatatttgagctggcttaccaatacattctagcgcgcaaacgcaaaatgcagatatgttcggcagtagtcaaagctcaaaacagctgagtcgaataagataggccaactgattgatgttgctgagattttagctgcttcagttttccaaacgatagcatttaaaatgatgtctaaagccagaatatcatctctgatgaaagtgatttctagtggatcatgtagctgtccggctcattcgcggtcatccactggaggcttgaatgtatcttcagaaaatgaatacgctttcgaagttataacaacctttgaccgcagttgaagatttgattacatacaaagttcaatttcagatgtcttcttcaactatacgctacgggccgggtgttagtaaagaactgggacatgatctgcaaaatctcaatgcaaagaatgtatgcattgttacggaccgtaatgtggcaaaactcaattcggtcaaggtagcgtttgattcactgacgcgttgtggaatccagtaccaggtttacgacgaaacacgcgttgagccaactgatcaaagcttacttcatgctgccgaatatgctcgccaaaataagttcgattcgtttgttgctattggaggtgggtccgttatcgatacctgcaaggtggccaatctattcagtgccgatcgcgaagcagaatttctagattacgtcaacgctcccataggcaaagcaaaagaggttaatgtaaaactgaaacctctaatagccgttccgactacggccgggactggttccgaaacaacgggagtggtgatttttgattacaaaccactacacgcaaaaacaggtatttccagtaaatatttgagacctcaattgggactaattgatccactgcacactctaagtcaacctgagaaggtcgctgcctattgtgggttcgatgtattttgtcatgctttggagagtttcaccgcaattccttacaccgaacgtggatcggcccccatgaatccaaatcttcgtccaccgtatcaaggaagtaatcctatttccgacgtgtgggctcgttttgcactgaagattatacgtgaaaattttatatcggctgtgttcaaccaagacgaccttaaggctcgttccaacatgcatttagcatcaacgatggctggagtaggatttggcaatgccggagtccatctttgccatgggttgtcgtatccaatttcaggacatgtgaaaaagttcgttcctgatggatatagtggcgaccatccgattataccacatgggctatcggtagtgatgacagctccagcagtttttaaatttactgctgcctcttgtccggaacgacatctggaagctgccgaattgctaggagcaaatgtttcgaaggcaaatcgtaatgatgcaggttcaatactctcggacgtggttcgacaatacatgtacaagctgaagattgaaaatggactggattccctaggttttacacgcgacgacatccaaagtctagtgaaaggaactctaccgcaagaacgcatcacgaagctagcgccacgtgcacagacggaggaagaccttgcgagtctgttcgaaaattcgatgactgtttactaaaatcgcatgacgattaacctttaatccacaaataaccatgcgtctccttcagttagcacagcacgaatcaaattacagccatgatggatgtacactgatcacaataaacgaggcattaattgcctcctgtcaaaacttctaatttagatgatattaggtaaacataaaatctgtacatt

SEQ ID NO: 763 - DNA, 1334 bp, Aedes aegypti
atggacaacgctacgtttgtcgaaagctggaacagtatcataccgcacaagataaagccggctgatctggaacacccgacggagtcgtttatgtgccgaagcttggtcagcttcttccggatgatgaaatacgatgtttcggagtttgaccacatgtacaatgaacccaaagagtccactattagaaaaagggtacaaatagtggccaacaccaatcacttctaccaactgtgtatgggatcaaagcagagaaatttcctttacgtggacctgatcaaaccctcacccaagaagacgatccacgtgctgaacatcttgctcaactatctgttctacatcaacatggttcgagacgaaacgattgaaaaggccactcagtgcactgcaaggtatcacgagctggaagccaacatcaaccagcagaaacgagaaatggaaaaccataagatcaagatcaacaatatagagcaaaacatcagtaaaatgcgacaccagctgccacagctggagtccgacaacgataagctcagagagacgaagcagcaactgttggagaagatcgcggccaccaaagcagcagatgaagagttggcggaaaagatcaccaaactgaaaatggactatgccatgttgcaggatcgacgggtagacgatgaggaagccgctgctttgatacggaaaaacgaagaactggaggcagaaattgaagagtacgaaaagcaggaaaagacactgcaaacgaccaattctgagtatgcaacgctcatcagccagatcaagccgtgtatttttgctgcggaagagatcctgcagaatccacaggatgattcactgatgaaaatcaaaaaccaagtggacactcttcggttaaactacagtaaactggaagcagagtgcgctaggaaaacgaccacccttcaggcattgcagaaaaattgcgaagccatacgagactacgttaccgaagtggagaaacagctctcggtgggacacaaagccaaacgtaaaaccgaacgccaaacaatcagcgatctcggtaagcagcagatgcagctggacgaactgcacgaacagaacgatgtctatctggagcagatcaaggcactgaaagaggaaatgctgctgataatgcagatgagcgaacaggcgaaggcttttctgatgcgagacccggtcaatcggccgttgtcatccaagtagcgctcgttaatgcttagcacaattgtatagtcctgttcgtccctcttttgaggagttttggatcattgctatttatcaataaaaataaataaatatttattccggctgcgatcaatgcactaagccaatcaaag

SEQ ID NO: 764 - DNA, 858 bp, Aedes aegypti
caaactttcatataaattggacgctgacgctaattacggcattcagtactcagtggtcaataattcgaacaaccttatccaagttaagtagtcaggatgttcaagttcctcattcttttcgctcttgtgcctgcgatggcctttgctgcggtcaacttccgagtatgttccaacaaagctccaacgccaaccaccttgactgtgaacgactgctccggtgacaattgcgttctggttgccaaaaaaccgctgtacgctctggccagtgggattgtcagcagtgttaacagcaagacggccaccacccgaatcgttgcccgtttccttggtatggacctcggtttcaggacccctccggagctgaccaatgcttgcaatggaggaatactgggtggctgtccgatcgttgccggaagagccttcaactacgttcttgttgacgattcactggaggttccggcggtcaatatgccggtcgaaatcgaagtcagtctgaccggtgacggtggcgtagctttgggttgcgttcgtttcaatgccagaatcgcgaaaagataatgcgatttcgagtgatgttttgtgttggggatggttttaaaacttgttctaacaaatgagaaattttggtaccaaagttttgaataaggattttattcaagtaaattatttattttatgtaaaatattttagcgattcacttgttatttttttgcaaataaatatatttaacaaaaaaaatgtgttctgagtgaaattggcaatattattatagaagcatgtcaaacttgtttgaagcaccgcgtgacaaattgaacatttttttcttcaagatattttacctatgcattgataagtgaa

SEQ ID NO: 765 - DNA, 2632 bp, Aedes aegypti
taacgttacgataccctgtcagttgagatcattgcaaacgaattgaccgaaaaggtatttgggatgtaagtgcgctgtgaggttgttcgtacgtcccaaggaaattattgccgtaaaagacgaaggcctaagcaaggaacacacgatggaagaaccgcacaccactccgaagaagaaattcagcggcctggaacatcacgacgcaatctttaagaccctgcaaaattttaccgccccgacgagtccaaagcttccgacgatcaaggacttcagcatagtgaaaccaattagccgaggagctttcgggaaggtctttctaggatataagaaaaatgatcaggacaagctatttgctatcaaggtgatgcgcaaatcggagatgatcaacaagaacatggtatcgcaggtgatcaccgagcggaatgccctggccctgtccaggagtcctttctgcgttattctctactactcgctgcagacgatttcgtccgtctatctggtgatggaatacatggtgggaggcgatttgaagtctctgctggccatgtatggattcttcgaggaagccgccgccagattctatgcggccgaaatatgtctggccctgcagtacctgcacaagcatgggatcgtgcatcgtgacatcaaaccggacaacatgctgatttcggcttcggggcacgttaagctgacggatttcgggttgagccggatcgagatgagtcgggatctggagatttcggatctgataaactgctcgccgagtttgaatgctaggacacctgggcagttgctttcgctgacgtcgcatctgtcattcggttcccacgataagcgccttcaggaacagcttgagaaggaccgtttgcagcaatcgtcggaaagtgaactagacaattcctttacgcattccaagcagaacgagagcaaaatgtccggcgtgagtccgttcttttccgcggagcagaacgctagtttgctggaggaactaaaagaggtccagaaagtggtggacggcagaatgacggcggatatgtcctcgtcgtattatacgtgcaattccagcaccgaggggaagagcagcagcggaagctacacatctctcaacggaaacaatgccgagtgccgaatgacggacagacaaagctgtgatagtaaggaaggcgcggattgtgacaaagaaaaccaccagcagtgtggtaacattagatcggtaatgacggagaaatataaggattcgttcgatttcctattgcttccggggaaccacaagtgtaagacacacgtgagcaatgattcgggagtttccagtcggaagagcgacatatcgaacattccggccgagctgtcggccatcgagcggccgacggattgctccggccatcacagcagcggcaataaggactactcgtgttcggatttttctcgcagttatagtatgagtaacataaatgaatcctgcaattcgagacatcactatgattcaccgataaagaacggaatcaggtgcttcaagagaccggagtactttaggggtataaaacgcaaacggcacccggtgagccgggtcgattcgctaatgtcggacccggatggaagcactgccagcaccggtctcacccaggaaattgacgtgatggacatcggcagcagcactccgaaaaaacgaaaggcagcttcccccatcaaaggtgtcctcaaagttcgttctttgtccgacgacgaaatgccggttaacgaaaaccacggaaatgtaatgttctccacgccggtttcctcgcagaaaatccgccgcgaaggtggtcagttagctaaactcaaaaacacccgcttcgtgttgccatcatccgtcgagcagctgcggaaatcggaagccttcatcaaaatcaccgacgaatccgtcatgtctcccatctgtacaggtaattcgtccgtgcccaatgtaggaaccacgcctaaaactgtcaagacgccattcaggacaccaaaatcggtacgacgggctccgatcgagtccgatgagcgaatactcggcactccagactacttggctcccgaattgcttctccagcaaggccatggcccacaagtcgactggtgggcgttgggagtctgcttgtacgagttcatgaccggtgttcccccattcaacgacgaaactccccagaaagtattcgagaacattttaagccgcaacatcgaatggccccaagatgacgaatccctctcagtggaagcggtcgaagccgtggaacaactgctggatatggaccccaccacaaggcctcaggccgatcagatgaaggctatggcgttcttcgaactggtcgagtgggacaacatggaatcgatgccgccgccattcatcccgaacccggatgacccacaggacaccgggtactttgaggcacgcaacgtgatgcagcatttggtcttgtccaacttcgacatggatgcctactgacggaggacggagtttgagcccgaaaagcagacactgggatgtttgtgtgcgatggggtgggacgggccccggtaaaattacgcgtaacaattgtaacctgttatatcttttatttgtaggaataagaatttgtgataaataaactcggtattaaagactcgtcggcga

SEQ ID NO: 766 - DNA, 745 bp, Aedes aegypti
gcagtaaagtttcactgtgacgtcatggatttttaacaagctaacacaacacaggcaaacaatttcagcttgccgaaacctgctatatataacttaatcctttcaatcttgccaacaaaatttattagaaaagaatccttatcactatcagctcgttattgtttcgttttatcttcatatttcattccaatacgttttactgattaggtgtcgtatacctttttgaattgacaatcccactagtattaactcgagtgccttctggtgacattatcaaatcagacgttgttcaaaatggttcagaaacactccgtagccggctacgaaaacttcgtcagctttatgaaggacttccagagcaatggccagatggtgaatatccttttctcgggagctaagctggaaaacggcgtcagctggtgcagtgattgcgttgaagctgcccccttcatcgaagcggccctggcaacggcaccggcagaatcccatttcatccacgtagacgtcggggatagaccaacgtggaaagatatgaataacccgttccgcaagaatagcgatacccatctcagcgttattccaacactgatccggtggaagaatccccagcgattagaaggcgaacagtgctgcaaggcagatcttctggagatgttcttcgccgatgaggactgaatgatgaaatggtgtaacattacggttcagcgaataaagcaagatgtgtgggaattttaatcattcagct

SEQ ID NO: 767 - DNA, 684 bp, Aedes aegypti
atgccccgtccagtgaagttcttctacgatctgctgtcgacgcactcgagagccctctacatgttctttgaggccaccaaaatcccgtacgatccgattccggtttgcgccaccaaaggcgagcatctgaccgacgagtaccgcgagtgcgtcaaccgcttccagcaagtacccagcatcatcgacgatggcttcaaattatccaacggcgtcaccattctcaagtacctgatccgtgagaaactaatcccggaacactggtaccctcgcgatagccaactgcgagccaagatcgatgaatatctcgagtggcagcacgacaatagttcaaaggtgtgcaatgcctttgtccaggaaaagtggagcctcctgaacatcgaagacgaacgctccagcgaacagaaagtcgaggaataccgccgccagatggagcagaacctgaatcagctggaacgggaatggttggtgcccggacggttcatcattggcgatcggattaccatcgcggacattctggccgcttgcgagatcgagcagcctaagattgtcggcatggatccgttccagggaagaccaaagctagcggcctggctcgaaaaggtgcgttacaccatgacgccctactaccaggaagcacaccaggacttttacaagttcaccgagaaagcctcggtgaagaattga

SEQ ID NO: 768 - DNA, 880 bp, Aedes aegypti
atgcagattgcggagaagatcggaaatccaactccggctttgtcattatgttcaacagcggcactattagctgggcgtccaggaaacagacctcttcccggaatgatgagtgtcgattacgctattgtgggaaataatgccagcatacttgtgtcgcctttttcacgtttcggtaacattctggacgtctgcaacgtagttaagcgagtgaccagcaaaaacgtcgatgaatttatcgccatggtcatcaccagtcagatactgtccattatagaccacctgcacagctgtatgatcatccacgccgacatcaaaccggataattttctgctaatgaatcctgttgatttggattctgcgataccgtgcgtgcaactgattgactttggtgtttccattgatctcaaattgtttcccaaggacacaaccttcagaaaagtcgtaacaacggaatgtttcacttgcattgaaatgctcgaaaggaggccgtggacttatcagccagacctgtacggtgttgctggaacgacacacgtcatgctgttcggaacatacatggaagtgcagaaagatatcgtcaattggaacatcaaggcacggatgccacggtatttccggaaaaccgtctgggacaactacttctcatcgatgctgaacatccgtgactgtaacgaaatgcccaacttgcaagcgttgagaggcaggttactggcagaaatcgaagaaaacagaaagtatattcgtgataaggtaagcgagttcaatcaagctattttatccgggtgaacacaaagtcaaccattgactacagatgtaaaagtattttaattaatggaactaatctttctaatcaaatacaaacaatttcttactaggactg

SEQ ID NO: 769 - DNA, 2658 bp, Aedes aegypti
atggcagaaattccgagcagcgagatcccttcgtggatgaccaaggagtattttactgatgtggtagcccagaagttgggaatcgctgaaagtgaggtggaaattagtgctcttaacgtgaaacctgccaccgagtctggggataactttgcttcgaagctgtatcgcgtggcgatcgatgtcagctgcagtgatggatcctcaaagaaaatcccattgattgtgaaagccttgcccaatcttggtctggctgaagaaatgattcagatgttgaacattttcccaaaggaaactgcaatgtacgcggatttattgccgaagtttgaagaactataccgcgagaagggtgttgaagtcagcttcggtcccaagtgcttgaagaacagcactaagccaacggacattatcgtgatggaggatctcagcgagagagatttcagaatggccaatagacgagaggggctcgatcgtgctcacgtggacacgttattgaaaaagttggctcagctgcatgctgcttctgctgtgtatcatgagaagaatggcgagtataaggcttgctttcaggagggcatatacgccgagagatcgttggttatgtttgaaagccacatgaagtcacacatggagtcgttgtcgcgaatcattcggaagtattggccaaacggagagttctatcatgacgttatgaatgatttcgggatcaatatgttcttcgagatgattaaaatagttaaggccgacccgaatggattcaatgtgctgaatcacggtgatgcatggtgtaataatttcatgttccgatacggtgcggacaacgcgattgaggaaatcactttggttgacttccagatgtgcgtatggtcatcgcccgtcatcgatctacactactttatttttacgtccatcaacccaacgattcgtttgcctcaaatgaacagtattattggtttgtactaccgtaatttggtcgacaatctccagctgctcggctactctaagaacatcccaaccttgaaggaccttcacctggacttcatcgataagattctatatggattctcatcgtccttctcggttctgcccatttgcctgatggagaagaccgacaacgcctcgatcgatacgatgatggccgatggtgaagccggccatgctttccgagaaaaaatgtacgccaatccggtgtacttgaagcagttggaagagcttctgccatatttctacaactatggagcgtttgattgtcggcacactggatatcaatcgccaagtaaagtctacagtgattacctcttgcttcccggatggatgcggaaggaattcttctatgaggttgtcgaacgaaagcttggtctggaactgggacaatattcgatcgagaaaatttgggtggaaatggccaccaagaaaggtgataactacggatctacaatgtaccgcgcaaaattagatgtattggataaaacttcgtcgtctttgaatcagttctccgtcatcgtaaaaagccgcccaactggaatggctgcggaattcagcaacaagctagatccattttctaaggaaatcgaaatgttcacgaagattattccagcatttgaaaaattctacgaagagaaaggtgtaaaagtagaaattggacctcggtgcttgaaaatctgcaaaggagtcccgagtgacattatcgtaatggaagatttgtgtagccaaaactacagacttggcaacagacaggatggtgtcgatcaggagcacgtagaatcggttttggagaagctggcagagttccatgctgcttcggcggtttaccatgagcgaaatggagactattcaagttccttcaaagaaggtttgtacaatagaagcaaccttcctacgatggaatacatgttcagaccagcttacgagactggtttagaaatattgaaatcgcacacgtttgcaaaagactacgtagatgatttggaaaagcttcgacctgtgattttcagtagaacaattgaaaactttgctgtcgatcccgctggatttaatgtgttgaatcatggcgacttctggatcaacaacgtcatgttccagtacgacagtgaagatcgtctgaaggattctacgcttctggatttccaggtgtgcttctatgggtccccagctttggatttgaactacttcttatttgtttgtgtaaagttggatatccgtctctccaagctgaaccatttcatccgatattatcacgaaaagctagtggataatctaacgctgctggggtacggaaaagctttgcccacgttgaagagcttgcagtatgatttctacgatcgaatggtgtacggatcatccaacattttcggtatcatggctgttttggccgttgagccatcggaagacgtcagttttgaaaagattcagcaggatagcgaagcgggcaaggagttgcgaaaacgtatctacaccaatgagcgatatgtgaaagctttggaacttctattgccctactttggagaccgtggagcattcaaggaaggagcggaattgtgcagctttttcaaaaagaataaaacgagtgtttagttttatatcgcaatagaaacgtttgttttggaaaacgattccttaatttatgacagtggcaataaacttcaaatttgagaaacattc

SEQ ID NO: 770 - DNA, 447 bp, Aedes aegypti
tacacgtcgtcgtagcttggaatgtcccaatgcataattttttgaaacagtatatatttcggtccataaaaccaagtggcacatttgcagctgtctttttgacttatgttacgtcatcgctacttcatggattgaactttcaactgtgggccactttattgacgataggtgtgtggagctacgtagaatacaacataagaagcaaactggcacaaatattttcagcttgcgttctagtcaacaagtgttcgaatacttgcacaaaacatcatttaggacagagcagaccgatgactattttcattaatgttactcctttaagcacacgctggataaatggcaaaagctagactatgcttcgcattggctgctactactagtgtacatttttaactggataatttgattcaagataacatcgtctctctcagtattaaactttgtgat

SEQ ID NO: 771 - DNA, 2106 bp, Aedes aegypti
aggggcgagacgaaaaggcaggcggccggcagaaaacagtccagttgtcaaactccacgacagcagtgagcagtgtgaaagggggtttagttggtggaattcaaaacgatgccaggcaaaaccgctgggcatcaggtaaaaaattgcgattctgtaaacaaagcagcaagctttttgaaggtcatcttatttgttgatcatgttttgtgtgaaattgttcatggataagcatcatttacttataaaataacgttttcaacagtgttcatcacggttaccataatatatgcctatgccgagacctcagctaacaaaaaaaatagatgaaataccatggaaacgctaccagttgagatattggaaaaaatattcaaacatctacgctacagtgacctgaagcaagtgtcatctgtttgtcatttgtggtacgatgtctaccaacggtcgtcattcatgtccaagatggtggtacatttcaaaaaagaacttacactggacacgatcgacctttttctccgcagtgagtgtctgtaccagaacatatgtttcacttcgattccattctacgacgttgccaagtcaaagagaagcatctgtcggaaggacgtgatctacgaagatagtcgctttgtagaaaaaatacgtcaatttctgcttaaatttgctgactccgtgcagatgctgtcattctgtaaatgtcaccttgaaagaggtagactgatcgaatttctggaattaattccagaactcaaaggactggaatttgaagaatgtatatttgccggtgatgatgcgtgcgtggcatttccgttgtccaaattgaagaaattcaatttcaagtatccggaagatgagattcaacgattcgagtctggacatgtctacagttctctggctaaagttcaatgcagcttggtcaaacttaaggttcagttgttcgtgaatgaaatgttcggtgatccggatagtgacttatgggagcaggtcaaggctgttacccgactggtgaagttgcacaagaaaactatgaagtctttcaaggtagacagcttcaatgatcctgctctgaaaaagcttgtttttgacgacgaggaacttcaactggagaaggtcgtgtttggcgaactaaagctaaggaaagacgaccaagtattctttaattttctagagaagcaaaagaaaatcaagaaaatggaaatatcaattgaatccagtatagacgccaataatgatcagtatctgcaaaccatctgtgatcggttacagaagttggaacaattctactacgacatgtcccgaaattcagacagtggactggagaatctacaaaaactaaaaaaattgaaaaatttagtgctgacgaaaaataggaataccgtaggactgacagagcactgtttcgatcacatttatatgcccaatctgaaatctttaggcatatattacaaagaactgcagtttccagcagtgcaacaaataccggttagttttcctaatcttaaggctctcaatctaagcgaatgtggaaaaggcgtaaccgatgaaacggttcaactcatcttccgctcgctaccggagctcgaaagccttgatctcagcaaatgtaagcaagttaccgaacaggctttcctaggctgtaccaaaataggtaacttgaggaaattgaaagacctagtgttggaaaaatgtgatggcgtaacggatttgtcattggctgcattcgacaatccggcgttaaagagtatcagtgttgccatgtgcacaagaataacgaacgtaggttgggaggcattgtgccgtcaatgtccgaacatcacatggctgaacgcttcgcattgcaggaacttcgatgaccaatcagcgttgatcgttgcaaccatgcttggcgaattggaagttttgaacttgttcaaaaactgttcggtaacaaacgaagcggtttacagtttggtagagaactgccgatatttggaggatctttgttttaccaaatgtagaggagttaaaatgaaaaagcccgagtattttgatgacaagatgaatcgagtcaacaaagattgtctagtgaataaaaagaaaatttaactttgctactgtgaatacaaa

SEQ ID NO: 772 - DNA, 1356 bp, Aedes aegypti
atgctggttgaaaaattcctacagataaccaaagccaaggaacgatactacgccgactcacaaacccatcgacacaaactgcgaatagtccaagctctttgtgtggtaatcaagctaacaggaacaaaaccgtactccctgttagacatagtcctgtacgagacaaatcaaccgaacatcaactacctcatcgagttgattcttgcagactcaacaatcgacactctaaccattatcaactccctcaagaatgacaaagtcaaagtgtccggcgtgcagtcagtgttcgtcattctatggttacgatgctgcaaaaccaactacctcgacgcggaatacatcaactttttgttgccgtggactatggcacagaacttttctacgcgcttgtacgcacagatcaccatatccaaactgttggagaagttctacgaaaagcccaccaaaccagaccaatgcccttttagtaacattttcagtgcaatcaacagttacctcaagcaaggcaacgtggagaagaatttggagaaatgtatgaaagacttccgcttcaacagcatcttcgattacgacaatctgctgacgctggaaaacgtgttccacaatattcccaaagtgtctgggatggcttcggaggatgttgttgggactaaaagtcttagggagtgttttgaaacattgcggttgagcgaagttaatttgggggacgccctgaaattcgattatttgactagtgagaggaaggagaatttgttcctgaaccaaggttttggcggagcagatcatattcagaaaaagatagttccgctgaagtgtttggagccaacgttggaactgcttacgaatttgccagagaagctgcgcttgaaaaagaaaggcaatgtcgagggcttgatcgttgtagcaagtctagtcaacagagcgccaaatttaggtggcttagctcgcagcagcgaaatcttcgcggtgaaacagtacatcgttaattcgttgaaggatttggagaacaaagaattccaagcgctgagtatgactgcggaaaagtggttgaacgttgcggagctgaaatccttccagattgtcgactatttgctggagatgaagtcaaaaggatactctgtcgttggtgcagaacaaacgaccggaagccgaccgatacaacagatagaatttccgaaacgctcgattctagtgctggggcatgagaaggaaggacttcctgcgcacataatttcccatttggatataatagcggaaattccacagttcggagtggttcggtctttgaatgttcacgttactggtgctatttttatgtgggaatacgctaaacagcatcatgtggttgatctatga

SEQ ID NO: 773 - DNA, 1502 bp, Aedes aegypti
agccagacacctttttaagatctaacttgtcattcagttttacgatcgggcttcgcataagtttcgactccgcgggatcacaaaattgattataattaggtagtttttggctgttaaaacttctaaacgttatcaaacgctccggttttttttgttaacaagtaaaaatgtccaaggctcatcctccagagttgaaaaagtacatggacaaacgtttgtccctgaagttgaacggcggacgagtggtttccggtattctacgaggatttgaccccttcatgaacgttgtgcttgatgaatccatcgaagaatgcaaggacagcacgcgaaacaacattgggatggtggtcatccgcggcaacagtatcatcatggtggaagcactggatcggatataatctcccgttggctccgttcatgggagtcaacgtaatcttcttcgtagcgttaaggacatgtgtgaattggtgaaataaaacgttcaattgcgatactggatattacgtaagtctgttttattgtacactggatgacataatatggatttgtgtttgcctctggagtcatttgaatgaatgaaatgattgcttcttgacgacaatagatgtttttctaccgatagttttcaagaatccatgaattacagtggttagatgattaaaatattttcggaggtctcacgttattctcaattgccagcaattctcttacgatgccaatatcgtcgttgagagcaaaaattcaaattattaggacaacttttcgtccttcacggttgctatatgttgcatttcggaggtggaatcatttagaaaatcctgcccaaatgaagaatttgctgatctattgtgttctgttgagtggcaatcctcagcttggctctgcttgtaacgttccacttcttcgtgtaggcgattattgatgtccgtcaactataagaaatacataaaaactcataaattgtacggtattacaactgcaatgccttacctgacgttcgatttgctgaatttggtctttggtttccagaatcttcttatccaagttgggatcatgttcctcgtgttcgatgtcccaacctgcttgttgctgttgaagttcgagcgccttttgctcttctagcaattgttctaattgttgctgctgtttctggagaaagacttgctgttcctgcgcagatggcgttaaatacttcacaactcgtcgagtatttcccgctgtatcaatgttatgaacggtgcgcttatgattggtcaattggtaacactggatgaagccctcattgcaaatatcgcaacggtatcgctctccggtatgacgccggacatgagctttaaggtcatttccttgagcaaaactttttggacagtgtggacattgataaggcttcaagccgttgtgagttcgactgtgcactacaagattgtaagcccgatggaaacctttaccgcagatagtacaaaggtgagttttttcgttggtatgatacttctcgtgaacct

SEQ ID NO: 774 - DNA, 902 bp, Aedes aegypti
cagtttgttatttatcgcaccggtgaactgcccgctcactgcccacatcaaaaatcgttacaaatcaccacgaattttgatttgttttacgatcatttctaggatttaactggcaattattacaattattcgcttacgtgtaaatagttcctatcgaagtgaggatggcaaccagcactcaaaacgctatcaccctcaaaggatcagcagccatcataacggaatatctgaactacggcatcaactcgatcctgttccagcgtgggatctacccgccggagcagttcaccagtgtgcagcagtacggtctcaccatcctgatgtccaaggacgaaaagatcattgccttcctccaaaacgttctttgccaggtgcaggattggctctctcgcaacgaggtggaaaagatatcgatggtcatcaccaatgtgcacaccaaagaggtcctcgagtgctgggatttcaaggtgcagaacgagcccggcgatgggcccaagatcgatccgaacaatccgacttcgtcaaaggagcttaaaaagattcaggcggaaatccgggacgtcatgaggcagattgcggccacgatcagctatctgccgctgattgagtacatctgtacgtttgatgttctgatccatacgctgaaacagacggacgtgccggaaaaatggaacgaaaccggagacgtgcaaatccagaacgcacagaccgtgcagctgaagtcgttctccacggggctgcacaagctggatacgatcgtaaactataaaatgactgattagtaaaactgggagggtttatttagtgattaggataattattgtaaatgattatgcaggtagcacggatcatgatataagcttataaagggttttttaaccaatgattttaccaaaataaaa

SEQ ID NO: 775 - DNA, 1832 bp, Aedes aegypti
ccagttgaatttcaagacagtagcatcatgtcgcgaaattttacgactgggtttggtattatatgttttgtgttattgatattcagaggaaagtcagtacattcggcagaagagtctacagaagcagttgctagcagtaatggaaatactgataattttggatatgaagtgttgctcacgaaaatggactacatcgagtacaagttgatggaactggagtttgaactgaaggagcaaaatgaacaaacgacgcgcaatcaagcccgattggaaaagacccacgaaggcatgtcatggatgatgactaggatggagcaagccataagtcaaaattttacgtcggtgttgggacaatcttggcgaattttgcaacagcaaataagttgttcccatcacgaaagcttacgaaatgcaattttcaaaatgaaacctgtcaaaggaccttcggataacgtaaggatgttgttcgacctgcagcagtttaaggcacgaggaccatttgagtcgtgtaaggcagagccgagtaagacctctggaaaatatatgctgcaacctttccttacggaggacccatttgttgctttctgtgagcaaaccaagttcggaggcggttggttagtgatacaacaccgttttgatggttcggtggagttctacagaaactggaccgagtataaaaacgggttcggagaagccgataaagagttctggataggactcgatcgtttacataagttaacgaaagacaaaagtcaccaactgctgattgaattggaagattttgctggagaatacaaatatgcccgatatgccgggttccaaatcggcgatcaatcggagaagtattcccttaaaactctgggagcgtacagtggaactgcaggagactcactgacctaccataaaggaatgatgtttacaactttggatagcgacaatgacaaaaatgctggtaattgtgctgaagtttgcacgggtgcttggtggtacaatacgtgtcatcatagcaacttgaatggaaagtttatgactggaaatgatcaaagatctatcacctggtaccattttaaaagtgcacattatggtctcaaatacacacgaatgatgatacgagagatataggacgtttcctaaccgtagagtttgatcaagttggtttcgtaattgtgttggccgcgtgtattgagatttacagcatataggacaacaacaaattagttatacacggtacctacatgacgtaacaatactatgtatactcatcatcagaagaaaaacgacctccaactgcattacatctgattgactgcaatctccatattgaataagataactttaagagcatcacaatagatttgaatgtgattattttaaaaattgtttatttctttatatccataaatccagaaatctgtcattagctgtgcaataaaatggaaatcatactgtcttatcgcccttggcgagttcgtcactattgaattgaaatactttcggttgtttttctacaatttctagataaattcgtttataaaccgaaaaaagccttaacatgttccccagggatgttaataatttaccctcacattcgtttcccatgaactctaagatgtgtaagattccacaaaaaatgtgaatgaaaaactacaaacgtgtagtttaccgacatacattttgaccgaattgttgaatattcacgaaaagaaataaaccttaatttattattatttgaatctaatatttcgttataagaaacaaatatgtatgcactttgtttaaaaaaaaacttattctaaagacaaatatctataaataaataagtgtaatatact

SEQ ID NO: 776 - DNA, 969 bp, Aedes aegypti
gaaagtagattattgttggtaaaatataattgttatcgtaatataggcatgctttaccaagaaaaaggaaacaacagtttggctttagactacttaactcatgccattgagctagacgacaatgatgtttatacaatgtgctcactcgccgaattagcaattaagaatggacaaattccagttgccaagatatactttgaaaaatgccttgaacgtaacccgaatcactggccgagcgtagatggtatgctacaattgttattgacatcagaaaacataattgaagcttggttatgggctatccattgtcataagatggataaaaactacagaaaggcaatcgatgtgttacaagaaataaacactagatttacatccagtcgtcaatttatggaaaatctcctgaaggaaaaacttccaaccccatacgcagtcgatggtgtcattacaaaatactcaaactttactaaaagtaattgtgctgccttagttgatggcactgacaaccgtatccaagctgacattgattttgaaaagattagaatttcgcaaataaactggacaaccataggtactttgatacttcaacttcatcagcttctgaagcaaacagatcagataataaaacattttcatctaagcgattgttttggaaagccaattgaaaaacagatgtgggattgcaacgtcgtagatgctccgtcttgccacataatatcagatgatactgcgccagaaataacagatgccaggagctcaacaaacttagattcagcaatggacaacgaagctaaaagtcgtcgccgaggtagtgaactaaaaattctagagcaatggggctggcacaaaaatcgtcggtcaacgaaaagaaaaagtttgcatgatagtgcagaattcatagaatcaactgctgatggatttctgaagcgggcattgtcgcaatattttatgtaagtttttgaatagtga

SEQ ID NO: 777 - DNA, 2178 bp, Aedes aegypti
gaaatcgctaaaatggttgcaaatacgttcacaaaatacgcgaaatatacggtagaagagctagaatcgtacgtggcggaccccaattcatgtgtgcagaagctggagtggacaaacctggtttccgtactgccaaagtatctcggcgatatctgcgagggagtaaaggcatgtctgacgcaaaagatcggaaagtatgaccggacggttgatgggataattctggcgttcaagaatacgaagatcctgagtcctttgtcggctattaggcccaacagtgtccggatccatgtcaaggtgtcgtcgaatttctacgtgtttcgtcccatcagtggggccacaattgaaggaaccatcaaatatgtctcgaagaattacctcagcgcagtcatctatggggttttcaacgttacgatccggttgcagaagcaaaagttgcaggaacagaaacaaggacgggtgataagctttatcgtcaaatccttcgacatgaaaagcgacctgccgtatattgagggagagcttatttccacgccggatgatctggatgaccaactggaattggtagagcacagggtgaagaaggagaaatcgccgagaaaatcaataaaagcggagccaatggatgtccaggaagaagttactaacgttcagacaaaatcagaagccgactccacaggaatggccaccgaagacggtgaatcggacgatgaggatgatgttgagagatcaatgaaagctattttggacaatcttcagaaagaaatgagcgattcagcttcagaaagtcattcgaaatcgaagtccgggccgaaagcgcaggatacgaataaaaagaacaaacgaaagaaaagtggcgattcaacaaaaatgaaggaaaaaagcaagccaaaacaggcgaaactcaatgggcacgacgaagatcccaaggacgacatcgaagattccataaaggccattttgagtggtattgaaaaggaaatgagtgacgtcgcagattcagattatagttcctcgcagccgaataaatctgaaataccaacgccgtctgccataaagacagaaagaatcgataaaaagcctaaccgaaaaaatacaattgaatctggttcacccaaaaaaggaagcaaacggaaacaacccaaattgaacggacattctgttggtgaggaaaacaaccagcatgatgatatggaagactcgatccaagccctattaagtggtcttgagaaagaaatgagcgacgctgtggaatcagaccacggtgcctccaaattagaggacaccaaattggaagcaccatcttccgcaaagaaatcttctgggaaaaagaagaaaaagaaacaagagttcaacattgattccctggagcaagaactgttacaaaaacttgcagccgaatacagcgaaccggaaacagcagagtccgcggtaacgcaatctgcaaagaataagaaaaacaaatctaagaaggtgaaagaggacgactttgaggcttcgattatgtcttccattctgaagtgtgctgcgtacgctgaggagagcgaatccaagaacagtcctgcctcgtcgccatcgaagaaaatgggtaaaactgcgcggaagtccgtacggttcgataacaccatcacggaagcatcgttcaatgcttttgactcgtccgagcttctggaaatatcgcagctccagtcaccatcgttgtcctccacgttgaaaggcaactcgtagtagacattcagttgatagttcccaacacaagataatgtgctgtaatgaatgacagaagattttgcagagtattgcaaaatgctgtaaatggatcgtttgtttgagaaccttacaaaccccatattgattaaaatgtgttttattaaaagtctaaatcgaaactctaagaaagaaatcaatcatcgttaaaaggataaaatcttaaaacaagcagtttcaggcattttttaattttgaatacacaggatcatcgttactttatttcaactgaaaattttcatcaatgcttgttcttatattactcaaagtggacgtttatgatttgtcagacaaacggttctattagtaatacttaatttaataagtgtaattttcaatacaacgctaactaagatgttcattgtcgttcacctagccaaaggatgtaagtaatattacaataaaaccgtt

SEQ ID NO: 778 - DNA, 1494 bp, Aedes aegypti
ggttgtggccaactttgggcgctctgcgatggaaaggacatggaccggacgctgttgatgcagatcgagttgaatggcgagcggaagtttgtccgaggtgcggtgaagctgttggggtatttccccgagagccaactgaccatggtccgccttcagagactgcacgaagcgaaagcggccggcttctcgaaggaacttgaaaccagcatagagctgtggtacaaaatccagtcccacataagcatcaaacttcgctggataagccactcgcagaatccttcgttttgcatcaaccagaaggcggacattgtcctccggcagtcgattctggtggacgaaacccaatccgtggcggagtacttctggagccagctgcacttcttggaaacaatcaaggaccggattctgcagattcgaagcgaagggcggccaaatccggatgacgatagctatgtcgggtcgttggatgtcagcgtgattaaggagaagacgcacaagattctgaccgagttttgcgttgtggagtcgacggattacaaactgggacagattgactcgattgtggaacgggtgaagaatcgaactgcggtggacgttacggatcggctgtggagtgtgctgaaatattgcgcatgttacgatgatttgaaagatgttctgacgttcattttcaaaatcgcatctaggagtaatctggcgaacatcccaagtaacaacaaccgactagctcagctcatcaaatccatcgcccaaggtcgactggccattccaattctgaccggatcggaaccgttcgagctactgctggaaatcggtctggaaaagatcttcaaagactaccagatcatcttccacgagagcaaaatttgcaacctggaccttgatagggtcggtcgcaactcggctgggtccggttcgagggatgcctcccgtgcatccagcattcgcaagtcgatgtacgatgccgttccgtccaataccacccagagtcgaaaaacggccatgctttcccgcgcgggaaccagtgaggatcacgaagacgatggcgttattcgaaatagttacttcaacgctgatgaggccaacatgaagataggaaagctggcccaggtccatctgctgctggagcatctcctgtccatcgagacgcacctgaagctgaccagcatctatccgcaggtggcggaggagtatttctcgcgaccaacggtaagttttgaagaaatgcgatcgaaaaagacggacaagctggagattccgattctgaacaattcgatcattgagttggtggagaattccagtccctacatccggaaagtgggaatgaccagccggagtaagtttcggacggtggagagcattttctaccagagctcggaaccaattttgcctaccaatttatttcctcagctgaaggctgagggtggggaagtgaaaaatgcctactggtgcctggagtataccaagattagtaataattggagcatttcgtag

SEQ ID NO: 779 - DNA, 1628 bp, Aedes aegypti
atctgtgcggagcaaaaatctaacagacgccgcggagcgcagtgaagttttaactaattttttttatgttttttaaattgtttgtccaaaacgttgcaaaattattcgactgtgatggccaatgtcccgtgtaaaaacccactgaagtattgtcgtctgtgtctgtccgaggatgaggaattgatcttgatggaatcgggcgacaagttgaccacatccagcaaactgctgctgcagaagttgttcctctatatgaagataacgttccacaacgagcaagactacccgagtgcgatttgctacagttgtttggatcggttcaacaactttcacgatttccggcgaatggtggtccggaaccacaatgcggtgaagacgttccgtcgcctgttcggagatcagtatgacgaggaacccaccaccatgatagaggtgatagatgattcgcagcaagagatggaaattaagcaggaattcgaagcggaggagtccaaacttgctgaacaaatagaaattgattacaagccaccgaaggaagaagtcaaagaggtggacgtctatcacctggatggggagctgaagaccgtggtggtcaaagaggaaagactttcgccggagaaatcgctgccagcaactcctgagaaggagcaaagtcaggaaccaaagagatctccccccgttacaaatctcaacgcgaatatcagcagggtaactgtcctgaaacgtccccaagggaaagtgttgaacttggagcatgccgagaagcgagccaaggcggccattttatccagattttcggtggtcaaatgttcacattgtcgcgctgtcttccgaaaccgtgagaatttgcttaaacacgagagggatgatcatcaaaatgttaccgaacatctgttgaacaaaaacgctccctcaaagtctcttccggttataaaaactaggcagatttccaagccactgccacactctccagtggcccagttgttcaagtgtccccattgcagcagcagttttattcagaagtccaactacgagcagcacatcaaaacttgcaaggctgctgcactatcgaaactgaatccccaaatagttgttaaacgaaccactccggctgccatgaatgaagtgataaaggcagccgtggccaagattggcagaaacgtacaggtcaaaccggttgaactcgtccaggtgaaacaggaggaaacggaagaccagcgcatccggtgccactattgtcccctgacctacaagacaaagtacttcctcaagaagcacatgctggacgtgcacaagatcgacgactacgagaacgtgttctactgccacgtgtgcaagctgaactactcttgtgacgaggatctgcagctgcacaaccgggccatccatcggttccagtgcaagcagtgcttggaggactttaggacttgcatgcacgcgcaaacgaacgacaccaggacgagcgagaatgggatcatcaataaaggtatttagggttgaagagtaagaacagcccccagtgctagtcgtaggaatgatagagaaagccttgtctttattgagcatgttttagtcgtgtcgaacaccgttttaatattttttaaaattttaaacatcgtttaaatgtt

SEQ ID NO: 780 - DNA, 871 bp, Aedes aegypti
aattcaatggattaatttgttttaacgtaatgtttaattgcttttcatcatggaatgggaaaactacgtaatccaacaatgcccggctagtgctttctacattccggacttcatcaccgcacaagaggaaacgttccttctgtctcaggtggccaaaacgcccaaaccccgatggactcaattgtcccacagacgcctcatcaactacggaggggttccacatcctcggggaatgattgccgaagcgatgccaccgtggttgcaaaactacgtggacaaaatcaatcaattgaccggggtattcggggacgacaagaaggccaatcatgtccttgtgaacgaatacctcgccggacagggaatcatgccccattctgatgggcctctgtttcatcctacaatcacaaccatttcctgtggatcacacgccgttctagagttctacgagccacaggaaaccgaggacggaacaacaacgacgatgcaaagggttccggtgaccaaattgctaattgagccccggagtttgctgatcctcaaggacgacatgtaccacaaatatctacactatatcgccgaaatccgacaggacgtgatagatgagaatgtttcaaatatctctaaagtaagtaaggttcaactcagcgatgtcctcgaaagaacaactcgcatttctttcaccattcggcatgttccaaaaacgtccaagatgaaaataaaattgttctaaggttcgtttatttaatgaggatgttttccctaaccgactattctgtcccttattctgcgagtcgaattgaggtaacaaaagacgactcgctcctaggttgatttttttccctaatacactgattgtattttctatctaaat

SEQ ID NO: 781 - DNA, 1034 bp, Aedes aegypti
cgtcaacgcccggggggcgtcaactctgactgaaccgaacctgaactgaaccaattacccattgtgctcaagctgcaattaatatatatacaccgtatactgaagttataattcataacattgactcgacatttgtgtttttttttcctactttaaataaacttaaattgtacttatacaataatgctagctttatatacaccattttctctaaattccatgtatcggagaatagtattattatcagcgttgagttacaagcatatacttttatcactacatgtgatttcattgaaggttttgtgcagattacactatcactagtatgagaacctacaagctacatgctatacatataatctcaaagtctgacaattgagttgttatatgtatgtccattgatatgtagataaaatgttttctaaacaaaatagaatgcgaccacgcaggctcattgaggctaaatctcctgatgtgttcattatttgtagtgcccttttggtttgttatgtttctctggccgtgccaatcgtagcaaccgacggtgtgtgtcaatcgaaccgagccggtcgccttgatactgacccgtgtttatttgttccagaaagcgcttgcaaccgggaaggaaaagcagccgaagaaatggccggtaaattgttcgcttgtgatttcgaagtttttggcatagtacaaggggttttcttcaggaagtatacgcaaaagcaggcaacaagcctggggctcaagggatggtgcatgaatacccgcgatggaaccgtcaagggccaaatggaaggggaggcgaaacccgtgaatgaaatgaagcattggctgcaaacgaaaggaagtcctaccagtcgaatcgataaagctgttttcagcgaaatgaaggaaatatcgaaatattctttcaatgacttttctgtaaaacgttgagtaaataatttaagattgtaataaactcctttgaataaattctttaaatgaataaaataatatcttaataaatcctcgagctgttgagtggaatacct

SEQ ID NO: 782 - DNA, 1032 bp, Aedes aegypti
gtgcagtttgtatgtagattatgcttaacgcaacgagtgcgatgtgaacccctattcgaagatcaaaacacttcgatggttgagttgatttgcgatctgacttcgttaaagattgaacatataccaaattctcccgcatcgctttgctcggagtgtaaaacatgccttgaacagtttgagtcttttcgagcaatgtgtttggcaaatgataaaatctttcgagatacttacattctgaacgataaacaggaaaagacggttgagattttgactgttactgaaaccggtgagcaacaaactgaagaacaggaatatttatatactaccatagacgagattcaagatgaagagcttcaagacaatcaaggcacgttggttgtagaaatagataaactagacgagttaaatagcgaaacggatgaatatgagatttattattcgaatccttctaaagaaattcagcttaaaacaaatcaaagttcttctgaagaagagcatccgactcaattggaatcaacgcctcgaaacaccaatggaagaaaactttgcatgatttgtaataaatacgtgaatcgattagcgcagcatcaactcattcacaaggaaattagaccattccagtgcgaattctgctcgaaaggattcaaccagatgagcaacctcaaaaagcacatcagactgcacaccaaagaaaagccctacctttgcaatcagtgtgacaaaggattcacgaattcgaccgagttgaaaattcacgtccgaagtcacacacaggagaggcctttcacctgtgaggagtgcgggaaatcgttcgtcacatcgggccacttggcgcgccattcccggtcgcacagtggactgaaaccatacgggtgtgacgtttgcagtgcgaaattttcaacttcgagccatttggtgcgccacaaacgaattcactccaaggagctaccctatcggtgtgccacgtgtgatggacggtttatgaggactgaatacttgagggcgcacaaatgtaatccggcggggacgtaa

SEQ ID NO: 783 - DNA, 1997 bp, Aedes aegypti
atggagtataattatcatgtagagctttttacccacacggaacctcgcttcaagtgtacccgctgtccgaagacattcttcatgcgtaggacattgttgcaacattcccaaagccacgatgaggagtacgaaagggagaggcaaagggtgtcgatggccgatcccaagaatataaaggaatgcgaaatatgtcaaatcccgttttccaatagacaaaggctacgacatcatatgcttacagtccacgaggagccgaagcacaagtgtgccaaatgtggaaaagcattccattacaaaggtgaactgaaccgccatgagctagttcatgcgaaaaatgaatcgggctacttgccaccacaggagaagaaaccgaagactgtcgtcgaaccagcgtcaataccgacttgtgagcaatgcaacattcaattcctgaacaaaagaatacggcatcatcatatggtaacagtgcactccgaaccaaagttcaaatgtccctactgtccaaaagtgtgctattttctaaatactcttgagcgccaccaaaaaacgcacagcaaaattggagcggagaagatgtgtaagacttgtgggttacagtttgaaacggcagcgaaaaagtggcggcatatgctaaatgttcatcaaataccacgctatcggtgtcctgaatgtgcagatccgttcatgtacaagcgaaggttgagacgccacatgaaacaccgtcataaaaaggaaatacctgtgatgtcgcacggtccatattcaatgctttcgaagaactgttcaaaatgtaatcttgagtttgccgacatggatgaaaagcgtaagcatatgcaggaaaatcatgcggaattattggtttggtgttctcaatgtccgaaagcgtttggccataagggttctctgcagcgccatgaacaacgtgtgcacggtgcactgccagttcgccaagtgaacgccattctcgaagcgaacgcacttctccaaccgaatacggtgtctgatggtccaaaagggcgtaatcgcacacaatgggcaaagaactgctgggaatgtggactgaaatttaccaccagtacacaaagcaatgctcacatgcgggagaaacatcaggatcgattgttcaaatgtttggaatgcccgagcacgttcattaacgagcgaagtctggtactgcacaatcgttcacataataaagtaccgcgaactgtcactgaaaagacatgctccaaatgtggtgtcatgtttcctaccaaatcagagaagtataaacacatgatggaagaccatgctgattccatgtataaatgttctcaatgtccaaaactatttgtctataaagccaaacttgagaagcatgaaaaaacacctcatgatacaatggaagagaaaccaccccagaaactggttgctgaaacggcatgttcgatatgtggacttcagcttgaaactcgtcccaaaaagagacatcatatgttaacggcccattcagaaccgaagtttgagtgttctctctgtggcaaacagttctattacaagcaattgctagaccgccatgaaactagtcaccggaaacaaaataaacgccttactgatgcaagtaaatctgacgccggattccggaccttgtcgaaggacatatctcagggaaggatttggacatggaagctcaggaacgaacggttttccggtgtaccgtttgcgattggtactacctgagtgaggaaggattgtggaaccatgtacagcttcacgacattcccgacgaaaagaggaaaagccacttcgaggaattgataacttccagtgtgctgtatgaatgcgaacaatgcaatgatcaacggctttatgaggaagatggctacaatcagcacattatcgaatatcatgatgagccgccaactgagcaagtgtccatcaaatgtgaatgtacggattgcggggacatttttgccaatcacgatctgctattacaacacgtcgaagaagcccaccgg

SEQ ID NO: 784 - DNA, 978 bp, Aedes aegypti
cgtatcagtttcagcatcctaatctggaatattgagtgtaaaaagcattataatagaggtaaaaatttaccatgtcgaagtttaaatccggttccgagtgggagaaaatagcccagggtatcgaggatgacaaaaaagacgaaatagagacgatggaagatttggaggagaagatgcgtatgactccgaaaaacatgtttcccagcaaatgggacgatccggacgatttgatcgaagaggataaaaatcctcaagcctccttggaacgattggccttgtgggctgccggagaagacaagctggacattctcaaggaagttttgaccaaaaagccatcggtcgttaacgcttccgatagagatggatatactccgttgcacaaggcctgttataacaacaacgtggaaatggccaagttgctgctccagtacggagccgacccaaatgccgaaactgaactaggatggattcctctgcattcggcgtgcaagtggaacaatgccgaatgtgtggctctgatgttgcagcacggatcggacatcaatgcgacttcccacggtcatcaaactccgctccacattgctgccagtgtgtccaacagccggagcacactggtaacgctgctaatggacgatcgaattaaggtagatatgctgaacgactcgaacgaaaaggcagccacccttgccaagaagaatgggatggcgtttccactgtttgccatgggacaatcagctttgaccgtggaaactggaatgatagattagtaagttttacactatggtcattataactaggataagttaggaagggtaattaaaatgtttgctggcataagaaacacggcctttgaatttgttaacttcatacaaaatatacagagctggaagcaactagtctttaaggggccagaagcttgaaaaaagagacaaagcaggaaccaagaaaagaaaaataatcccaaagaaatcaggaggt

SEQ ID NO: 785 - DNA, 905 bp, Aedes aegypti
aacgtatagaagggcaacgcctgatgcgatcacatcagtttatcgacgatagttgaagcggacggacgaaaaggagcagcagcagcagaacaacagtggagaaagcttctctgctccgacgatgaacaagcgggtggcacagccctctgttcgtcggagcgtcgagaaacagcagagtcgaaataaagctactctggtcacaacagtcggatgacccgcatagaaaaatacaactgttatggatgcagaaaaacagcgatgggacattgtgcggcctacggcttgaggaaacagttcaacgaaccgttcaacaaaaggagaattgaagacccggctaccgtttgggcaacaagaaaaataagcatcaaaaacgatttcaaaccacgtccgtggaaacatcttcctgttacaccgacggacttgtaccccggcagcagcatcaccagaacaccatctaagatataatcccgatccttgcttaatcattccgggagggccagtagacgaccgacgattttttgtaattttcgagcttccccgagcagaagcgaagttctgaccatcaaatcgagatattgatttgattgacataagagataaaagatttgaagataacatctaaattttattcctggaacttctaagccatatcaaaatttgatgtttgcagatcaaatgaatagctcgctgatattggttagatcttacaaaagctaaatatgatatgctaatgatattctaggagtaaattttagatatcattttcagatcttttatctcttatatctatcaagttaatatcacttttagatgtccatatcaaaattagctattgctgagattttttcacctgctcgggctgaatgctcaacggaaacgagcagtacggataatgaaaattctga

SEQ ID NO: 786 - DNA, 1712 bp, Aedes aegypti
gttgctttaggtcgcaggatcggattctacaggttttgtggagacattggtcgagggaatttctcacgcgttaagcttgcggtacatcagttaaccaaagataaagttgcaatcaaagtagttgatactagtcgtttagatgccaaagctcttcgtatgctttcaaaagaagttagcacacttgaagcagcattccatccatttattttgaggttatttgaggtgatagacaccataggaaaaatttacctagtaagtgaatggatacccggtggagaactctacagtagaattgtggatattggtgcactagaggaatatcacgctgctgttatattttatcagcttctcatagctgttaaatacttgcacagtttaggatacgttcatcgagacataaaagcagagaatattttaatgataaacgaagagagaataaagctcgcagattttggttttagcactcaattaatcaacggttcaaaccaacatttggatacattttgtggatcacccccatatgccgcacctgaattattcagcgatgatcactatgtaggaggacctgtagacatatgggccttgggaatattactttattttatgctgcatgcgaggatgcccttcaaaggatcaacgattccactcttgagaacagccgtattgaaaggagaatatgaaatatcgacatctcttagtttgtcatgctgccgacttatacaacgtattctggtaaattcacctttccgacggccttcaatggatcaattattggaatgtcaatggtttgaatatgtccaatcaccagttatccagaaaagtcgaaattgttccaacgcaacaggtgcggaaagtgatatcagtgaggttcctaatagacgtaaacaaatattttgtttgttttccactagaggccaatttagatttcgatcatccaaaaatgtaaacatcgtagctgccaatcaattccaaaccaccgtttcacaaataaacactagtaaatgtagtaccaaacgcgcaaatagtgtattagaacataattttttgcatccgctgagaacagaaaaaacagttgaagatttatcagaagaatctgctgctagtatagtaaaaatgcatagtgatatagacgacaactcgcaaaataagcggaaattttcttttagaaaagtagtaagaaaacgagttagtccaatagatattttaaatgaacgcaaatctaaaacaatcaatactgaaaaaaacatttcaaaacatgattttagaatcattctgcaggatttaatagtcggatggcatggaaagcaagtaatgtatccaagtttgaattcgagcaacattttaccactggaatctgaaacaaggagacttatggataaactaggtatatctgctgatatgctggaaaaaacaataaataatgggccacgtagtgatatattaggaatttacagaataataatgcaccgtcttcaaaaagaacagaccatcgaatgcatatcaagcaatgagatccaatccgacactaggaataatattagttgttctactcaaatgaaaaactgggaaaaaagcgtacacactaagcccaaaaaacaaactttgagtactgttacatgtgccatactataggtataaatagttgttaatgtattattgttcctcgttgtaaaataaactagatttttcatttctttgttttattaccaatc

SEQ ID NO: 787 - DNA, 1575 bp, Aedes aegypti
gtggttgaaaaaatgtccgacgacgaagagctagtgtacgtgaagcgtcccaaaaccatccactatggttccctggaggacacggaacggagccgccaaatgaaagactccggatccgatttatactcgggggccgggagttccagtgacatcattggccaaatttacacgtccagcgaatatttcgatctggagaatgaagtgtccaaggacaaggccgccctgctggaggaattcgagcgaaagaaaaaagcccggcagattcatgtcagtacggatgattcggaagtgaagaaaaacttgcgagctttgaatgaaccgatttgttactttggggaaggccctgcagaacgacggatccgtttgaaagaattgttggcctctttgggtgagagtgccataccgcaaaagagtggtaaggaggaagataagaaacagcaggtccacaaggagcaggaatcaacttggtatcacgaaggaccggaatcactgaggattgcacgaatttggctggcaaattattcccttccacgggcaaagaagcgcctggaggaagctgccgaacagctgcagcttcccagtgccacaaaagcaggtcgaatggtagagttgcagaagcgtatccaatccttagctcctctctgcagtcaggttggggacgtgcggccaattaccaactgtagcttcaaccacgactccagtctgctgttgacctcgagcttgagttccatgtgcaaggtgtggtcggtgccggattgtaacctggtgcaaaccttgcgcggtcatcagttctacgtcagcgccattgccttccgggacggcattgcaacggactcaaaaggggaagtggccatggcttccggttgttacgatggaaccgtaaagctgtggtcattcgatagcgaagaatccatagcggacattaacgggcatgtgccacatcgtgtgtcccgtttggcgttccatccttcgggacgctttcttggcaccgcatgttacgattcctcttggcgcctgtgggatttagagcagaagcaggaagtattacatcaggaaggacacgctaaagctgtccattgcattgcgttccaagtggatggaagcgtgtgcgtcaccggaggtttggacgcatttggacgtgtgtgggatcttcgaaccggtcgttgtattatgttccttgaggggcacctgagtgccatctatggtgtggacttctcccccaatggataccacattgcaacgggcagccaggacaattcctgcaagatttgggatctgagaaggcgcaaccccgtctacacaatcccagcacacacgaatctgatttccgatgtgaagtatcagaagaacggtggccacttcttggtgacgtccagctatgataacacggcgaaaatttggtccaacaagacgtggcaaccgctgaagaccctgtcggggcacgatagtaaggtgatgagcattgatatttcacccaattcgcagcacatcgccaccacttcgtatgatcggacgttcaagctgtggagccctgaatgagttttggtttggaaaataaagttttgttcgataaat

SEQ ID NO: 788 - DNA, 1850 bp, Aedes aegypti
atgacgttgttcaatctggaacagtttccagacgtgtgccgcctgtgcatgaaggcagattccaaaaaatcccactcaatacatgataattttgaagcaatcccgatgaagatcgtagcattcctggaggaagttacattccgcaccgcggagaataaggctgaacttctgccgaaatccatatgcgatccttgtgtcaactacctgtcggagtttgccgtctaccggaataggatggcactcacgttccggttcatggaggctctagttgatctgaaacaatccaacgctaaaccaatcaccgcccttttcaaagatagcaagcgcgaactggagtcacttttcagggagctttctatttgcagcaaaccggatccacaggtcgaagatctgctgctggagtttgaatcgtacaactcggtcaactgcgatgctctcgtcaaagtggagatggagcaaggttccgagccggacgatgatgatgggcacgatgatgtccacgatgatctcgatgatcccgattttgaatgcgtcgatgagccagaagatgaagtcgaaacaaaacccagtaaaaaaacacgcaagaaatttcattcaaaaactaaatcaagtgaattgtccagtgacgatgaaccgttagtaaaaaagaaagctaaagttaagtcccctcgatcaactggttctacccctgcagcacaaaacagcaccaccaaacgggttggtcgtccgaggattcatccggaaggaaggcatcttgaggaaccgtggtcttgcgataagtgcaaattcaaaacgaaataccgagtcgccgttgaacgccacaagaaggttcacgagcggcgtgagaagcgaatttatccgtgttccatttgtggagaggtgttcaagaccaatgatgaaatgcgtaaccatggcttggtgcatccggagaaccagtttgtgtgcgaaatgtgcggtgcatcgctgaagagcgcaacctcactgaagtcgcacatggaacggcatgaagacaaacgaaagtattcctgtcaatattgcgaatatgcagcctacacgaaaatcaatctaactgcacacttgcaaatccatgcctccgataatgccgtgctgaaatgcgaaatatgtggtaccacgttccggaaatctggccatctgaaacgtcacatcgagagccacagcaacgaacggaaatacgcgtgtgaacagtgtccggggcggttcaacaccaagaacacgctccgaaatcatttcaatcgcgtgcacttgggcgttcgttacccctgtgaatactgtgaaaaaacattcgaccagagaatcatcctgcgagatcacatcgaacgagtccatcagattcaatgccaatttatatgcgacatttgtgttgttacgttcgatagccaggagaagttggatatccacaagcagcgccatgagaatcccaagcctatggagtgtggtatatgcctaacgatacaccctacccaggaggcattggccgcccatatgtgcatcagctaccaggacaactatcagtgctgcaacaaagatttgcgcaaccatgtgcagtacaatcgccacatgctggtcaagcatggcatgaaaaccaatgttcgagtgaaacctatcccgggaatgctgttgggaaatttgagaggatcgcgaaagcgtctgatacagtgtcgtaagtgcgatattgctttcccttcgaaagcgctgaagatgcaacatatgctagtgtgcaaccagacgtcaagggaggaatattcgaatgacgctgataatggtgtggccgggcgcttcggttattagactagatttgaataactagagattaatattcataagtgtaa

SEQ ID NO: 789 - DNA, 1055 bp, Aedes aegypti
atgcaaaccatctatcggctcagcagtaaaagcctgatcagtacaatcgttgactgccgatcaatacagtacggtcctcatcacagccatgctgtgccccgcgcgcgtttgccgcctttcgcaccctcagcccacagaacgggtctgggtaaaccagaaatcaactcgcgtcgcgaactgtgccgaacttccgtcgacccgtcgaaacacgtcaatattttcctgatcgcgcacgaacagcaggaaatcaaagcgctaattcaatatccgatccaacaactctctaaggatgtatctttgttgctatccgccgttcatggcaaaattaaggcgttgaaatcaaacagtagaggtaaaaatcatctggaaatagttttgcagcaaaacatggagaaaaaactgctgatctcattaaaatgtgcaacagtacgagtacaacagaatcaagcaagatttaacgataatcaaaacaatatgaagcataatacagagctggtttttggcgatttgccagtacttaattcagttgacactttcgacaattttctcaacatgaatgtaacaacatcatcgaagagtattccagatgacaatgaagccgaaacattggacgaatatttccaactacccgcgacaggactgaatgtaaatcagaaacaactaatgataattgaagctgataactctaaaatgattagaactagagaatatgaagtgtcaagaattgttgactcaatagataatttgaatgttgtattcaaggatcttgcacacatagtaatggaacaaggtacaattttagataggattgattataatattgaatgcacgcaaactaaaattttcgagggatatgaacaacttaaaattgctgaaatatatcaaagaaaaaataaaagaatatattgtatatgcgttttagcgagcatgattatgttcatgataattttaacaatgttcactaaattataattttttgtattataaataaatttcagttgttttgttacggatagagaagaggaaccattaacatgaaatatatgaataaatgg

SEQ ID NO: 790 - DNA, 749 bp, Aedes aegypti
gtttatagaaatcaccacaccggcgaaatcggactgaattccagttaatttcaatttcgtttctacttaagaattcgcaatgtttacccgatatagcactcgaatcttcaccaacaatactgtgctccgacggctgtattgcagtgaccccggtcgcatcgaaaaaacggtcaatagcgtaacgttgctgggccgcgtcggagccgatccgcagaagcgtggcaacgatgcccatcccgtggttacattctccctagcgacacactccaactatcggtacgaatccggcgactggatgcagaaaaccgattggcaccgggtggtggtcttcaaaccggccctgagggatgccgtcatgagctacctccggaagggccaacggacaatgatcagcgggaagattacctacggcgagattacggatcaggagggcaaacagcgacctaccaccagcattattgcggatgatgtaatcttcctgcagaaccagaatcagtagcatttgttatgtttccatgaagagtagtgtttgtttgcgtatgagtcattatagtttcatttaccaatacgattatctcgcctttagcatcaggctgtatttagagaaacttttttttttccaaagaattgcattgaatttaaaaccatatttatcatgaaccagataaatacaaatcacgtagtatagtagaaaagtatcaatcaacatgaataaaacctctgaattaattcatacagggcgaaaagaa

SEQ ID NO: 791 - DNA, 2386 bp, Aedes aegypti
caggtcctaacacgtggtgtaagcggagatgtctacaatttggccgattgcattctgcagcaagcagttgttggatccggcgccaacaccttgttcctatcctacctgaagcactcgttgtgcgcccacctgatctcacacgcggccgtgctcaagcgcatctccaagtacgatcacttcgagatgcaccactgcttgatcgcgttgctcgagttcctggagtcgatcatcggcggcgtgacgtgccgcggcaagcaggaggaaggcctgctgaccaaagcgatgctctcgctggtctactggttgatgcagatctacgagcacgcgatcgagacgttcagcgagaaccgatcgctcaccaccgaacagcaggaagtggtggagaaaacggcgaatgtgctggagaagatcgtgcagagtcagttcttgttgggggtggttttcgtcgggaaattcgaggacccggaactgtttggaatgctggcgaagaaatgtctggagatcgagaatctgacggtgaagtctgggtttgttccgccggtggttagccagaaaaatgtaacggttaacgactacattcggaaggtggctagtattgagacggaaacgttggagattaaggaattcgatgggaagggtgtggaaccgatcacctactgcatgcagccattgatcgcgatcgatattctgttcaatcccaactgcgacacccagatgtatgtgctggagttcctgtcgatccaagcgctgaagggttttccgctgtctaggctgtactgcgagattatccgcgcttgcttgacatgcctgaacaatgtgagcggaacgagcagggaatcgtacatctgcgcgttcacgttcatcaaagtgccgcagattatgcgtcagattcatctacaaacgagagtgcttaccccgaacgactttgaagatgctaagctggattactcgccggatgtcgtcgaggcttttgagctgcttctgcaggattccgcaatcttggacttcatggatgccaagtgcgcttgcaatacggtggaatacttgcttaacgagatgctcaagcaccacttgatcaacgagaagtactcgaagctgatcgcagccaagcgggatgggataaccagcagtttgcagaagctcgatttgaacactaatcagcattcgatagtgaagtttgttctgcgagcagagcctcccttggtcggtattctgaagaccctcagctccgattacaacaaggttcaggaggccttgctcgggatgctttgccaggtgctgtccggtaacagtttcgagctgattctgtccgtcgccaccgttgaggggaaactcaaaaccttcgtcgcgggattgatcaaatgcaacgagaattccaagcaggtccccggggaaatgggaaaacctgcgatgacccgggcagctctgttcgacgtgtccttcctgatgttggtcttcatcgtgcagaattacggttcggagggggtcctgaccgacggcacggattctttcttcgagaaatgggtccgagaatgcatggtagagaagcacaagtccaaatctccaatgaacatggtcaagctctgtgaccagaataaggtcgatgagctcattgtgagtctgaattctccggacggcttgaaggcgacttccctcaaatggcaggaaatctgcacaaacattcctggtctgctctatcaggtacttctcgcgtgggaaaacgaaaccctttccacgggggagatcaagaagttcctggacagcctcaagtccaggttctgctgtttctcgatttgtgccacgtcatggctgtgcgcttacatgcaaataatccgtcaggatgaacttctgaaaccgatgaatatgattcaacagttcgtgaccaacatcagctccgaggagatgatgcagcaggaatacctgaaggaacgccttggactaacggtgcagatcatccgtaagatgcagatcgacttccaacgactgccggtggccagccccaagatgagaaaccagctgcagtcgcagagtttggtttcgcaggccccgctggaagagcagttcgaagaagtgtggaagggagtgctggagaagggctggctgccgatcgaggcgacgctggcgctggagaatctgctgcaatcttgtgggccgttctggttggtggataagctggtgcagcagatttttcactgcaaatatatcagggagatgaataaaactatggatatcgtttttgcgatcatgcatttggatatagaacgttgtactattgcgctgctctctcagctggtcccgatgatgctgctcaacaagctacagtgagtatttgaacaagttaacgaatttctttttttctctctggctctctggtccaaatggaaca

SEQ ID NO: 792 - DNA, 1423 bp, Aedes aegypti
agtttaatttagttttatcaaatcatgatgatagtgttgcctaacacaatacgtagatataaaaacttaatgtaatattcgaaataatacttataataaaagaattacaaaactagcaggtaattaagttcgaaatttgataattttgacatatgtaaggaatagccaatcagacaagctttagaaaatgattttaattatatggttataacttaatggattttaggcatggattgttaagtgtgttttcatactcccatgaatccatcacacggagtagcgttagcagcaagttatgtcagctcaatgtgatggatcattgatgtcagctcttacgatgacggtgtatcgaatttaaatgcctttacatgcgcatgtgtttgtaatgctacagctgctgcttacgacattgacacgctcagaacagactgatagaattcggtaagccgacagcgaagggcgtagcagtaaacaaatctatcccattagtctgcataccgaaagatctatcacatcaaccagatatcggaaaagaaagaaaacatagtgccattgatttagttcaattagacattcacagtcaaacaccacgaccattccaaactagaacaatcattcatcgatagtgtgacatccatgagctgataagagaagtccacagacagcatttggttggttggtttggtggtgcttaggaagaggctataatcgcattcacagatagtgcgtacccggaagatgactgctgatttggagttgatcaagaagcacataggagagtatcctgacttccccaagaaaggaattctgttcaaagatatcttcaccgccttacggagtggtccggtatgtcaggctctgaagcggctcataattgcacacattcgtgccacctgtccggacgttcaggtggtggttggactcgaagccaggggttttctgttcagtttaatgatagcggctgaactgggaatcgcatgcgttccgattcgaaagaaaggaaaactacccggtgaatgcgtcaagtatgagtacaaactggagtacggaacggacgtgttcgagatccagcagggtagcatattaccaggtcaaaaagtgttaatcattgacgacctgctggccacgggaggaactatggatgccgcgaacaagctggtgcagcagattggtggcactgtcgagcagaatttggtcatcatcgagctgaccatgctgggagggcgcgaaaaattgaaagcttccggagttaaagtacattcctttattcagtacgacgatgtcgagtagctagaaatctttaggttcagaggattcagctatcaactgtcagattctcattctacaatcaatgttcaaattatttgaactgttgttggacgttgtttatgttgcaaataaataaagcttatcaaaacacaaa

SEQ ID NO: 793 - DNA, 665 bp, Aedes aegypti
cttctcaggttgattcttcgggaaaaaagtctgaaagttttgaacacatgcatttatcgaaagcgataaatctctgaataactctaatagtttattaatttcccatcaaaccaacgaggacatcgaacaaacatggatttggaattgaaaaaggccttctccgagatgcagatgaacaaaatcgaatcgaccaagaaaatccgcctgctggacatgaaaacggatagcttgaaggtgtccaaacagcgagtggagctaaccaacaaggaaatttcccagctgaatgccgataccaaagtttacgcctcggtgggacgtatgttcgtcctgtcggatgttccttcgttgaccgatgagatgaaaatcaaacagagcaacttcgaggagatgatcggccagtgcgagaagaacaaggaatttctgctgaaaaatctcaaggagcaggaggacagccttcgggagctggtccagcaaaagcggacagaatcgacggcgaaggaaaacggcaccgaggcgaagaaggaatagaattctagacatataagttagacgcgattcaatgcatttcggatgattgatgataaagaatggatcgtaaagcatcattttttgtaacgttatctataacccgataataaaactacaccttttctgataacacacta

SEQ ID NO: 794 - DNA, 2270 bp, Aedes aegypti
atgggtataaaagatttgtggaatttgctgacgccgcacagcgaaaagaagtccttattccacctcaatggccaagtggtcgcaatcgatctctccggatgggtttgcgaaagtttaaacgttgtcgattatttcgtccacccgcgattctatttaaggaacttattcttccgtacttactatctgctgcaaattggaatcattccggtatttgtgctggaaggttctgcaccgcctctgaagtatggagtgatcatcaaacgtaatcaaacccagttccgaggagttcccccgaggaaaacggccaattgtgacaaagcaggtgggacgcagaaaccgaacgggacagaatctaaggcaccttcggaacaaaagaggaaccgttttcaccacgtgctgaagcaatgcgaagagctgttgagttcgatgggtttggtttgcgtgcaggcaccgggggaagcggaagcgctgtgtgcctatttgaaccatgacgggatggtctatggggtaattagccaggactcggactgctttgcctatggagctgttcgggtgtttcggaacttttgtgcttcgcagagcggtggaggatcggtcgatgtctacgatatggacaagatccgaatggtgatggatttgggacaggagaagattgtggcgatgggaatactgtccggatgtgattacagtccagctggagttccaggagtgggcagggagatgatcaatcgattgctgaacatttaccatagcagggatgtattggccaggatacgatcttggcgcgctacagcagatcgtcttaccgagcaggaaattaaggccgaagacaaaaacgtctgtgcagactgtggacaccaagggaagacgtttgtccaccggagggccggctgtcaggactgcagaaccaaagtcggatgcgatgagtccagatggaagaaccaacgggcgaacattaagactgagttggacatcaagagaaaggcgctacaagacccggatttcccgccagaggcaattgtgagtgaattcatggaacggaaatgtgagctgcctccgttggatttggagtggaggcaaccgaatattgttaagtttattcgcaacattgccaatctcctgcaatggaacgaaatctacagttttatcaaattgtttccgcttttcacccgttggcagttgctgacccttagaagaaatccatcccgtggcatcagcgttaaattggaaccggactacatcaagaagaagcgatcaccgaaaggagtcgccagcttcgaaattatttggaaagatgacggatcgatcttctccggactagtcccagatgatcagctgcaagcatttcttgatgaaccgggtaacaccgaagagtctctatggagtactatcgagccgcaagacttggtttccgaggcatacccaagtctcgttgaagccttcttgtcgtcgaaggcaaagcccaaaagaaaaccgaaaaagtctcctaagaagcaatccggaacaaagactgtcaggaatacgaagcagaaacgattggaagaacttatgaattttgtaacaagtgacgctggatcacaactggaagaaccagaaggagaagccctgataatgatagaacctgatgatgaacctcaactggccacttgtaccgattccaaggagaccatttccgagttgaacaaaagcatcgccgacatgtccgttgactccgattcggattccatttattgggacctgattgcgaacggatcggcatgggacgcagattatctgaatgtctcggatgtcatcgatcgcgtttgccatccggactatggacgtgtcccgttccccgatgaggatgaagaagataaaagaatcaagcaattgattgccaaggccaaagctatgaagacgttgctctcgatgagtgttcagcatgcagccttggacgatctttgccttgacgaggaaccggacgagccaaacgccgttcaacacaagctacttttgaagcaggacattctcggcagggaacccgacttggcgaaccaatccctgctgaataggtcggtgaagccccgtaaacgaaaaagtttctttttcgagtcgattgatgtgccacctccggaactgcaggacggttacaacgagatggacatgtttgagtgttccgttgcgctgaaggatcaatttgtgatgccggtttcggatgacatgaatcgaaccgttgtctacgatctggatttttagtgtaagtaatgttattatattttactcgaaatcga

SEQ ID NO: 795 - DNA, 1071 bp, Aedes aegypti
ttccacagcgttatgctcagacatgcatccagctctaaccgaatatgtgataaaattgttacagaaaaatcgaatccacaccgtatacgactttgccaaaaccgaagacgatcgcctgatgcgggtatcgaatttatcatacgaagaaatcagcttcgtcaaaaaggaactaacgtcacgtttttccggcaactgcatccaagttgtggaatatttccggtatctggaagatttggtcgaaccgcttaaaaccggaatcagagggctggatttactcctagaaggcggactgcttccaggccatgtgatggaaatttttggagattccagttctggcaagactcagatttgcgtgacaatggcagcaaatattgcccgtaatcataaatttgatgtattttacgttgatacgaaatgtgacttttttgctaggcgaattcacaagatcttggagcttaataagtgttcagtacaagagattcaagaaaccatgggcagaataaaagttgagcggatcttatctccagaaagtttgataaaaaccatggaagatcttctgattcgtgtggacgatttaaagaacttcaaagtgctaataatcgattcattgcctccgctctggtatcagtatcagaacacgaagagcagatgctatcctctcggaatgctaacccgtttgattgggcttttgaggaagctggcaacggagaatctcatatccatcgtcctggtgaatctcaaaataactgcctatgattcgttttctaccggtggtggtggatcgaggagagcaatggccaatcagagaaacagcaatgaatatccggcgttgggacgcttctgggagacggccccgacgacgagaatcttaatgagcaaaatcgaaagcaacagttcagggccggaacgattgctggcgatttggaagtgcagttttttgaaatgcggagatcgacaaatggtgacaattaccgatcgtggcgtggtctagttctctgaattaatgttggaagtatttagtaagaatatcactcttatttcataaatacaaattagggattgttgattctt

SEQ ID NO: 796 - DNA, 823 bp, Aedes aegypti
ttttcaaaagtaactattacagctggaattcgcgttcgaatagctatgggttcagcagcagattttataccaatcccgctgaggtacgaagatcaggacaccgcttgtcatcaggtgcttatcaaggaaaatgtttccaaggcgatccacaaatcgaaaccagccggtaggacgttattcgtgttaaatgttccgccgtatgcaacgccagaatctttgcaaacagcttttagcataacaggcaaggtagatcacgttattctacaggaaaaacctgccgaggaacatgccattcaaaacgatcagtcggaaaacagattcaaggttgcctacgtagtttaccaacaaccgtcatccattaagaagctgttgcgaatgcagaagttaaatgcccttaatgcagatggccaacttctgacgggcatcgaaaagtggaccaaggcctaccaggagcgtatcccagatcctgtattgatgcagcaggaaatcgacgcatacatggtcaattacgatcgccaggttgcccaagaaaagacccaacaggaaacggaaccggacgatgagggttgggtcacggtaaccaagtcgagcgccaacacgtttgtgcaaaaggaggcaacggtcagcaaattagaggacaaattaagcaaggatcgcaagcacaaggagctaaagaacttctacacgttccaaattcgcgaatcgaaaaagaccgatattgttagcctgaggaaaaagtacgatcgcgatctgcagaaaatgcagcaaattaagaagacgaaacggtttaagccttactagatgttcaataaaagttatcagt

SEQ ID NO: 797 - DNA, 1150 bp, Aedes aegypti
aagcttgcttggaaacacacttgttttaacatacgcctcgtcgcgtacgcgtatatccttaacaaaggaaaatttataggtgaattagattatttccaccgacgctatcaacatgtctccaaaagcaccgatggtcaagttgaacaacggtctggaaatgccagttctcggccttggaacatggctgtccaaggagggtgaaggcgtagaggcaatcaaagcagccatcgacgcgggatatcggcacatcgatacggcctatttttaccaaaatgagaaagaggttggcgaagctatacgcgccaagatcgaagaaggcgtagtttgccgggaagatttatttgtgacgacgaagttatggaatacctatcaccatccagaccatgtggaacaagcgttccaaaagtctttggaaaacctgaacattgagtatattgacctgtatttaatgcacctgcccatcgggtacaagtttatcgattgggataccaaaaacttgatgccgtatgatgcggatggaaagctgcaattctctgatgttgattatatcgacacctggaaagctatggaaaagttgttaaaaacaggaaaggttaagagcattggagtttcaaacttcaacagtgaacaaatcactcgattgcttgccgaatgcgaaatcaagcctgtaaccaatcaggtcgagtgtaatccaagtctcaaccaacgaaaactgactgagttctgtaaaaacttggacattactctgaccgcttatagtcctctgggtcgtccaaattattacgagaaggaccccgacaacatgccaaagcctgctttggatgatcctaaggtgattgagatcggtaaaaagtacaacaaaacgtcgggccaggtaatcctcagatatttggtcgacattggaactatcccaatcccaaagtcatccaactcggaacgcattcggcagaacattgacatcttcgacttcaaactgacggaagaggaaattaaaattatggatggattccatactggacagcgtacggtaccgttcaacctctgtaccagtcacaagtatttcccatttaatgctgaattttaaatatagatcgttcttgtaatggtatcaagaaataataaagaagaaaggttttgactgtgttcaaat

SEQ ID NO: 798 - DNA, 950 bp, Aedes aegypti
aagatgctgacccagtcgcagttctcgcagattcagttctccgcggtgctgaacaactacaccatgttctacaatgtggccaaagccataagcttcgtcgatcatgcaacggttcaactcagcgccgatggcgtgaaggtagtcgtcgaagattgcaagagtgtccaggccacggcttacatcacgaaggcttgtttctcggattaccaaataggccaacgaaagcgcaaatcgaccgcgatggaagacgaccgtgaagacgcagacgacaacgaaccgttgacctcgttcggtctcaatttgaaggtgttcaccgactgtttgagcatgttcatggatggagattacgattccagcatgaagatgctgcacaagggcgagggagctcccctggtggtgattttggagcggcgctgtgaagacgaccttattacggagtgctcggtgcgaacgatggaagcgcaggacattctggacttcgacttcgaagaagaacacgtttgcagcaaggttagcatcaagggtcaggaattcttcgctctgctgtccgagatggatcggaatagtagtgaggtggaactgtttctatctccagacgcaccgcactttaagttctccacattcgatgagctgggatcggagtccagttttgaaatcacaaacagcagcgatatgctgatttcgtttcacagcacggaaacgactacgaaccgatatcagtttgctcatttcaagctggtcatgaagactttggcgtttgcgtcgaaaattgcgctgcgaactaacaaggaaggactgctcgggctgcaggtaatgatagagaactccgaaaattccaacatattcgtcgaatactttgtaatgccactgtgcgatgtcgaagcaaatgaaacttctattacatatgattgatttgtttcggctggaaaaataaagtcttataaagagtc

SEQ ID NO: 799 - DNA, 1434 bp, Aedes aegypti
ataacaagttctcaaacaaaaacaacgaaagtagttgattgtttttcgtaaatttcaagttttaaatacctcccgcctgcagtattttttggtgtgaacggaaaaattatgtaattgaaaaagctatgcattcaggaaaagtacaattcaaaccagtaagcagtaaatcgcaccaacccatcgagtgtcgcttctgtcggaccacggcgaccaatgtaagtgtggatctgttccagcatggcctcgctcaaaaggcggagaagtgcttctatctttcgattgatccaaccgatccactgcccaagaagatctgccaccagtgtaaagcttctctctgcgcagcgtatgcctttggggagaaggcccggcttgtggagaaggaactgaaactgaaatacggggaagccacggacgaggatttcttgaatgtcgaatacctccaggacgaggtcccatttgagtacctaacgtacgaatcggatccggttggattagcactggagaaactgaaggacactgcaatagttattaagaaagttccacccaaagaagttccgattgagcgattgcaggaatcgaagcgaatggatgggagtccagatagcgatgaagattgtgataagggagaaccggcaagaaagtacagaaaattcgagggggaaatcgttatcaacctgactggacctgtgccttgcatttgcatgtgctgttcaaaaacgttttcctccaaggaagaactcttgaagcataaggatgtatgcggtgaggacagttacatttgccgaaagtgctgtacaatttgtgacagcctggcggccctgaagaagcaccagcagacgcactacgattacaagtacaagcacaaatgcccatcatgcgagcaaatcttcaggaacaccttcgccttggacaatcaccgatcgaaggatcacggcgaggacattgaagagcgaggatatgtttaccggtgctgcgataaagagttccgcaccaggaaagcactccacgagcatgccgaaatacacgcagagccaccgcttgaatgcgccgtttgtggtatcaagtccaagaataagcacaccctgaggctgcacctccggatacacgaagactatcggccgtacgtttgccaggactgcgggatggccttcagaaagaagaatatgcttttccaacattcgcaaatgcacgctggagtgcagcttctcaggtgtgattactgtccgaagcagtttggtaagaaggagtcgttgaagaaccactgccagcggtatcacccgagtgaatcgatggactttaaaggccttaaactgggacagacccggaaaaggatagcgcaggatcattcgtaccaaggtgaggtcggaagggaggaagaggtcaaaacggttgaataatgaatgatcgtcaaacaaagtttgaatgtttgaaagt

SEQ ID NO: 800 - DNA, 2381 bp, Aedes aegypti
attctgagtttttgttttgatttcacgtccactttggcagagtgtttatcgcgttattatcgtattttgtatatcgcaaattcttcaaaagaaaatgagatttcctccaactttggtgggcttcccgagatacaaatctaacggtaaatcttagatttcatcccggtcaaaatgatagcagtaagtagcgagagttttccatccccgagctgtaatcgaaatcgtcgttcgtccaaaagccgcactaatcactgaaggcggctaacagttgctatgcgattctgcttcctgccacgactgaccggaacattccggcttcggtgctgctgcttggtaaccatcctggcactcatcattttatcctactatttgatagcagatttgatattaacgcacacatccaacaccaaatgcgcaaaatgctacgaacccatcgacgtggtttatacttgggtcaacggaagcgaccagcgattcctggatcagctgaaactctactctctggttagggacaaagctcgctacgacgacaaaaacgaactcaaatactcgttgcgttcgcttgagaagtttgcgccctgggtcagaaaaatctacattgtaaccaacgggcagattccattttggctcaatctggacaatccgagggtgcaaattgtccagcatgctgatatagcggatgaggacgccgtgctgccaacgttttccagcgcgaccattgagacgttcattcataaaatttcgggactttcgaagaactttctatatctgaatgatgatatatttctgggcgctgcgttgttcccagatgatctgataacgctttccgagggggtgaaggttttcacagcttggcaggttccggactgtgcgccagattgcccgtggatgtttgtcggcgatggatcctgcgatagtcattgctatgtggaggagtgccaattcgatggcggagattgtgaccatccggactatcagaaccatatgcacgagatggaagactacaatatgtccccggaggaaggcgaagatacgtttatcgatgtgccgaagacgtttcccaaaaatgggaaaaagtcggataacataagggacatctatgagatgtttaaacgatccaatagttcttccacaaaacagctggtcgaaaagttcaacaaggaaaagcttaaaagcaataagtcgagcgcaaagaaaggttccgctcaggatcatgaccgggagctgaaaagcgaagagaagatgtccaattcgcaggatatatttgcgcattcgctgattcatacgaacaagatgttcaaccaggtgtacgggttcaaaaacaggaaagtcctagctcacgttggattcctgctaaacgtgaacgtcatagaggctatgctgattcgattcaggagggaattttccgttaccaaaagccatcgatttcgggagaagaacgatctccagtacgccttcacgtactaccattttctgatgagcgaaagcaggaacaagagcatttcggagatattcgacgatttcgatacggatgggtctggcacttggtcagatcgcgagattcgaacgctactcacgaaaatctacaacctgccgctggattggtcggcagtgcggtactttgaggaggtcgttaccaattgctccctgcagcagaataacttcgtgccgctggagcaccaggaagagcagaggctagtttacccaaccctggtgtatgaacgatacgaagactctactattcccacggtcacgaaaagtcttgtattggcatgccgcgagctgacggacatgatgaagatgaatttcgcccaaactccactgtacaaatatcacgttaatcaaaagacgggaatctacagcaacttcaagatgctgacttcaaacatcacgcaggtcgtcgatgctttggatgaactgcgcaagaatcccaaaaagttcaattgcatcaatgacaacctctcggaagacagtcccgaggagaatcaactgatctcagctctcctggaagatttctacctctcgctctttccggtccgaagccagtttgagttggaaaacaactatcgcaatagatttcaatactacgacgactatcgggcttggtttgcccggaagacaatggtccgaaacggagtatacgctttttgcctgctagctttcttcatttgcgttaaaattctctgcttccgacataaaggcaaattcgcccgaactctggtgttccttagcagtcgaaccgactacagtaccatatgacgacgattgcgcaattgattggagaaataagttatagtttcgttttacaattatttatttgaacacgaaaaggtaaaacctgacactgaaataaactcttcaatgaacaaacaatctctcac

SEQ ID NO: 801 - DNA, 1884 bp, Aedes aegypti
tatttttatttctgagtgtacctagtccgtcgaacacgtgttaccttcattatatatttatttttcatatttaatcgattatttggaaatttaaacatccttaacaagcaaacctcccgatgtcatgtcacaaagaaatctaatgactgttgccatcattgactgtttgtttatgtttcaatcatttaacagtttttaaactcacaccatactgaaccgcagctgaaattcgacgatggatttatcgaaccgttgccgcggttgcctttcgaacgacgaggacactttgcgtcccttattggaggacaattcaactatccgaatgtttgaaaactgcgttggactaaaggtgcccacgtatcccggccttcccagaaatatctgcgggacctgttatgggaagtgtagctcctggaacaaattcaagcaacaatgtttggaaacggatgctctgcttcagttcaaattcggactgctgcagaagacaaagcaggatgaagcggaacctgaaactaacgaacagaaatcgactggtagtaacgatggggaaccgttaccggaaccgctggtagaggaagtaaaggaacaagaagaatacgaaatcgttgagccaggggaaatggaagattccgttacaggagaactacaggagaatggagaagaaaatttgaatcaggaaatcgagatagaagtaacagatcagtatgaagtaaaggaaactgctttagaaggagaacctgaggagtatgaagttaaggaagctattcttgaagagttttacttatcgggagacgaccaaatattggaagatttgggagaagacgtccaggtggaaatagttgcagaggaaatcgtcagcgaggagaatggcgaacagcagacgactaggaaaaggacagattacaattgcgataaatgtagtatgcgattccgaagtaaagagcgctttgaagcacaccagcgagagcaccaaggtttgaaaccggaagtctgtaaggtgtgcaacaatgaattcaacagtactagggcactttggcgccatatgcaaaagcacgctgacatcaagaagcacgcatgtaaagattgcggaagacgttacaaatatgccacatccctaacactacaccgcaagtcccatcgtaacgaaaggttgcacgtctgtgagacatgtggtaagtcattcttccgagctcatggtctgaagagccatctcttgacccacacgaaggaaaccccttttgaatgcgataaatgtcagaagcagttcaaaaataccaccatgcttagaaatcacgtgattagagttcatgaaggaactaaaaacttcatctgctcagaatgctcgaaagcttttgccaccggagcagagttgaaaattcaccagcgaagtcacacgaatcaaaagcctttcaagtgctctgcgtgcgacaaatgttacaaaacccagagtcatctcgccgtgcacttccgggcagcccacacgagcaatcggccgtacgcttgcgatctttgtccgcgaacgtttgcccacagtaaggttctgaagcagcatcggtttacccacgcaacagaaggaccttacaagtgtaacgtttgtgaacagacgttccgccagaagaaaacgctaataggccatatgagcaaacacgaaaggatgagcccggatcaggaattcgttgatgaatcggtcataaatcttccacaaacgataaatacattggaataaaaattgtggaaatcaaagcattttgaattaactttcttccaaagggatttttaccgtctgccgctaaaataactgttctacttttacactaccgtaattttggggtgatattgatcattttcacggtttatggcaaacaacttaatgtaggaaaacaa

SEQ ID NO: 802 - DNA, 1912 bp, Aedes aegypti
ttccagcagcgccgtcacaagatccccgttccgtccaactaccggtacgcatcgaagatcctccgccgcgtcgtggaggaacgctgcaacgtaaaatcgttgattctggaggaacggcacatccgcaagggcaagggtctggccatcatggatctgatcctggtccatttgaaacagatcgacgagctgttgaagaggactgaactgttggtgaaagaaccccgtttgaatccttggttggccaaggtgctgatcgcggagttgatcttcggaaggggagatttgaccggggaatcgcttccggtgcagtgcgtcaaacggtaccaggaggaactgaaggaagcactgggacagctggatgtcgcgccggccaaaatgctggatttcaaagaacctcgctacgtacgcatcaataccaacgttttggcgcagcccggtgccattcggctcctgcaggaggaaggatgggtgctggtggaggaagagttcgagaagtatggcgattttctggagcgggtcaagaaactgggcgactcggagttcatcgtggatttccacttcaaggagatgttggtgtttcccaatagtgccaaaaattactgggctcgcgcgatggagcttaagcagaaatttgtgctgcagaacaaggcctgcatcatcccgacctatctgcttaaccctccgaagaagagcgtggtgctggacatgtgtgctgccccgggtctgaaaactactcatctggccaacctaatgaagaacaagggtcgtatttatgccgtcgagcgggatgcaaatcgctacaagttgctttgcgactatgccgccgacttcggtgtcatcaaagcgatcaacgatgattgcatgctggtgggcgaggatcaggcaccgggagtcgaatacatcctgttggatcccagctgttccggatcaggaatggtcagccggttgaagctgaacgaagagtatgacaagcaacggctatacagacttggaggtctacagtacaaactgctttgccacgcaatgaacgctttcccatcggcaaagcgcatcgtctactcaacgtgttccattttcccagaggaaaatgaagatattgtacagggagctctgaagcacaacggccatttcaaactggtggacgccaaagaacgactgggcaaggagtggcacaatgtcggttcgaccgattatcccggaattggagaaaaatgtttgtacgccagatcggaaagtgacctcactattggaatgtttgtggccgttttcgagcgatgcgaagaggaagagtacaacgatgtgtacctggcacacgagaagcaaaaggaaagctacgaaaagctctctaaaatgggacacggcccggatttcggccgaggaaagcaggacaagggcaagaagcgaaagaagactcaagagaacaactacgaggaatctcaggatcagccacaggagagcaatgatacacctttggagcatgtgtcagagcctgtggatgatcccgaggttgcaccgaaaaagaaaaagaaggcaaaagataaaactatcaatgaagtagatccaccagttgcgtcaacagaaattgcaaacgatgacacaaccaacgaaacaaagaagaaaaagaaatctaagaaagttgcaactgacgttgaacagccaagtgaagaaatcgagcaagaagcgccacaagacgctggagagaataagaaaaagaaaaagaagaagcggaaacataatgacgaagaaccagaaaacaataatgaagcaaacgaggtagaacaacaaaccgagacgattgccgaagagatttctaagaaaaagaaaaagaagaagaagaaggatgagcaatgtgaagaagaatgaactgaattattcgattaatgtaagagaagaataaattcgaagcattttt

SEQ ID NO: 803 - DNA, 1126 bp, Aedes aegypti
atggcagcaatgtctgacctaacgctaacaacggttctcatagtggtgacatctttgctaccgcagagcagctgtcgctacaatggcaaatatcgggtcttgggaagctctccgatcgagtacatcaccacagccaacttcagcctcgccaacttacccaacgatccacatttggagtttcgcagatgccactttacttcgtttggaccggatatgtttgaggcgttgagcccatcgacaaagagggttacattccgcaaaggtacggtacgtgaagttctcataggtccaactacacggttggagagacttcaggttatcgatacgggtttaatagctctggaggcagcatctgacgaaccgaattactacctcaaacagttgaccgttcgttcgaggaagttttccgagtggtcacccagcttggcatctctgcggatgctggaagagattgatgtagcttattgcaatttgtcttatttgaatgtgcaatggttcgagaggtacaaccacctgaagatgctggatgtttcgaagaatagattgatggtgttcgatgttggaatgtccggcgtaccgacactggagaggttgcatctttgggggaatcatttggaggttctacaaagatttccggaagcatttccaaagctaaaaaaagtaactttggcacaaaatcggtggctttgccgatgggtggcgaatgtccgaggagcgattttttcgcaagatgtagagctgatggatatggacggggtttgtcgagcaggatggcagatcaatggtggattatgctgtaggagtggagaggacaagaaaactgctacttcccaacgaaaaaccaatgacaagagttcaatacatgttggacatgatttcattggaataaacgggtccgtgtttggtatgaaatggagaaacacaattgtttatgtgggtgaacctctgccaatattgtaaaagtctacaatttcacaaagaggtagtcagaagtattttgtagaaaagaaacctcagcttcctgataagtttgtttaggttaagttgctatataataatacaactacgcttatgtctaaaggtccaaaaaaaattatgaattaaaattattactgcacaatatcaa

SEQ ID NO: 804 - DNA, 1519 bp, Aedes aegypti
aaattgttgaccaaacattggaaagttttccgcagtttccagatgctgattctaggaaaattgtaaaaacagaatgttccccgcaccggaaaaacgtcgccagttgcgccaaaccgctctctgccgggaagtggaaaccgccaaacagcacgagagctaccacaaagatttcaaccaaattcaacgtaacagccagattagtttcctgaagcgccagaatacggcccagaggcgagaacgggacgaaaatgcccgacaacaggaggaagaggccaaggaagcaatcagacagagacagttgcaagaggaacaggaattggccatgcagttgcacgatgccaacaggcgtcgaatcaatgaggaaaaacttcgacaacagctccgggagtccaatcaggaactcagggaacttgagaccaaactgagggcagcttatgtggccaaggggattgccgcccagaaggcggaactggaagccagaaggctggaggagaagatcgcagctcagaaggagcaggaagtgctggaacagcagcgattggacaacttggaatacatcaaacagtgtgaggaagagcaatggaagcacaagtgcgagcttcgagataccctccacactcagatgaaggccctgcagcgccagaagcaaatcatgtacgaagaattccttcgggagaaacaatacctggacgaaatctgtaaacgtctccaggaggagcgattcgcggaaattcaacggaagctggaactgcaggagcgaacccgcatggagatggaatacttcaaggaggcgaaggccatctggcaggaacggcagaagcttgctctggcggaagaaaacgaaaggattcgacgctttttggagtaccgggatgctcaggagcgggagctacgggagcggaaagttgagagcacccgtttccgggaacagctcaacgagaagatggtcactgaactgcaggtggaaattgacgaagctcgcaaacgcgaagagctactgcaagatatatacgccgccgaactggacgagcgccaggaggatcgtattcagcgtgacttggagcagcagcttcgcaaacgcatcgaagctcggctcggtctggagaggcaactgatggagatcgaatgccgccgtcagcaggaggctgacgacgaacggaagttcaaggaggatcagctcaaactatgggcagaacgtgatcgaatcgatcaaatgaccaatgaaaaacgacggctcaaattggctgaacatcgacgagatattcaagaattgctggaggaacgtaaacgacggcgtgctgacgaagtgaaacaattgatgcagcaacagagcatgttcgagcaagaggagaaacggcgacaggaaatcatcgaagaggaacgcatcaaacttttgaaagagcacgtcactgctttgctcgggttcctaccgccaggggtgttacgcgaaagtgaccgggaacatattccgctgcccaagcctaagagcgaacagaaataaagccttaatttagtagag

SEQ ID NO: 805 - DNA, 1061 bp, Aedes aegypti
agaaaattaatgttagtatcagccttaataacttatggcgttttcgtttattgctggggcgaaactagtttcgccctaggttcgcactaacagctgtcaaaacgtttttttattggctcgggtcgaacccggatccgccctaggttcgacccaaacacaacaaggttcgctctgccgattttttgcgatccaacctgagcggggtccaactgtcaaaaatggattgtttacgtttttgtaattatcaaaattaactattgtagaaacatattagtaacaaaagatgtttaagaaagcatatggcatcattcattggattactaatgagacttctttttgcctttttgcatataagaaagttaaatttgatgaaactgtgtggctgacatgtcgaatgtaagaatgccacagttgacttgactcgaacctggatccgttttcgttcgtttattgcgagtcgggtcagctctgaccccaggtttaaaaccgaaaacgccattattcgacatgttctgaggaaatagtctgtgataaactattacgatgcgtattcattacgagctgaggcctttgttttgtaacctaatcgccccacctgctgtcttccagatgagatttaggtgcactccggaaacagttaaacaataatgtactctatgattaatatactactacaccacgcaatcttggagttatcatataatcagttcaagaatttatcaactccggcggcgaaaagaagtgcatgcatgctcgcattctccgtttgctcctgacgggtggctcagtagttaacaatctgaacggtatgaagaatatcctgacgaacggcgggaccagtatgtttcgggaaaacttcatcaacgttatggatgactatcatctgggtgttttcagtggacgcaaaaaggatgaacaactcgagtaacaaatcccaatcctctaaattgaataataatcgaacaccttcattcaagttggtatttctaatagattcttggaagaagtacatatacatattcattaaataataaataatgttgattattcaattttaatgt

SEQ ID NO: 806 - DNA, 2214 bp, Aedes aegypti
atgatctgcttggaagggaaactcggcggccagtatctcaatctggtggtaacgcagaccactaggattcgattgaaagaagaggaccccgggaatttgtccatatgtcgggagtgtctggtgaaggtggatttgatccgagccattcaggaccggtatctgatactagatgcccatcacgatacgctccgaggtcggatggcgccgttggagccggttgatgagacggcttttcaagggaaaattaaggtagaccttgatgagatagacgaagaaaaacacaatgaggttttagaagtaaacttcttggtggaaacttttagagatgatgaaggaaaagattcagtctcagaagcaagcagcaatgaggaacgggaagcaaatgaagaaaggaaatcgaagaaaccaccaagattgaaagcgagatcgaagattaaagcaatgatccgtgaaccaaagaaacgaggtcccaagagaaaagaacggccgcctgctaccttgaagatgattcgactgcgtacggaactgacccggaagtgttacatatgcccagcagattttcccgactcagaagatctgatggcccatttgaccgaggaacacgccggcaagatcgaatacacttgccagcaatgcgacgggaagcaactgaaaacggtcaaatcgtacaacgtccacctcagtctgcacgatccgagcatccgaccgctccagtgccgcttctgctcgctccggtacagcactcgcaagggtctggaagtgcacgaaatgcgcgaccacggggcgtcccacaagcacaagttgcaacggaaaaaggcacgggaacaccagtgcgagcattgtgggaaaatcttcaaatcgatctccatcgtgcgggaacacacgctggtagagcacgaccagggcattgctgctcagtgcaaaatctgccagaagacgttcaagcacaagaacaacctgacgcgccacatgctgacccataccggggagctgccgcacaagtgtgaccagtgtggcgtgcggttcaggattgtcaccgatctgacgaagcacgtccagggcgtccaccagggtattatgccgtacttttgcaacatctgcgatctgccgctgaaggataagaattcgtactaccggcatcggacagcggtgcacaaggcgatgaaagatactcctaccactcgccgatacaaatgcggtctgtgcggtacgtccttcgacatccaatcagaccttcagctgcacgttgatagaagtcacgaaggcgaagactacccattcaagcagtgtgcggtttgtccggaacggttccacacggccagccagctgcagtaccacaagtacacgaagcactgtgagcagcgatcgtccagggcaacgaaactgcagtgtacgatctgtggcgaacagcagcaaacgcgatgccatctggactcgcacatgacccggatgcacgggacggagaagaagtatgtttgcagcgagtgtggcagccgatttacggtgcaggcgaatctgtcgcggcaccggaaaacgcacaacgcggtcaagcagtttgcctgtgagttttgtgccaggacgttcaatcagaaggtggccctggacaatcacaggcggtgcgctcacacggatactcctaccactcgccgatacaaatgcggtctgtgcggtacgtccttcgacatccaatcagaccttcagctgcacgttgatagaagtcacgaaggcgaagactacccattcaagcagtgtgcggtttgtccggaacggttccacacggccagccagctgcagtaccacaagtacacgaagcactgtgagcagcgatcgtccagggcaacgaaactgcagtgtacgatctgtggcgaacagcagcaaacgcgatgccatctggactcgcacatgacccggatgcacgggacggagaagaagtatgtttgcagtgagtgtgggagccggttcacggtgcaggcgaatctgtcacggcaccggaaaacgcacaacgcggtcaagcagtttgcctgcgagttctgtgccaggacgttcaatcagaaggtggccctggacaatcacaggcggtgcgctcacacgggtgagacggcgtttgagtgcgagacttgtggcaaggggttcaaggaaacgtccacgtattacagacacagggtggcttgtcggaaggaacggcaagtggatgatggggaagctgtgaactga

SEQ ID NO: 807 - DNA, 2160 bp, Aedes aegypti
atggcacaatggaaagatcagctgaagttcgacatcgagtggggtcacgagcggctggtgagggcccagcaaaccgtggaagttcggccattcgatgtggaatcctggtcggtgatgatccgggagggccaaagccggcacatcaatgaggtgcgtacgctttacgagtcgctggtcagtgttttcccaaccacggcccgctactggaagatttacatcgagcaggaaatgaagtataggaactacgagagggtggaaaagttccagcggtgtttggtgaagattctgaacatcgatttgtggaagctttacttgacctatgtgaaagaaaccaaggccgggttgagtacgcacaaggagaaactggcccaggcgtacgattttgcgttggaaaagataggcatggatttacattcgtactcgatttggcaagattacatttcgttcttgaagagtgttgaggcaattggaagctatgcagagaatcagaaaattacggcagtgcggaaggtttatcagaaagcggtgataacgcccattatcggaatagagcacttgtggaaggaatacattgcgttcgagcagaatatcaatccaatcatttcggaaaagatgagcttggagaggtcacgggattacatgaatgccagacgtgttgcgaaagagctggagatagttacgaaggggttgaatcgtaatttgccggcagtgcccccaacggggacaaaagaagagataaaacaggtggaactgtggaaaaagtatatcaatttcgaaaaatctaatcccctgagaagcgaagacacagcattagttacgcgaagagtgatgttcgcaacggagcagtgcttgctggtgttaacccaccatccggccgtatggcaccaagctgcccaatatctggatcagagctcgaaacagctcatcgacaagggcgacttgaatgccgctaaagtatttgcggatgaagccgccaatattttggaaagggccattaatagtgtactgagtcgtaatgccctcctttatttcgcatatgccgatttcgaagaaggcagattaaagtacgaaaaagtccatcaaatgtataacaaattcctgtccatttcggacatcgatccaacgctagcttacattcagtacatgaagtttgctaggcgtgccgaaggaatcatttcagctagagccatattcaagaaagctcgtgaagatgtacgatccacttatcatgtcttcgttgctgcagcgctgatggagtattactgcaccaaggataaggacattgcattccgcattttcgagttgggactcaaaagattcggtggaagtcctgaatacgttatgtgctacattgattatctatcgcatttgaatgaggataacaacacgagagtgttattcgaacgtgtgctctcctccggcggactaacacctcagctttcggtggaagtttggaatcgatttttggaatttgagtccaacattggagacctgtccagtatcgtgaaagttgaacgccgaagaagtgctgttttggaaaagcttaaagagttcgaaggcaaagaaacagctcaactggtagaccgctacaagttcctcaatctctatccatgttcatcagcagagcttaaatccatcggttacaccgaaaccgatggaatactgaacccaatctccacaaaacattcaactccagttgaagctccagagcagccgcataaaattccacgtccggactttgcacaaatgattccatacaagccgaagccaaatgcctatccaggggaacatccattggacggtggggctttccctcaacctccagcactggcagccctctgctcaatgcttccaccgccaatttgcttccatggtccgtttgtatccgtagataaactgcaggacctattcagtcgtatcgttcttccggatgttgcgccaactccgatcgcaggagaaaatggcaatagcattaagctgtttgacctggcaaaggccgttcactggattgtggacgacagcacctattccggcgaaggcggattgaaaagacgacgaatggcacccggtggagacgatagtgacgaagaaactgccattcctgcgccacccgtcaatgatgtgtatcgcttgaggcagcagaagagattcaaccgataa

SEQ ID NO: 808 - DNA, 694 bp, Aedes aegypti
atgcaacacgcgatgcaacttaacctcaagccagggggtgagaaatgttgggattgtagtgccgtacccaccttcgaacaagccgcggaagatgtcaagaacctgaaggccaccccgtcggatgccgatctgctagaagtttacggcctttacaaacaggccaccgtcggcgactgcaacaccgacaaacccggcctgctggacttcaagggcaagtccaagtgggaggcatggaatgggcgcaagggcatgtcccaggacgatgccaagcaggcctacatcgccaaggtggccaaactggtggagcaacacgggctgaagtaaagatgattggcgcgcgaaggcatattagatgagacgcacagaatggggcactcctctctgcgaggtgggggagggtgccggaccttattcttccggaatctcacggaccgagggtaggcattattacggaaaaccttcgtactttttgtttttagagggtagattgtacgaacttcggattgtttcgattatgaatcacaaaaaaacaaacgctgaattagttctcgtcaagggttttgggttttttataaatacagttcatgtatttcgttgaatgctcttttgaattgataatactagttgctaaaagctatgataacacgtttaggaataagttgtttaacaataaattattaaggattccaaacat

SEQ ID NO: 809 - DNA, 1051 bp, Aedes aegypti
gcgcgcaagcaacaaaaccggcgcgtcgtagttgagaagtggcggcgaaacgtttattaatttttttttgtaaactcgagtgaacatcattgtgggtgtgtagtagtcagaataaatatcattatggacaatccggacaacacggtgaaaccagaacatcaggaaaaagaccaatctttacgggaaaatgtaccacacaatgctgcccaaactgctacgaagaagcgcccgcgaagtgaaaatgattgcccaactgagggagcagccaaacccaggaaaattttcaaatatggaaactacgaccggtactacggctatcgaaacatcaacgaaactccgaagcaagacgtccggctacaggctttcatcgcacaaaaagagatgattactgggaagcaactgttggatattggctgcaataatggctcgctgactcttttgatagcgcaacattgccatcctgcaagagccgttggcatcgatatagacggcgatttaattggaagcgcacgacggcatcaaacaaacatgttgaagctatgtacagaaaatcccgatacgttcaaagccttgaaacacgttgagttcagaactgcaaactacgtttatcaggacgaatctctgctggcgagcgaaaaagctcagttcgatgtgatattgtgcctttcggtgacaaagtggatccatctgaatttcggagattccgcggtaaagctcactttcaagcgcgtttatcgccaattaaatgaaggcggtgtgttcatactggaagcacagccctggagcagctataagaagaaaaagaagctcacgactgcgatattcgaacagttcaaacgaatcacgtttcgcccggatgagttcaaccggtatttgctgggcgatgcgattggctttcgagagatgttcgagctcaaggtagccgaccatacgatgaagggtttccgaagaccgatttacgcatttcggaaatagaaaggtaagtcatgcgtgatatgcaaacatttgttgagttaatgaaaatatgtgaattcgaaaagatatgcaatta

SEQ ID NO: 810 - DNA, 3375 bp, Aedes aegypti
acatttcgccatggatttccttactctccaacagcgctagcttacgacccggtacagaaattactagcaataggtgacaaatctggaacagtaagaatattaggaagatttggtgttgacgctcacgtaaaacacgaaggagaatccgcatgtgctgtgaatctaatcgaatttctggtgaacgaaggtagccttgtaacagctactgccgatgacactttacatttatggaattttcacacaaaaataccaaaagtagtacaaagtctgaaatttcaaagggaaaggatcacacatttgcacctaccagtaggcactaaatggttgtacgtaggaacagagaaagggaacacgcacatagttcatgctgactctttttccttaagcggatacatcattaattggaacaaagcaattgatccaatcagaaaaacacatcctggtgctgttgttcacttgtctgataatccattagatcctaataagttactgataggatttgaaacaggtcaattagttctgtgggatatgagaggaaaatgcgcagaactacgatggatatcacaggagcctcttttatcgtgttcctggcatcacgaaggaaaacatttcatcacatctcattctgatggatctttgtgtacgtggcctttaaaactttcacctaaacctctagtgcatggttttccacatgctaagacaaataaagatggaaaaatagaagcatgcaatgcaattcaaaaagtggaagttaaaacaaatagacttggtgaacaatttacaatattctctggtggcctaccgaccgaaaaatgtagtagtaagtctcattgcataacagtattagttcagggcaaatcaaccacagtattagaaatggaacatccggttattgactttatcacgatttgtgaaagtccatggagtagtgatttacaggaaccatatgccgttgcggtcctactgcaaaatgatttagtattgatagatttgttaacaactggttatccaacgtttgaatcgccttattctatggatatacacgagtcgccagttacttgttgtacatatttagcggattgtccatctgatttagttccagccttttattcagtaggaagaagtgcatcgaaccgtcgatcagggtattcggaaagagagtggcccatcaacggaggagaatggcaaccaacgtcctgtagttattcggaaatagtgctgactggccaccaggacgggtctatcaagttttgggactcaagtgctggaacgttacaagtgctttataaattaaaaacgtctaaaatattcgaaaaatctagagtgagatcgatggacgtcagcgacgacgatccgttatccatatcggcgatagcattatgtgccgagtcgaggaaactgtgtatagccacgaatagtgggcacgtagcgttatttaaatttaaaagagcggaaagcactggagatattgccgtgctcgaaattcctatttcttatgaaaacgcggtggataacgatggcagtcccgagtgtgaatttattccaaagacactgccaaagcaaaccgattctgtagaatgcgaaaagaagtacaacggaatgctgaaagtgaaaagtggaccacaacggaaaccacccggtttccaagctcaattagtatgcataaccccctggacccatggtacccatcccggtcaaattactgccctaaccattaattccagttatggattaatggcatacggaaatgaatatggcttggctgtggtagatattgtccagaaaatatgtttactcaatctctctactcaagagatatacggctcgttagatatgtacataaaaacgccacgaagtcccaagcggttagaaagcgtccaatcgaaagaagaccaattgagatcccctagcatagatcaggtaagctcttttgatctcttggacaattctttctctagatcgagatcgtcgtccatgtcaagtttagaaaatgctagtacagaggctgtgacttgtttggcatttgccgatagttatattaagaaaaacccatcattagcacttcctacgatgtggcttggtactagcttaggggctgtactaacagtgtcattgaatataccggaccaggaagccaggaaatcagaagctgtgcaagctgctttggcagtctataataggtctttcacattatccaaaattctgttaatttttattgattgtatgcacaatccaccgtgcagtaatcactggttaaggtacatttctcaatacaatatagttgatttaaagaaactattatttcttccattcataggtccagtatttcgactgaaaggatccgtgttgtccatgtcactgttggactgcaatggcgcactgataccctatgcgttcgaatcttggaaagatgacggcagggaaggcaaagaaaaacgtgatagtataccattttatagaagcactgctcttatactaacttcttgttgctattttgtagaaacccctaccaaacaaaccgccaataagatgagtcccacaaacccggacagtacgttatgtgaccgtcaatttatagtgatcgccagtgaaaaacaggcaggcgtgtttgcgcttccaagtcaaaattgcgtttacaagaaaaatatcgttgaaactgactttgtggtgaaagccgaaataataagtatgaaagacagtgtttgtttaatttgctacgcatccaatggacacttgattgtgtttactctgccaagtttaaagctattgcttgatatagatttccttccactatccgagttgagttttcaaaccaaatgtaaacagggaataatcgatcctatgctgtctatctggggacagcaattgattgtcaatgaagacaccaatctcatatcgaaaacattcagctttagtaacaagggtcatggactgtacttggtaacacccaccgaattacagaagtttacagtctgccaggagttttgcaatcagtacaatgaaatgcttggagagttgtatgtggcacatgaaatgccggaagcaccgaaggaaagtttcttcaaaggactttttggtggcggtatgcggaatctggatcgcgaagaactatttggagagtcgagtgggaaggcaaataaatccgtggctaagcacataccgggtccaaatgcaaacttgcaggacttggaccgtcgagcaacttcggcgtcatccgaagtcagcagagcacatcagctaatgttggagcgaggtgacaagctgagtcaactagaggaaagaactgaacgtatggctagtgaagcgcaacagttttccagttcggcgcacttattaatgaacaaatacaaagacaaaaagtggtaccaactgtaa

SEQ ID NO: 811 - DNA, 994 bp, Aedes aegypti
gtttctacgggatagagcttaggccggagaaagaagcactaaactatggcgctctttgtaaaagtgacgatttttgtcctggttacagtggcggcagttaacgctgccgtaacggatcaatcctgcttgacgaacatgaagaaatgcacggcgcggttttccggatacgcatacgtgacaacggacatcgccgatctcactacgcagctgttggaccaatcgtacgacttcctgttcctgtcgacggccttcaaccagcacaacaaggatcgccctggattcgagaagctgtatcgcaacatcgccgataaggcctgggcagacgcgatagcactgatgaagtatcaaagcaagcggggacatcgggcaaagctgaatgcaggctacaaatacgccaaccacgaactgcgatctttggccgatcccacgctggccgaagaacacaaatcgctcaagttggccatggagtacgagaagttggttgccgagacgacgcatgccatccacaggaagagttccgttgcccatcagagtccgccgcagtacgatccggacgtggcgcacttcttcgacgagaaaatcgtgcagggtcgcgccgattcggtccggaagctcaccggctacatccaccagctggaggacatccttaatgtcgataagaacacgagagacatgggactgcacctgttcgatcagtatctgaagacggtggagtgaagtcatgtggtcacgcgtgtgcaattatcttttacctactagaaactgataggggattgtgaggaagagcacgtccgacttatcgtcggcattagatctttacggtgcgtcaatgtgtgaacttatctcgagctactgccagcgatgccggattttcagggcatctgtagattttactttcacggtaaaaagattgccaataatagacgtaataaattctgcagtaaaaaaccgttcagtttagttatcaagttatatccattccaaatagaataaa

SEQ ID NO: 812 - DNA, 1248 bp, Aedes aegypti
atgtcttcgactagtgaaataatcgtatgcgacggggacgtagatggttggcggaatttgaacttctttcgagatgttgtttcaaaagatttgaatcttcaggaaaaggaattccacttgtacaatttgaacataactacaaccgaaaaacagtcaggcttcacttccctgctgtaccgcgttaaagtggatgtcgagctgaaggatggaaaacgtgatcaaaggttatacgtcgtcaaagagatatccaaagatgcctatggcggagacacgatggatacgtataatctttttcataaggagattaaagcgtaccaggagctgattccggaatttgaaaaacttttccaaaacaaagttagatttggaccaagatttttgaaagccgttacaactccttttactgtgatagtgttggaagatttgaacgcatctggatatcaaatgaagaattgtagcaaaaggcttgatatttcgcagagcaagacagtgttgtcccgattggccaagttccacgctgcatccgctgtgtacttcaaacaaaatggaccatatccaacgtcgttcaaaactggtatgtatgacgaggaatcagcaccaaactctgaaacttatattgggaatttgttcaaggctctggagtcgagcttgagagaacgcaactgttctagacagtacttggacttgataagtcaatggggtacaaatccttatgttgccggagctagattattccgtttgaatgaccaagatttcaacgtcttgaatcatggcgatctttggatgaataacgtgatgtttagcgatagtgatctgttgttgatcgacttccagattgctttctacggtagttttacatttgacgttcttgagttcatcttctgcacggtcgaagttgatgatataatccataagttcgacgatcttatcgagttctaccaccaagagctccgaacagcatttcaaatattagacaacagcagcatgttgccatcgttgaagacgttgcaagcagacatcaagaggcatgcatttctcgcaggacttctgatgatcgaagcgataccgatgattaccttcgtcaatgtgggagagatgagcatggatttgatgtcttctgcagaacctgaaggtgaagagtttaggaggaaactcttccataacgaaaaattcatcgaagtagtagaccaattgttgccatttctgcacgaacgtggttatttgaaatgctcaataaatgaatagatg

SEQ ID NO: 813 - DNA, 2415 bp, Aedes aegypti
attaaacctgaacgagcgtgtaatgtacttcaaaccgggtggcaggcaacactgaacagctgcaaagtgtcaaattcaatcagttcgcgtgtgtgtgtgtctcgaaaagccatcagcaagaaaatccgcgagttcccgtgtcgatagtcgcgtgaaaaacggtccgaaaacaagttttctagctttgcaatcctgcctcaaaatgtccgatgaatcagcccagtcagaacagagcgaactgaaatctccaacagtgcacgtgattcgtgaggtatacgagggggaaaacgcacacgaaaccttcgaacttgagctggacaaagcgctgtatgccaaggcggactacatcatcatcgaaccaacgcgactcggcgaagaaacgggccgctggatcgccgtcggaaattgtctacacaaaacggctttcgtcagcgggctggcatcggtggcggccggactgatatggcgcgatagattagttttttgtgcacccctttgtgcagtatcggtattttgtaccggattgtacacaatatcgtggtcttgcgatccctgtgttcaatatcaagttgaaaaaaatcctaaaagtctgtcaaaagtaccgaacgtgaacgatttttcttcgccaatagtgttagtctacaccagcaataaatgctccaaatacagccatcggatagtgacattgctagccgcttcatactgcgcttggcgcgtgtatcagctctttaagtgaatctacgtggtttgtattcactagattttggtttgggaaaggctttcaatctcgcgattgaaagcaacacgcggggtttcaaatcttatgtatcttattatgtttgaaattgttaggggatcggtttttaaattattctttctggagacttgcactaaaatgttctggtagaagaaaacaaaccatgcttttaatgcacttgcaaataattgcaatacagcatgagaaacgttttttagtgcaacgttaagtaaaaactgtagaaagcttaaaatgtcagctaaacaaactttagatgcttttgatttattcaattattctgtcgcaaataagaatgactaggttaaacatgagtagcattggcattactataagctgcttagaagaacggctgttttctatggtacattcatcttgggggttgtccataaaccacatggaccaagttttaagtttatctgtccgcggttttcgtgatatgtcatatgaaaataaaatggaacgtggtctttgttcagaatttcttccttaaaaacaccatgtgatttacgaacgacctataagagtgtaaccacgttcatcataaatgcagctgctcagagcttaagtgaaaagtacaccaaaggcaaagtaaatttttgatcaaaggcaaaagtttagttttgttcttatttgtttgttacatttttttgcttttcttttggtttgttgaaatctcaagtaacctatgtagaaaacgaagtacagaactgtgattaagcgccagtcagagtgcgataaaaaagacattgattcgaatcatagaacaattagtgtgggaaggattgtacccgatgcgaatagttgcgatgagtgtgaggaaggagcagttgcatttatttgagccttcctgattcctcgtgtgttcgtgcgttccatcgcgtcttcccttctcatacagactgcctgtacaattaagctgatatcatattgatatcgattgtgaatgggccaagcacattcgttactaaattatttcatcaacttctctgtataatgacaaaccttctggaaagcagattgacgacaatcaagttatcttgtttgtacgaaaatatcgttgtgtcgtttcgtttgtgttttagataatttatcagccactaatcgtttcgttcaaagtgaagcaccagagatcaggtaaaacgtgatattagaaacgcaaggacaagttttatcgttactgtttccacgcggggagtgaaacaaaggcgttataaagggtaattcaatgcatttaacttagaaatggagcaaaaacctggatgaggaaattggtcaaatacttagctgcacaattgttctgagaagggaaaaggttggttttagttttgctcaaagttttagcacttttggttgaaggttttggatttccttgcaatgtgattggcgtcagcaaatgaaacaccaatcatattagggttgttcgttttgaatcataaatcaaaagctgcaagaaaaagagaaatccacatgctgtagtattatgttttaaattatacgatctatgcaacaaagtatgttgataaaacaactgaataaaaccttgtaaaaagtaattattaaacagtcagaactatcatgttagaattaaaataaaagaaagtttagttttgctaaaaaacgtctattgcaatttattg

SEQ ID NO: 814 - DNA, 826 bp, Aedes aegypti
aaacaaacagaacgtcagaagttgcaatctgtgactacaatcatctgtgatctatgttttaatgctaagccaattgttccttagctaataagtgcctccagtgcacttatagatagtagaatacaattagctagttttcataatgacatcaccatcaaaggcgattctggaacgatgcatcttttgcaaaatcgtcaccggccaggatcctaacgcgtcgatagtgtacgaaaatgaacgcatctgcatcttcaaggacattcgtccggcggcagaacatcacctgttggccgtcccgaagtatcacctggatgacgtgcgctcgttgaccgaggctgaacgtcctctgttggatgaaatgcgacaagagttggggaacgtcttgaaggaccaattccaggtcgacttggccgaggtgcttttcggatttcacgttccaccgtttacgacggttaagcatctgcacatgcacggtatgggaccggtgggcagcatgggattcatttccaggatgatcttccggccgaactcgatgtggttcaaaacggatcaaactatcatggatcagatgccatcggtttcgcaggacaagacaccaacacaatgagggaatactctataaaatattattgattttttttagtcgttcacgtttctagagcatcgaatttgcagatgtttgttatggaagaatttgtatcgcaactccaatataaagttttttcctttcctgtatagcatatacaataaatttcaatttttcgttacactatcgatcattacttgaaacccaagctaataaggccacctctgtctctatttgctg

SEQ ID NO: 815 - DNA, 1186 bp, Aedes aegypti
gtttttcttccgggcgttgcagtgaaatctttcgtggaatatctgaatcgaaattttgccagtttctcaaaaatattgtagacagacaattatgacggaggagagtagcgtataaaggtttgaccataaattgtctataaattatttatcatagttatattgtcagcggccactgctcccttgaagtttcccgtgcgtgtctcgcttagtctatcggacaaaaaatgtgacatcgatttcatcaccggttctgtctcttcggtgcaactgtcgtgacatagttaattttacaaagtaagaatgcatagttcagacatgtgtgacatgtctagagcattttcatcagttgtcagtcctctcaactaacgggtagaattcaatagttaaaaggcattcgtggtccaaccagcgaatccccgatgtgaaccgtttgtcacctcgtttttgccgattttttcgtatttttttcgctcagtgtaaaaccattgtgacaatcatccatttgcagtttcgactttttgctcgggtagtcaactgtcaaacgcgagcaggggcggccatcgaaatcgatttgtgttcgagtggggaggctgttgtttgtttacaagtgggatcaaagaagcgagtcgttccggaaaataaaataaaaatcaacctttacgatgaattcagccacaaaggtgggtgaaatctttaccgccgcgggagcagcttttaatcgcttaggcgaactgacaatgcagcttcatccttcgtccgattctcccactggatcacaaatccgccaaactctgaagaaaaaggccttcgaggacgccggcattcagatgaagccgcagcaacagccagttccccagcagcttccgccaattatcccgcctcagacgcagaccattctggttcagcaacagcagccaagcattcaaccgacgacaagtgggaccgaccagcagccgacattgatcgtaaagcaggatgatcacgaatccggtggaaccagcagtaacgatgctgccggtgccggctacttgaataaaccttctgatgtgagctgattgttccaatcgcatggatggctttttgttttctacataaaactttgcactctattaattcattattttgcaacccaacgacaccaacctctttctcttatgttatagatgatgatgaccctgaaccgtct

SEQ ID NO: 816 - DNA, 2480 bp, Aedes aegypti
atgggacggaaacggaaatcggaggcttcgatgaagattcgtcccctgaagcaagccaaacaagaagaatcttacgatggatcgtctccgttgaaagttgagccgaaagcaatagatcctgatgcaagtaccccggaagaagtgtccaatcgctccgatacgagcagaaaaccgtggattgataagtgccaacagtgggtagcgaaacagagtgaacaagtggctgagccaccgccacttgaacccgtagaagacgatgaaccgcctttggaggatccggtggaactggcactggaagcttctacgccacttcgaaagaagctcaagtattacaacgagaagcaaattttgaactcggtcatgtatgaatgcgagtggctcaaatgtggattcgagacaaccgacgacattgcttacatcacccacgttgaggcgcacgcctaccaatatctggcgaaaccggaggacggagaagatctagtttgtttctgggatgtgtgcgattttcggaccaaggatcggcgcgacctggagagccatgtgcactttcacgtgtaccacaatcgactgaaaacgtacggcgctagcctcggtagattaattagcattccaagatgcaacggcgacagtcgccggaggaattgcatcgaaagtttcaaaaccaaattcacctgcgagtggtccgaatgcggggaacaatttatcaaagttcagcaatttttcgctcacgtgaactaccacgtgcaggatcagtttccgctgggtaaaaaatcgaccaaacaagaactacagtgtcaatgggccggttgcacacagacctataaacggtgcagtttggcactggaacatgtccggagacactcaacggaacgaagcatcggatgttacacgtgtggggcgatgtttggatcacgattgaagtacatcgatcactgcaagcgccaagtggattatcataatcgagaatttggctgtccggattgtggcaagctgtttgcctcgatgcaattgatgattgatcatcggaacattcacaacaaaaagttcgaatgtccgctctgtccgatgaagtggccctcgagaaaggcattgacctgtcatatacgataccggcatgtggaggataaaccgtaccagtgtaaaatatgtaaccatcgcaccgttactaaatcagatctggacgaacacgtgctaactcatgatgagaggcgaatgttccgctgcgaggagttcggctgtgacgccacttacaaatgtcagaggtcattgaaaaagcacgtcgatgctgtccactatggtgctggtccaggtatttacgcatgtcatctatgtcccagtcagtacaaagccggtgctactctttcaaggcatctgattcgggagcatgagttcaaacgaccgcctggttataacagattcacttatcgcgcaaatgaacacggaattctgcaattatccacgtcgactcctgacgacgtgaaggattccatacctgaggtcgattcgaaacagccgcaagtatcatctcaatccactaaatgcaaaattaaaagagacgaagacgataatgatgataaagaagaagctagtagatcccaaccagcaacattcaccagcttcgccatcgaaaaaatggaacccatcagtaaggataccatttcgatcgagctacaaccggcggaggaacttcccaagccggtctaccggagacgagcctgcaccgttacaaccacaggactggactcggagcatacgaacgattgggagacagcctcggagagcatgataccattgaccatgaagtgcgaagtagaggaagcgacaacgtcttcggtcgtgtcgaagaatatcgatgacttcacggttatgaagcgctacttgaagacggaaaagtcggaaaaacaggttgtaatttcctacgaagaaatggactccacgggtagcgtgatacgaagcgaaacggtgcaaactacagagttgaatttggagaatctactcaaaaaagacttgtagtgagatgggtttagtaattttactagggaaaggcagtgcaaaatcgaccatcaatagttttatacgttagtatgcaaacttgtatgtttttaaatgagaaactaatgacacctaaactaaacactgccaagatggaattagacacacatattttaatgaaacttgagttttcaaatatctcatcgaggagttgctgatgaaacaattgttggtttcattttaccagagttataagttatgtcctgtaatcaaatacgtaacagacgatataaagttttagattaaaataattttgaattagtgatagaacttcggaaaacaaattgcaaactctaatgttttcatcgcgtttcattgtaacttactttttagctagcttcactagtccatcctttaggtaacccattttaccacgcgtttccctaattattatttttttttaataaagtggttctcatttgttaatg

SEQ ID NO: 817 - DNA, 1808 bp, Aedes aegypti
cgacttttcaatttttgacagattcagtcgttatttttatttacattcggaaatcaagtttggatacattttttaatatttttatcgttgctcgccttgaaacatttttcaaataaatgccggagtgctgctaaaaaaaacacgattcgaagccatggataaatcggactacctgagccagaaaatgctcaaaccgctgatgccggaggacatgcgaagcgagctgatatccgccctcaagtcgcaaaacgtccaccacaatcgggtccgatccgttagaaatttcaaaaaattcccaccgccgccgcttccttcgagcccagcggccctgagcgtaagcaatgaggacgacaaacggggaaatcttcgtctgcaagccattcaagagatcagaacttcggaaatttcctacctcaagcagctggatctgttgattaactatttcgtagcaccgctgaaaaccaacggattgattcaggaacgtgagcatggtcaaatatttgggcagctggaaaccatctataatcttagccaagagttgctcaagaagttggacgacgatctggacaatgtagtccgagccttcatgaacctgggaccattcttcaagttgtactcggtgtacgcttttgactatcgaaactcgttgtgtacgttgcaaaccctgattcagaagaatcccgccatgaagcgattcattgccaatgccgaatcgcgaccagaagttcagacgaaggtgatatcgctattgatcacaccgattcaacgaattccacggtataagcttttgctgcagcaggttctgctctacacgagtccttgcgatggcgcctacaagcaactgcaggaatcgataaaacttgtcgagcagtctgtttcccacatcaactcggtggtggaggactacgaaaatacccaaagactgataacgatccagaatgcgctgaccaacaaatcgctgaagatcgtcaaaccagcgcggaagatcctcaaggaaggcgtcctgaggaagctgaaaacggacggcacgacgtccaaaaagtattgcatactgatgtccgatatgttcatatactgtcgaatgctgaaggatctggatcatctcttttcggacaacggattggagtgctgttgcatctttccgttgaagaagtgcaaggtgatggaactgttcagtggaaacttcaaaataacctgcagtggcgatgggactatattcaccgctgataatccggaagactgtcgcagctggttccagggcattcgggaggccatcgagctgcacgtgcagtgcaggaagacgctaagaaagctgtccagcaataggaagccaatgcgcaaaaagcacattcaaaagatggaaccggaggacgactatctgtggctgcttcggcgcaaaacggccagcccaatcaaatcaccaaaggcacgaagcaacctgtggccgttccggcacatggattgcttgagagctaatcgacgacgatcgcttcatgacgactcgctcttggcgacaacgaccgcaagcagtcggttcgaagccaacagaattggctatcagaatcggagagcactaggaggcattacccgtgaagatgcgaacgatgaaaatagcgtcacgatggggatgtcggctacaacttctccggactatgaaccgcaggcaggttctagtgggattcgtagcattgcgacgggccctaaaaagcaagttagttttcagttgcctgcttcgtactataagcgttgagagagatattgctttattactttttttgtaagttttttttaaagggtactaaaaaaaa

SEQ ID NO: 818 - DNA, 830 bp, Aedes aegypti
cagttgatatcaaaccctcgtagccagtgttcagtgttaacgcataccgtctatcgaaaaccccgtataaagtttctttgttcgtgtgttcagaaccaagtccgatcaagtcacgatgtcgatcgttccgattatgttccgtgactggtgggatgaccactgggataccccgctgcgtcaatcgcggattctggaccaacacttcggaagtggcatcagctctgatgatctgctaacggccattacgtcggcggctgctgcacaatccgctgtgcacaatcaattgaggcgtccgatctacaatcgtccatggcgccattctagccttgctccccgtcaagacatcggatcgacaattcacgccgacaaggacaaatttcagatcaacctggatgtgcaacagttcagcccaaccgaaatttcggtgaaggcctctgacaacagcatcatcatcgaagggaagcacgacgaaaagcaagacgaccatggcttcatctcgaggcactttgtccggcgctacatgcttccgccgggtcacgactccaatcagatcaagtctacgatttcgtcggatggaatcctaacgatttcggctccgaagaaggcgatcatggattcggccggacagaagacgattccaatcgtccagaccggtcaaccactgaagaagatcgctgccgagccagagaagaaggcatagtgacaagggtttcgaggttttactgttttatcaccttacatggttgggatttttgttcgtatagtacttgttaacgttttgctggaataaatggtatttgtttgtaattgagaatgtatgtggaaaagac

SEQ ID NO: 819 - DNA, 420 bp, Aedes aegypti
atggttcgttccggaatgatgcgcggaggccgtggcggaatgggaatgggaatgcgcggcatgcggggagcccctttcatgcacaagaagagcttcctgccgcgccatccctttgacttgaccctggcggaaccggctttcccaagggtgtccgctccgccggatgattccgtccttaccaacgctctgctcaagcgcagtcaggatctgacgcctacccagcaggagcaaactgccatttccaacctggttaccaaggtgcaagccgttctggacaacctggtcattgccccgggcgatttcaacaaatgccagctcgatgaagtgcggcaggttggttccttcaaaaagggaacgatgatggctggccacaatgtggccgatattgtaatcatcctgaagacacttccgacgaaagac

SEQ ID NO: 820 - DNA, 1610 bp, Aedes aegypti
ggtggctggaatccccacgtctatcccgaaatcattttggtgctagttctgccagtaaaacctctattaaaacaggccaccatcggagacataagtttaattgctcgcgcctacatattccccatttttttctcaagactccccagaaccatcacgacgaaatcctccatgaccacaataaatattttcgtatccttcgcatcgcatgaagctgctgtagaacctagaataattccggcggagcccgataaaaatgtttgcatccaatcagaaggggaactcaccgaatgaactactcgcacccttccataacttcaaagtgaaagaaacagcttcccagtcgccatcaaacctcagcagtccgtttctaaccgactagtatttcagtgcaaattacacatttaatctgataggttaccaaaagtgagcacagtaacggtcataaattagttcacattcgcagcatgtccaatcactcgaaactaccgccgtctaccaaaggattacttacagtgtttgagaaagcaaacgcaagtgtagtggggtctgcattgataaaagtttccggcgaaccctccaaggattgtgcatttggtggtgggggctcaattgacggctccagcattatggcgtccattcacgaatccgacgaggatttatcggatttctcttacaatgacagcgacggaatggaagacgattcacgccattcatcagttgacgagaaaaatgatcactcatccagtgctccatcaaaagaagaactatcgtcgtgcaagctgaactctttgaattcttctccaacggttttgccagtactgaatctagtcggtaccaagcttggcatcggaagcggaacagtggttcgaaaaatgttcaccaacacgagggaacgttggcgccaacagaatgtatccggtgcctttgcagaacttcgcaaattagtccccacgcatcccccggacaagaagttgtccaaaaacgaaattcttcgtatggccattcgatacattcgtttactaaccaacgtgctcgagtggcaaaagaagcaggaagcaaatgataaatctgatcaacaggataagccaaccaacatgtcaggcttcaacaaacaattgcgacagttcaacggaggaaataatgaaaaccacttcaccggaaactatcgaaacaacggaaacaacctactgatggtggttccgaaagctttcagcaagatacaacttagccagaagtgtgccacggagttttccaacggttttcaacgtcccatcaaagtggaaccttcccctggctgtggaggcacaatcgaaaagatcaaacttgtcagcaagttgtgtccgtcgggcaagataagcaagaatgggttgaaaaatagaaggaaagcagtcccgctttgtgccattgagggcggtatcaagacggatctgggattagccgggtacatggaaagaacagcagtggaaaatgagataaaacgtgaaattaatcacggccaccacggtcaacgtcagcagcagcgaggaacggaccgtgatggacccgagttcgaacaaaatcttgatacgaaaaaatgcaacggggatcgattggatgatgataaaaagtaa

SEQ ID NO: 821 - DNA, 2767 bp, Aedes aegypti
ctgtatagctctatagctactaccaccactcgattcgactactaaaaaccaacacacctccttcttgcgcttggctcgtctctgttggcgcattgttggttttgctagtgtattgagaggccagtcctcgccgccaaagtcgcagttgtcgcagcgcgcgcgattcagagctcgttgagcaggcaagtaattcacacgtcttctgcatattgccaacgcaaaaccgttggttctgttagctccagtaaaaactttcaagtggaacaagtgagtgcaacaaaaaaaagttgattggctgactgtattaccatatatcggagaactggtgatcaagaatttcagagtgcaatctatagaacgagttgaactgctgctgctgctggtggagcagttcttgtttgtcgcataacagacagattaacagtgcgcggaggttgttattgagtggcgccagttcagaagggcgttcagaaaattcctgtgagtagttacaacattcggtggacttcgatgacttgtgtattgagaggtgattttctggagaaagtgcaacaacccaaacaaacgtccatgatggatgcgttgatgcgaagaaacagtttcaacctttcgtttagcaagctgtggcatcccggcgcggagaagacccgctcaaaaagtggctcctttgggagctcggtggccatccagaagctgcgcgagtccaaatggttcgaccggggcgaggagcgcatcttctgtgcggtgatcgaagccggtttcatcgtcgaactgcgtcatccagaaaccggcgaaagctggttcggcgtaacggcgttcgagctgaagaaattaaccaaaccaacggccgaaaacatcaagatctactcggtgaaactgtccgacagccacaagcggttgaaggtctacaacagttccctggaccagctgtggcagcagggttaccaaatccgtatcaacaacctctgtgacaaagccaagaaggcacacaacgagaaggacatcatggctcagatcaagtacgccaccaaaaccaagatggccttccacaacagtcagcactttgccgaattctgccggtacggtgaccgaccgcaggacaaccggaaacgacaagtaagtgtactgttgaaacggctcgaagatgcactgaatggatcgcagacgtacttttgagaaccgcgcacaggctccgaactcgcggaaacacacacagacaaattgagaggtttttatccatttctttatttcgattcctaatcgtttcgttacgtatccgtgacccaggtggcggttttcgtcgtacggaaggagtttgctggttggggacatctttttcgcataagagaaaatcaatttctattttctaaggaaattgttttgatttggttgatcaccaatctaaggcaatgaagaacctatcaaatcagcaaacttctactgtagtccatttctaatctgtggaaaatgctttcgcttgcttaatttctatcagacgtagttcatgatcctgtggctaacattaggtgtagggtgtatacttaaaaattcaatcaaaatcacccccctacgtgggtggcatatccggttataaaacaatatgagcaaaatgtatagtgcagtctacctcgggcagacattacaggtgaatacggcttttattttcgcatcgacctctcggcgagcgtgcgataagatagaggaccattcttgtaaattgaaagcccacggattaaaacaacgacgccattaatggtgactgacatccttatcgggctcctctgtgcccctggttgtcaacctgtacccattcgatgatgacaagttacgctcaggaggggggagttgcatagaatggtgcatacgtgtgcgggtggagttcattgttataacatcatacatgcaagcgaactcatcgcagcctgttgcagttgacgtgaagcccgtaaatccatgttgacttaacacctttagataggcgtgagtaaaggttgcacgagggtgcataatgtagcaaatcaagatgacaagttgattagttgacacggttcgattgaacctcccacaactgaggggtactagactaagtgggtttacttgggccttttgagcttattctgagattatgatttggtttttcatcaatcatctagctacatctgacgcacttcataatcacataatcaatgtgccttcacaatttccaaattcataattccagatcgaatgtcaaacgttgaatcttcaaattttccaaacgatacactgctcggctttatcagcgacgaccttgccgagataattttactttcctacttaaattgcaatatttgattctaaaaactcgagatgtggtcgtggccccagccccccacaacataaaggaagatatgagttacgaaaaagtccatgcgagtccatggagagggaagggggaggtttgtatgtaaatgaaatttccacgtggataatgtataagacgagcgaaaaattccaatcaaatccaacctagttttggcaatagctcgaacacacattgagttagtcgtgtgttgaggtatccccgatctgtcattaaaaacagttttgaattctttgatttaaacttataaagttacaccataactacaaattatgtttcattttacttgtgtactagaactttacaaaatgttttctttctgttataagaatgattgtctacggtttcgtagaatggcgtttgacatactggatatttcaagtatcagagtattggctcaagcgg

SEQ ID NO: 822 - DNA, 1755 bp, Aedes aegypti
ggaaccattttcggtgcaggaaggtaatccgaaagtacgataagtaaaattgcacaaaatctaggatttacggactggaatagtgttaagtaaaacgcgtagcagagttattcaaacaaggtacatattcgtgtgctttgcgcgattcacttaacttatggctaaggtgctgatcatcgaacctttctatggcggctcgcacaaacagttgctcgatacatttctccagcagttccatccggccgagtatgatttgttcacgctaaccgccaagaagtggcactggcgttctcgaatcggggctctctatttctccgagaccattcccagggaccaccagtacaaaacgctcttcaccagctcggtactgaatttggccgaactgatcggacttcggccggatttggccatctgccggaagatagtgtatttccatgagaatcaacttaactacccggtgcgggagattaaggaacgagactgccagtacggcttgaaccagataatgacctgtctcagtgcggaccaaattgtgttcaattcgcagtacaataagatatcgtttttggacaacatcaaaagcttcctgaacattgcaccggatttgaagctgaagaacctgcgggaaaagctggagccacgctgcgaggttctgtactttccgataccgtttcattcgattccgaagaggattttcactaagaatgacaaaccgctgcatttgatatggccacaccgatgggaacacgataaaaatccccaattcctgaccaacacgctactggagttgaacaaacggcaggtggacttccgtgtatcgattcttggcgaacgagctcagtccataccggaatgcttcgaaaacatcggagaactgctcaaggagaagcttatcaactttggatttttgagcaaggacgagtactatcgcaccttactggatggagatgtcgtgatttcaactgctggccatgagttttatggggttgcaatgctggaagcagcttattgtggttgtctgccggtggcacctaacaaactagtctatccggaaatttatccggacaccagcttgtataacacttcgaatcagttgatcaaaatgttgtacaactggtgcaaaaacagacacctcttcgagcgcgatcgagccatcttctatgagaatttcgactttgacaagtactctgcggtgagcatagttcccaagttcatatcgatgatcagagcgcacctcggaacccctggcgttgtcaacggggtctagaccaggtgcgctccgtagctcaattctaataacgcgtttgttctagctctagaagttttgaattcttccaatatctatgtatattggtaataggccaaatatatgtcagcgcgatagtcgccaaacgtaaaatcgctcgtcaacgtgcaatctcgcgccaattacctatccactactagtaaaggtctacaaaggcacaaaaatgttcgttctaatcattagtgttacgaaattgatgtcggatggaattttgttttaaaaacgttttaagtttctgatcgttttctaatagtaattatacaaacattataactgagcttaaccattttaaatcgaggaaaactgtttggcatgattgttttcagcttttattgattgataattttcaatcttggataaaaaattgcattgtatattacaatgcagtagtcagaattctacaaataaaatgaaatatcgggaatcaacatattcatagataataaaat

SEQ ID NO: 823 - DNA, 986 bp, Aedes aegypti
agttcataactggacacttgttttgttagttgctttaaactgttgaacgtatttagctgcatttcggggctagcccttaacaatttgaaaagatgagcagaaacttattcagagcggtaattatgggagccccaggctctggcaaaggtacagtatctgcacgtattgtgaagacattcaacatgaagcatatctctagtggtgacatgcttcggaataatattgaaaagagtaccgagctaggcaagatagccgagaaatacatcaaagaagggaaactggtgccagacattcatattacaaagtgtatcctgggtgaactagcgcaactaaaatccagttcgtggctattggatggctttccgcgaacaccggaacaagccgaggatttatggcgccaggagaagatagattcagttatcaatttggatgtacctttcgatgtcatcgtggaccgattacgcagccgttgggtccatctacccagtggtagggtgtacaacattggattcaacgatccaaaggtaccgggtaaagatgatgtaaccggcgaacctcttagccaacgaccagatgatgatccagtggcggtgagaaaacggttggagatctacgacgcatgtactaggccattgaatgaatacttccatcagcagggagtattagtgacttttagtggtaaaaccacagatgaaatctggccgaatgtaaaaaaatatctcgaaagcaaaatcgtaaagtcatagacgtacggtataggtatatttttgtaatattagaatccaggtccaaggcacaaaagttatgttatcagtagagcaaacagaccaataataacgtattccaagactgataaggcattttggggtatgcaatatgcatagagttagaagtgataagaaccgtttggtgctacttagatgtcaatcaagcttacttaatagcgcatcatgagtaataaactggttttgaaacaatctgcttca

SEQ ID NO: 824 - DNA, 2140 bp, Aedes aegypti
gctcacttttggttaataagtttttccgtgaaaagggctgacttaaaatacatttttgttttcattctttgtttttttatcatcatattttaaagtttgtctttctccctcgcacctacgaaaaatttcgttcgaaactgtcaacgattgtgagaaacaagcaaaactttaatattcccctctctcttgctctcaaacaaaacccatggaaacatcaacagctttaaagccccaacttgtaaatattgtgagtgaatgtaacaaggattcggtaatcgtccagcgcgattttaaaacttttatttttccggttcgattgctcgttacattcagccaaaatgcaactgctgaaaaccccccggtggttatttggtgcacgagcatcgtttagttccaagtcgaaattcgtaccagctcacgaacccgccttggaaagtgatcttcatcggctggagaaatttctcgaggataaaccacacattctggtgctgaccggtgccgggatctctacggagtcaggtataccagattaccgatcggaaggtgttggcctgtacgcccggtccaatcataagccgattcagcatggagatttcatcaagtttgaatccgtacgcaaacgctattgggcgcgaaactacgtgggctggcctaggttttccgcaattgctcctaacgtgacgcattacacattggcgaagttagaacgggaacaacgcatatcgggtattgtgacccagaacgtcgataagcttcacacgaaggcaagctccaagagtgtcgttgagcttcatggcagtggttataacgtaatctgtgtaggcaaaacggggaaaggatgcgattatcatatccctaggcacgaattccaaaacatattagatcagatgaatcctcacatggaggacaagtcaacgatgatgcggccggatggagacgtagagctgcctcaggagtacgtagaaaacttcaaaatacctccctgcccggagtgcggaggtgccctgaaaccggaaattgtattcttcggtgacaatgttccgatgccacgaatcgagcgagttgtgcggatgataatcgagtcggatggcgttttggtgctcggttctagtcttaccgttttctccggctatcggatcgtgcttcaagcgaaagagctggggctacctgtggcaatagttaatataggagatacgcgtggcgatccgaaagctgatctgaaaatttctgccagatgcggagaacttatgcagaatttgttcaaaaagtgaaacgttagattgcagttgcagatactcaagctatgattttgaggtagattactagcaaaaaggtttgttttgtaattaaagagaaagcgaagcacgcaaaaaagcatattatactaaatgacatcagtataactgaaataggtgtaaatataatagggaaattacaaaatcttttaaacgaataaagagagaatgtttgagacgtaaaccattttcagtgttttatcttattacgttatatgtaggtacctacggatttgctaagagctacgaaactcgacattcacagtcagtttttctttgaatctagtgacaaatgattctccggagtatagactacctacgttatcatttcattaagcaatatgtttacacgggatttggcctatgtcagcagctttattgtttttcaactgtccaaagtttgatgccggatatatatcgtcttccgcgcttgttttcaggttaattaccgtgcagccttcgttgtctgctatatcaccgtttaggtgttcatagtagtactgccaccacttctcaatatcaatgattagcttaaatgtttctgcaaatatcagcctgtgacacatagcattttcgcgtatcaatcgttccttcaattcgaagccgccgtatacctaatgcttctgtggtacatccatcttcgagagaagctgcgccaattctattggatgtgcgcatcgtgtagtgtgtatacgcattatgagaaaagctcgcttgttaagcttagcaatatgagcgtaattatgctggcgatagctaaagacgtaaccgctaatgagttaacgctttaaacctcatggtgtttgtagagcaccatcatttttctacgaatccaacataaactg

SEQ ID NO: 825 - DNA, 1449 bp, Aedes aegypti
atggttcaaaactatctggaagagaactttgttaaatttaccgatggacacgaaagtaaaccggatattggcgaaattacaagcgacgtgaaactcttagatctggatctagatacccagttcaaagtggaatcatcggaatcagttgatccagcagatctaacatctcaagagcccaatgtggacgaaattgagtctgatacagactcggacatggatccgatctgggaagctccggcggatgatacatcagaggatgaaaaattaatcgacttgaaaaatagaattaaggaagacaagatcacatgccagatatgtgagaaaacattcacaaccgtggccaatagaaacaatcatatgtatttgcacagcgacaagagaacattcaagtgtgatcaatgcgacatgtcgttcaaatgtaaaatatatctgcgcaagcatagaaagagagttcatacagtgggcgaccacgtttgtgccgaatgtggaatgaagttcaccaaaacatccaagtatgagtaccatttgaaaactcatgagccggagaagaagtataaatgtcggttttgtgacaaatccttcattcaacattaccatagaaaaagtcacgaacaaacccatcacttggaaaaaccagaaaaaccagaaaaaccaacgtgtttgtgtaacatttgcggcaaaagtttcaaacacgaaagtagtctcaaaaaacacattcaaataagccacgatgaaagcaaaaaggaagtaaagaagtttcaatgcgatatctgcaagaaagaattcatacagaaaggtagtctaaaatcgcacattgcagctcataataatgttcgagcctatcagtgtgagcagtgcggtagaaaattcactcaagcagggacccttatcaaacatttggagcttcataatgctgagaagtcgcaccagtgtgaattttgccatgagtccttcctgcgaattcgatatctacgacgacaccgcctgttgattcacggaaaaaccgatgtgagcgtgaaaattgaacgatcgttggacgataccgaaagcagcgaacagatacaagtgaaacgaaaagagccgaaatcctcgaaaagacggagagatttgtcatacggttgtgagttatgcaatcgaacgttcaaactaccatccagtttggcagcccacgtaaaaacccacagcgaggagcgcaaattcgcttgcaatgattgcggcaattcattcaagaagcttgaacatttgaagaaccacatcaacggagtacatctgaagctggcgcataactgtgtggtgagtacctgggaatttgcatttcgctgccacttgctgatggggccaaactccccggtgaaactcagcataacttttgccggaaatgcgtcgacagctacgacaaagcaggtgaccgtgtctttcagtggaattggtgcacagggacaaacctga

SEQ ID NO: 826 - DNA, 2087 bp, Aedes aegypti
caaagttcggctcggttttcctttcgccaactccgacatgcagtttttgatcgtagtggcacaatttgtgagaagaggctattttaattcagatatttttattttattaggattaattccgtttatttgaatcctccaagcaaatcaaattgttcttcagaagacagttaaagctctatagaatcatataaatctatagattttacggaaacaaaattgtagttcacttcaaacaaagaaaataaaccgttttcatatgtcccgcttacagttttcggcctgcggcgagctcggttgacatctgcatgaagacgaccgtcttcataactgtttcattcgtaaaatcagccggtcggtagtaaaatagtccgcgttcggttattaataccagcgttatcagctccggcagtaggaatcattcgtctcacggaataattgcagctgttctcctttctcgggtgcaaaatggcctgctccaaaacgttccagggcacagcagtactgctgagaaactcggccgtcttcaatggctgcatcagtaaaagggccagctcatggtggggcgcggtgcagatgggtcccccggacgtgatcctcggtgtgaccgaagcctacaaaaaggacaccaacccgaagaagatcaatctgggcgtgggtgcctatcgggacgacaatggaaaaccattcgtgcttcccagcgtccgaaaagccgagcaacgcatgatggaaaaacagctggacaaggagtactcgcccattagcggaacggccgaattctgcaagcacagtattacacttgccctgggcgacgacagccaacacgtggccaacggacagaacgccaccgtgcaggccatcagtggaaccggtgccctgcgtgttggaggagccttcctgaatgggttcttcccgggtacgaaggacatttatctgccgactccatcctggggcaaccacggtccgatcttccggcattcggggctgaatgtgaaagcctacagatattacgacccaagcacctgtggattcgacttcaagggagctctggaggatctatcgaaaatcccagagcgatccatcgtccttctgcacgcctgcgctcacaacccaaccggtgttgatccccggccggagcagtgggctgaaatgtccgccgtcttcaagaaacgcaacctgttccccttcttcgacatggcctaccagggctttgccagcggagatgtcgccaaggatgcgcttgccgtccgtgccttcctgaaggatggtcaccagattgcgctggctcagagtttcgccaagaacatgggtctttacggtgaacgagccggagccttttcgttgatctgctccgacaaggaggaagccgctcgcaccatgtctcagatcaagatcctgattcgtccgatgtacagcaacccgccgattcatggcgcccgcttggtttcggaaatcttgggtgatgcaaacctgaaacaggaatggctcggcgatgtcaaactgatggccgatcgaatcatctcggtgcgcaccaaactgcaggacaatctgaaaaagttgggctcttcgcgcaactggcaacacatcaccgaacagatcggcatgttctgcttcaccggaatggatcagaagcagtgcgagcgactgaccaaggagtttagcgtgtacttgaccaaggacggccgcatctcgatggccggagtaacgaccaagaacgttgattacttggccgaggccatccatgccgtcaccaagtgagcggtagtgcgcgttgagtaagaatgattgcattttgcctttgtaccttttcctctttgttgaacaagttatatgggaaaagattcatttagatggaggcatttaaaaccaaatttcaaacaagtctgtggaagagcttttctattttttcgtttttggatcaatcaagccgtacgttatatttatatatttactacgattaaagtgcacgaacacgataaaattaagtcactcgaagaatatatatgatatttcccaagcaaataactattcggttgcagcatattaggcgatagaaataaacatcatatgttcgatcaatgaacgattcg

SEQ ID NO: 827 - DNA, 1384 bp, Aedes aegypti
tcggaggttggattaataacgttattaaaactttcagagtgttcaaagccacgtcggacccgttcacagtgattgtgatggaagatttagaactgaccggctatcaaatgaaagaatgcaacgctggattgagccagcaggattgcgaaaatgtgttggaaaagttagccaaattccatgctgcttccgtggtttactatgaacagaatggttcctaccctgacgacttcaaagagggaatgttttctgatggcctgacagctgaatttgaacagtattatgtccctttgttcgattcgtatctacaagcattggaggagctcagataccctgcccaaattatcgaatctctaaaaccaatgagaggaaaagtcttctcaaaaaccagcaaacttttcaaattggatccaacgaagttcaacgtacttaaccacggtgatgtttgggttaacaacattcaattcagcgatcgtgatcttcttttactcgactatcagatatccttctacggttcaccctcgttcgatttgctatacttcatagtcaattcagcttcgcttgccgtaaggacagagaagttcgatcatttgatcgatcactatcatcagcacctggtggaaggaatgcaaaggctaaatgccaaaacaccaatcccaacgcgacgagagcttcacgaagacatccaggctcacggatttctggtttgcgtgttatccatggaaacactggctttgatgttggcgatgcccgacttagagttgaagatggatttgctgggctctatgcagcaggatggagtagagtaccgaaaacagctttttaccaacgatcggtttataaaaactattgaaaagctcatgcctttcatgtgggagaaagggttcctggtagacgaggaagaacgaaaaacaccatttgaatcacatgaaaatgcatagatgttcttgaatggctacataataaatgattgcaatagtcaaacgtgaagatcattactgtcgttacactcatataaattaagcatcatagttgtttggcaaaaggcttttttttcaataaaatttaataagcttccagcaattgctagtccactatcgtaatcaacttgaatatctcaggtttttctggtccaattgtaaaacagttccaaaaaaaaaaaaaggccacaaaaatagaacaaattccatccgtttccatcgtagttcgatctaaattccattacaaataaatatctcaataatttaacattagctgacaacatgcctgatggtgaagcaaatcgaaaacatttttgcgacgtattttgatgtgcatttatgattttttgtatttcgtattctgatgaatattcatgttcaagttggatttcctgcatattgcctat

SEQ ID NO: 828 - DNA, 1437 bp, Aedes aegypti
atgttgaagtccgaattccagcaccagttttgggtcaccaaaaaggcggtgcaacggaagctcggttccaaagaggacgaaaatattgtggcttctgatggggaattggatgcaaagattgagctatttcaatcggtggccgacagttctcgacagctgtatcgcatcatcgaccaatatcaggaaagagtgtgcattctagctcaagaggaaaattccttggggaaatttctgcgcgaggtcagcaaggaatgtcccaccacgggcaagctaatgtccaacacgggtaaggcgatttcctactgcggccagcagcgtattacgatccgggtgcctttgctgcgtcttcatcacgatgtgcaaacgttcaaagggcgtgccatagtggacacacagaagacgctccaggtgatggaacgggaacgaaccgagtaccgggcggcactgagctggatgaagtcggtcagtatccagctggatccggataccggcaaggggctggagaagttccgcaaggcccagcggcatgtgaagacggccaagacgaagttcgacaagtacaccttggactgcttggagaagatcgacctgctggccgctgcaagatgcaatatgttttcccacgccttagtcggctatcagaactcgctgctgcagttcgccaagaaaagcaacgacacctacagggcagcactgaagagcctctcgaaggatccacactataacttctcgattctgaaggagctcacccaagctaatccgaacgccaaagaaggcgaagcggaaggagaggaccaagtggacaagcctgccgacgatgatcagatgctattctttcaggatgaattcaaagacgacgaagccgacgggaagcagaaagagaccaagccgtcgatttccaacccggaagatgacgatcaactcttgtccgatattccaacggccttgaacgaccttctgtcaggaatccctcagcttgagcttaacacagatgcagagcccaaggcacgaaccgaaccggccgctagttcggcggaccttctgggtctaacggtggatgatgaattttccgacttcctttcttcgccggccccattcttgccatcgacattgctcaccaatccggaatctatggagcagtctaccatggatcagctttccggtctagatctgccctcgacatcaggggctgcaaactccaaggtcgagaagacgtccaatgatatcttcggaagtttcctgtcgagtatttctaagactgctaatcccggtggagcagttagtcatccgtctgaaacgaggaaacctcaaaaggacgccaaaacaggcaaggacctctccggatggtatcagttgtttgccgagttggatccgctttccaatccggacgctattccgtccaaggctgatgcgcctaccaatagcttagccgcgtag

SEQ ID NO: 829 - DNA, 3606 bp, Aedes aegypti
atggggatgcgaaagcttcctatgtcgataaaatcattccaacaattgctgtacgtctgtccggactttacgcgtgccaatgaggtccacctgcgtcttgggcttatgctcaaagtgaatggagattacgaacaatcgctgaagcacctgcagcttgcctactccgactcgtcgccgtgcaccttcggcaaacttgaaattcgcttccacatcgcgcatctttatgaggtgcagaacaagtttaaagctgccagggaagcctacgaacagctgcttggagacaaacagctgacaccagcactgaaggccgacatctgccgtcagctaggatggatgtaccacagcattgaaccgctcggagagaaggcccaacgcgaacgttccgcaatccactgtttgcaaaagtcaattgaagccgatcccaagtccggtcagaccctgtacctattggggaggtgttttgccggaatcaataaagtgcacgacgctttcatcgcctatcgtaattcggtggagaagagcgaaggcaacgccgacacatggtgctccataggagtactttaccagcagcagaaccagcctatggatgcattgcaggcctacatatgtgccgtgcaattagataaatcccactcagctgcctggaccaatctcggcattttgtacgaaagttgtaaccaaccacgtgacgcttatgcgtgttacttgaacgccaccaaaaacccggacggacagcaatcgaccgtagtgtcagccttatccactgccagttgtgccaccaacgctgggacaacaccaacaaacacatccatagcttccaccggttccggaaccggaacagcaacagcaacaccagtaacgcccactacgccgtcgtccgcagcaccttcagcctcagcagtagcgatttcaggtggacgaagcggcggaaccagccttacggactcggcctcggctggcagcggcggtgccaaaccgcagagcctcgcccagaggattaaatttctccagcagcacttggcccacgcacctatgccgagtatcacttccaaacggcggcagctaccgtcgatcgaggaagcgtggaatctgccaatctcgaacgaaatgagctcccgacagcaacagcaagcggcccaggcccaacagcgacagttccagaaaggatacggacaggttagagctccggctccgttccaaggtcaaggacagccgcagcccacgtctcaaacgggctatggacagcctcagaatcctcaacagcagcaacagcaaacccaacagcagatactgtctggcaatgggaacttcgctgcgatcagtacccagatgttcaaaaccacgaccggaacgtacggtggcggcggaggattccagagtcagaccagtgcggcggccttcacgcagatcacctccaccaatcagtcggatttagatcaagaactccaagccttgctctcatccaaggacgacactgccaattttgccgaaacgctcctaaagcagttcggctccgacgatttggtggacatcaaggacatcaaaccactggaccagcagcagccgcagcataatggcaccgtactgcctgccgattcgacctcgtcccgaccggacggggagaaatcgcccacgatcaaagccgaagctacctcgtctaccggaaccggttctagcagtgcctgttccacgtcaacggcggcggcagccaagcgtcacctcttggccaagcacgacatcaagctggaaccggtcatcaagatcgaaaaactgtccgaaccatgcaacaaacccgctttctccatcgaaatgactgccaaggagctgctgcaggccgccaagaaatccgatctcaaagacgtggcggccatcagctcgaccctgtacatagatgccccaccgccttcgccgccggaatgtccgccgcagagattgacccgcgagcagctacaacctccgacgccatcggtgttcctcgagaacaagaaacacgcctacagtccgcagctgcaggagttctgcctgaagcacccgatcgccgtcgtacggcaactgggagcggccctcaagctggatctgggtctgttctcgaccaagacgctggtggaggccaatccggaccacagcatcgaagtgcgaacgcaggtgcaccagtcggcggacgagaactgggaccagtcgatgaagtccaaggtttgggcctgcatctcgcatcggtcgcacaccaccatcgccaagtacgcccagtaccaggcgtccagtttttccgacaagatcaaggaggaacgtgacaagttggccggcatcgtgagcaccaactccgactcggactccaaagattccctcaccaacagcaacggcgcaggatcgggcaacggcaagcggaagaagtgcaaaaacagcaacaaaatgctgcgcttcggaacgaacgttgacctgtccgacgaacgcaagtggaagacccagctccaggaactgcacaagctgcctccgttcgcccgggttgtgtccgcggccaatatgctctcgcatgtgggtcatatgatcctcggtatgaacacggtgcagctgtacatgaaggtaccgggaagcaggactcccggccaccaggagaacaacaacttctgctcgatcaacatcaacatcggaccgggcgattgcgagtggtttgccacgcctgattcctactggggcggtatccaagcgctgtgcgagaagaacaacatcaactacctgcacggttcgtggtggccggcgctggaggacctctacgcagagaacattcccgtctatcggtttacccagaagccgggcgacctggtgtgggtgaatgctggttgtgtccactgggtgcaggccatcggatggtgcaacaatatcgcatggaatgtgggtccgttgacggcgcggcagtacgagctggccatccagcggtacgagtggaacaagctcgaaagctacaagagtatcgtgccgatggtgcatctgagctggaacctggcccgcaacatcaaggtctccgatccgaagctgtacgagctgatcaaaacctgtctgatgcaaacgatgcgacactgtatgcaggtgttggagtttgtcaaatccaaaggcgtcgaagtgcggtttcatggtcggggcaagaacgaagcgtcccactattgcggacagtgcgaagtaagtacctacctatttacagtacatctatgcaatttttggtgggtttcgacatggtatgatcgttgaaatattgaagaacagacgttttattgttcataggatggtgaagaatcttgaatataaatgcaatcactgaaagacgaaacgtatttcatattcctgatggttctggttgatcaagaattaaaaaataaagttaatcgataatagatttttttcgagtaaggtacaaggtagtactcaactttgtaagtatatcactttagatcacatctgtttgcgatccgaatgcgattgaaatgtacactcctaagtaaggtattgtaatctgggggaaaattgaccactggggcgaaatttgatcaggccggcaccaatcacgcctatgaaatatacaaaatcatttgatttttccagcgaaatatacat

SEQ ID NO: 830 - DNA, 698 bp, Aedes aegypti
gaaatagattaaaaagtctaaatctggaggatctttcaaatcaaatcaatcaaatctttactgctgcgtttaatgtgtatcaaatttttaaattcatcgagcgttctaatttttagaataaaatcatttgggcataaggaataattgagtgttttcacatggggcgcaaaagcaaacctgaaaaatcaccggaccataaattagccgagaaaaagaatcgttccgcgaagcaaccaaccccaaaaagctcacttcggctggaaaaactacgccaataccaagccgatcgcatcatagcggaaactcccgagcaacgtcaggcccgtttggacaatctccgaaaatatcagcgtaaaagaatcaatcaagagttgcccatcgaacgggaggaacgattgcagaaactacgagaggctcaacagcgtcgtttggaaaacgaaacgccggaagaacgcgagaagcgcttggctaaactgcgcgcaaacgccctcaaacgcaggggtaaaacgtccaaacgtagaaagaaacgcaaatctaacgatggtgagcagaagccagacgaacccaaagccaagaattcgaaaaatggattgaagattaaaattaagattaacaaacctgcaaaacggacggaggagtaatcggcaaaatgaaatgagggagtagagataaatgtagtaaactgactgatataagta

SEQ ID NO: 831 - DNA, 1422 bp, Aedes aegypti
gttggagtagttctcagaagataaacgcaataggaaatcttatcaattagtaacaaattttattcatcttgaatgaaatgatccattgttttagatttgatttaagaaccaagtagtgcaacatgaatttaggtggctcaattcgaatcaataaatttggcgttctcataatcgcaatactgttggtctttctggtttactacatatcgaccggaaagtctcgaagctcaaactacgcattgaacaaaaatcccaatgaagtgaacctgcggaaacttttgatcgggtcgatacaggccgcccagcgtggaggcttcgaggtggtagaggtttccaaaagtcccgacttcaatgttcacagcaagggcaaaaccaaagaaggggccaacgatccggtgacggatgcagactttcgctcacattgtgtcatggccagcgggctgcaccgaatttttccaaagctgaaaatcatctccgaagaggacggggggaataaaccctgtccggattcgaagctgttcgatctggatcctacggtgatacacgaaaattccaacgtgccggatgaaattgtaggaattgaagatgtcacagtgtggatcgatccactggatgcaacacaggagtacactgagaacctgttccagtatgtgacaactatggtgtgcgtggcgataaagggcgttccgacgatcggagtaattcacaacccattcacgaagaaaaccgtttgggcctggacgaacaaggccgtctcggaaccactgagttatatcaagagggacgaagacgtcaagcatcctgtcgttattgtctcccggtcccacagtggtgatgtgaagaacctcgccaaggaggtgtttggagaaaatctgcatattatcccagcaggaggagcaggatacaaggtcttgcaggtactgcacaacaatgcaacggcgtacctccactcaacggccatcaaaaagtgggacatctgcgctgggaatgcaattctcgctgccattggaggcaaaatgacgacgcagaaaaatgaggatatttcctacagtgataaggattcgttcctcaacgaaaatggccttttggcgacggccgtcgagaacatacacgagatgtacatcaaaaagctgatcgaccatcagaaaatgagtcgttaacggtcgatcactcctcaaaatacatcacacgcgcgtactggttcgagagcaggattgcgcgttcaggttagaaagatttctgtgagactcattacatataacttacctagtatttgttctgattaatttgtgatcacgccttcgagttcctcgagtttaattttaattcagaattagatagtagtttgactgtatgtatggtaagattgtgattgatataattcctgaaatcgaataaaatttctcaacaattattacattt

SEQ ID NO: 832 - DNA, 1090 bp, Aedes aegypti
actgtcatcgggtgtatgtcaaagcaagcgctcgcaaaaaaagcgaaaaaaggtacaaatttgacgtttcgcccacatcatccgatcagttctcgagagaaaatcgtgcaatcaacagcggaaaacttactccagtctttggtagtcagtcaggaaaattgcatcacccaacagaccagtgaatcagtgaaatttcgcagcactatcaagaggaagtaaacaaccgattacaacaaaaaaggaaataaaaatgggtcgacgaggaaggtccgcttctccaccaccagcgcagcgcagatcggcgccaatggctgcagctccggctccccgccctgctccgccaccaacccaaccggccgtccagcatgctccaccaagtgcggtagctcctccgatggccgcccctagccagggcccaggattgatggcccagatggctgcgacggccggtggagtagccatcggttcggctgtgggtcataccgttggacatgccctcaccggaatgtttagcggttctgactcgaaagaagcggccccacaacagcaggcagccccagtgcagcagtacgctccggtcgccggatcggaaacgcaggccccatccggaccgtgcgcctgggaaatcaaacagttcctgtcctgcgcccagaaccagtccgatctgacgctgtgcgagggattcaacgaggccctgaggcagtgcaaggtgcagcaccatatctaagtcagtcgaaggtgtgtgaatatgcagaatgaccacctggtgcgagagatttgttacggctgggaagaggaacggtttggcccatgaagcgatatggtgaattgtgaacggaaaattttctgtagtcttgtcttagtgagttgttcagttgcacagttcaataaatccgtaacccagtatgcaatatggccaaattgagcttttctgtagatacgtaggatctttaaaacaattggaaaaaagtcgaactacatactacgtcactgtggtaaacttactgttaagctgaatgattttatttcttaatgatttaattctaggagttttattaaatgaatagcggatggagagaaggaattagaa

SEQ ID NO: 833 - DNA, 957 bp, Aedes aegypti
ctctcagttctcatcgttacatccaaagttctgtaccgggtaatgcagttggttcttgtttcgctattggccaccgcctttttcggcgcagttgcaccatcacctgccaggagaatcgtcggaggccaatttgcacagaatgagaaacagtttccctaccaggtggcccttttcgagaaggatgagttcaagtgcggaggatcgattatcgccgaaaagtggattctaacggctgcccattgcatcgtgcagcttgatggaagtcctacatcaactgatgttttaaaggttcatgtcggttcaccccacctaaaaaaaggagggaaaaaggtgaaaccttcaaggattattcctcacgctgactaccccaagatcaattacgacatcggattgattgagctagaagaggccctcgtttatgataaaatcatccaaaaaattgagctctatcgaggggaattaccagtaaatgtcacagttacaatctccggccatggaaaaaccggaagtaatgagccgatctccgagatgctcaagtacaacacattgaccgtgatggacgagacagaatgttttaaccaaataattcattccgggtggaagaaaatcatgtgtctgaagaagcctgcggataataacggtatttgcacgggagattccggaggacctgccgtgttcaatggaaagcaagttggagtggccaactttgtgctgggaaagtgtggatcgatccgtacggatggatatgcctttgtgcctttcttcgtaccctggattgaggaaactatgaaacagcagtgagagatagtgatttcaaaagcctggagtggaaattatcaataaaaatggagtggaaaatatcaaaaaatcaagcaatcctgaaacactaaattcactgaacatgtctagagtagggtggtttaaaaaacaaaaaaaagtttaaaaatcccactttcc

SEQ ID NO: 834 - DNA, 969 bp, Aedes aegypti
atggtcgcggttagatttttgaattcagtttatctctgtatattgacacttcagcttgctactgggcagcggatagccgaacagaaatgtcaagaatatcgcagtttaacagtatcccgtgtagggataatcccgttgatcgccagacccatgtcgatcgtccacgaagatttcaactgtactaccacggttgaggtaattgctggcggagaggaagctctggaaggtgagtttcctcatcatgccatgcttggctgggaatcgatcgattactccaccaccgtggactttgtatttctgtgcggagcggtactgatcagcgagtggtacgtggtgtctgccggtcactgtattgttgatggcgaatggggcacacccgttgtggtgcgtttgggagagtacgatttaaataatgattatgatcatcaagtggacttcgatgttgagcgagcgattaggcatccgagctacaaggtcagtagcgtttacaacgatatagcactggtgaaggtaaaacggagaattcgtttctcaccgtatatccgacctgcttgcctgtggacttctgaagcgtttaacttctcgtcggtgattgccactggctttgggcagctgggatttcttacagaacaagcaactaagttgaacaaagtcaaactggagctgtacgatggagccctatgtgatcggacatttaggagaaatcggaagttcaaacatggcctcattgattcgcagatctgtgccggaagtgaaaacgagaaggacacctgcaagggggactctggagggccgttgcaggtgatggtcgaggacaatggatgcacctattacgtagtgggacttacgtctcgtggccaagatgcgtgcggattgatgaactcagtggcaatctatacgcggatatcgtcttacgtgaagtggatcgagaacgttgtttgggatgaagatgtagatgtgtggaagtga

SEQ ID NO: 835 - DNA, 1458 bp, Aedes aegypti
atgagtgacgaatgggccatactgtccagagtaccggatattctggaagagtacaactacttgaacacatccagtgaagtgccagttgttcaatttgaatacccagaaaacctgaagaacctaattgacttcactatcgacaacggaggaccacgagaacagtcagaaatagaatcgataatcaaagatgttcttcattattcggtaaaaactggtcacagtaattttcacaatcaactgtttgcgggcgtagacccctatggattggccggaagctggatcacggatgcacttaacacaagccaatatacatttgaagtgggcccagttttcaccttgattgaagatgcgctgataaagaaatgtcttgcattgttcggcttccaagacggtgatggaatactttcgcctgggggatccatttcgaacatgtacgctatggttgctgcaaggtttagagcgttgccagatgtgaaacggaccggcttggcaaatcaacccacgctagtagcgttcacttcggaggaggcacactatagcattaaaaaagccgtccattggctaggcattggaatcgacaatttggttttggtaaaaacggattgccgaggtcgtatgattccggatgagttggagaagtcaattgaagctgttattgagtccggacgaaaaccctttttcctaaattcaactgctggcactaccgtactgggtgcgtttgatccgtttggacgaattgccgacatctgtcagaagtacaacctttggatgcacattgatggatgtttgggtggaacagcgattttgtcaagcaacaagacttaccttttggcaggatcggaacgcgcagattcttttgcttggaatccgcacaaaacgttgggcgctcctctgcagtgttctgtattcattctcaagcagaaaggattgttacacgagtgtaatgcagccaatgcagattatctgtttcaacaggacaaattttacgacatatcgtatgataccggtgataaaagtgtccagtgtggtagaaaggtggacgcattaaagatttggctcatgttcaaagctcgagggatgagcggtttgcaagcactcgttgacaatgcttttgattgtgctcgatatttaaccgaagaaatccggagcagatctgggttccgattggttttagacgaatatgagtataccaacatcagtttttggtacattcccaaaaagctacgggtggaagaagaacatcaggatgcatcttggtgggctcgcatttatgagatcacagctcaaattaaggaacatatggtaaagcaagggaccatgctattgggatacgtgcccatacctcggaagaatataggcaactttttcagaatggttgtgacttgccatccaaggccttcattcgatactatgagatttgttatagatgagatagaacgagtaggggaatcactttaa

SEQ ID NO: 836 - DNA, 1662 bp, Aedes aegypti
atgaaacaccttcgagtaatcgcagtcactgtgttggccatcctggctggcacttacgctggagattgcggcgaaaagttccgcggaaagtgcagttgtggactacaaacgtacaactatcaaacgaaatacgtggtcaattgcaccaatgaaggttttcgagatgctgcggtgctggaatacattcccacggagacagaggtggttattttcaccggaaactacatacaagagctgccctggaatgtgttcggcactatcaatgatcggctgaatctaactattgtcgacatgagtaataatcatatccacgaaattcgcggaaagacatatcaccacgtaccgaacgtgagacggctgatcctaaaccacaacaatctgagcatttccaggtacgacgacgaagttttcaactatcaccatccgagggtgttctccaacttcgtcaacctgatggaattgcacttaacgaatgcatttgccgacaatacatcagctgagctgtctgccgatctgcacgatatcttcgtcagcagtaatctaacaaaactggtcaaactacatcttgaacagaacgaaatctcccagttcaacgacaaaagagtattctgcgattttcctgccctgctagatctccatctcggagacaatttactaacggagctaaacttcaacatcacgtgtttgaaaaagctgcgctttctagatctcgaacggaacaagttcgaaacgttgcgacctcacgatatgaaaatgctcgatgaagttcagcgcgagccagggcgaacaactcccttcatggttgacttcacgtttaacccattccaatgcgattgtgccatctatccaacgtacgactggatgcgcagtaccaatgtaaccgttcgtaatctggacaatctcatgtgtttccgtaagaaacaccaggagccaattttttcgctgaacatgaagaagtgccaaaaatctcgatcgggaaaacgtgatcacaccgtcacattggtattcgtccttatttgtctaagttgcatcctggtggttctggtcggttcgttaatctacgtgagcaaggacaagctaaagacatggatcactccggtggtggatcacgtttcgaaaaaggtccaatacaccagcatcaaggacgaagaagccccagagcaatacgtatgatgtagcgcgttaatccagcgcggacccagtgccccgcgagtggaacctgtatagaaaccggcaaacagtgtgatcgcaagcggaaccacagacaggatctaatcatatcgaatgtagcttagcttaaaatcaatgcccgctgaagcaaatgctgtgtatataagtgaataatgaggacgagaaaacttaattttgaaaaaaaaaactaaacaaatgcaactaatgcttgaagcaacaaaacattttaaaaagacgtacggttagagatgaagaaataaccttataggttccctagataataatgaatgaatgttttaacaagtttttcttttcgttaagtttagaacataggatagtgtgactagaaaataaaatctaagaacgtactgatctgagcaatggctgtctcatgtgtagacaattattgatttaaattttaagaatacaaacatgtttacagttgaataaaatggatttcgatatgccatc

SEQ ID NO: 837 - DNA, 3375 bp, Aedes aegypti
atggcacgggcgctcccattactggcgctgttactcacgcacaatttggcaagttcatttccgcagcaccactacacggactacgtgctcggtggtgaactggtcagtggaggaggggctggcggaaccactacgggaattggatccagtggcacaggcgggaccggcaccggcgccggtgaacaacgattcacatgtcccgaaccgacgaccaccactagcgactgcacttgcatgtacgccagctccgattacgaaattcaatgtcccgtgattaatccggaaattacggtgaaaataaaacctggcatctacgcccagatacagtgctacgagaagcaggagtttagcgacctgccaacgctgaacgttggcaacacgacccaggtcaaaatcatccattgcccgctgccacagcgacagtccattaagcagttcatcaaattcctgggagttaaccacgtgaaggatttctggtatcagaattatgggaaggatttcggagtgcgattgatccggcagcatttcgagggtatgcatgatttggaaaaacttttcctcagctcaggaatcgaagacatccaaccggatctgtttgccgatctgccgaatctgaagtggctcattctacgaagcaatcacgtcaaactcctgcacaacgttttcgataacctgacgaatttgattatactggaactgggtgccaaccagatcaccgagcttgaaccgggtctgttcaagaatcaacgtaaactacgacatctcaacttgtggcgcaatcaactgcgaaacatctccaaagaatctttccgcggagcggagacactccaagagctagatctctccgtcaacgcgatcgaaacgctcaattccgatgtgttcacgttgcttccagatctcactgtcctgaatctcgggttcaatcgattcaccgttctacccgataatctcctttccgaaaaccgcaagctgcgggagttcaaattcatcaataaccaggctccgttgcaaaccctaccggaagcctttctaggcaacctccctcagctgaaatcggtcatattgaatcgatgcagcttcacacatctgcccgcatcgctgttccgcggatcgagcgaaatcacccacatggatctgagctacaaccagctgggatccgttccggagttgcttctccgcgatcagctgcgtcttcaagatctgaatttggcatataacgaactggaatcgcttccggaacacttgctggagaacacccgggagttgctcaccctgcgactgtcgtacaatcggctctacaatctttcggcaaacatcttcgcctcgctggacaagctcaccgaactgcacctgaacgacaacttcctgcacgccatcgatcggctcaccttcagcaacaccaaagccctcggaaagctgtacatgcaaaacaaccacctctccttccacgacttcagtttcgtcctccaggagcaggacatcgccgacaccgatggcacaccgttccagtacctggaaaaccttcaaatcctaaacctccgcaacaacagcatcaccaccatcttccgcgattggaactacaacaacctgcatctgcgcgagctcgatctcagctacaataacatctccaccctgtcctatctgagcctacagttcctttcgcaggatgtccgcgtcaatctaacgcacaaccgaatatccgagatcgatctcaaagacatggagcccatcatcacctcccagcgatcgcaggacgacagcaagatctacgtctacgtcaacgacaaccccctgaactgcaactgcgtcatcttctcgttcgtgcaatacctcctgaacgagctggatagcgccgtctaccgacggatccaattcgtagcggacgatcttcgctgctcagagccacagaacctggaaggcgtccacgtatccaaactgcaaaccaaagacctcctctgtcagctggatcaacctggcacggaaatcaagcattgcccagcgaactgcagctgccacgtgcggccactcgatcgcggagtgatcgtcaactgcacgcgtcaaggcctaacggaaatccccgcgttgccgcaacccaccatgttcggatacaacttcatcgagttacacgtagaggataacaacattaccgagttgccgacggagaacttgactgggtatggcaaggtcgccgagctgtacgcccggaataatgcgatcgttgaactgctcccggagaatctaccgagtagcctgaggatactggatgtgacgcagaacaaattcgttatgctaaatcagtcggtcgtcgagtcgctgaacagcagtaaggttctggagagcttgcacttgtcgggaaataaatggcgttgcgattgcagctcagcgcagttcatgaacttcgtccagcagaatcacaaaaagatagcagatctgggtcagataacgtgcgaaaccggtgaagagttcagcttgatcacggtgaacagcttgtgcaacgagagcgtgactacggtcataacaatcagcgtgatcttgtcgatactgggcctgctgattggattgttcacggtgctgtactttgtgtaccacatggagatcaaggtgtggctgttcacgcacaacatgtgcctgtggtgggtctcggaagaggaactggacaaggacaagctgtacgatgccttcatatcgtactcgcacaaggacgaagagttcatcacggagcacctggtgccaaccttggagaaggaaccgatgaacttcaagacgtgctggcatgtgcgcgactggatgcccggagagctgattccgacgcagatcgcaaaatccgtggaggactcccggcgaacgatcgtcgtcctgtcgaccaacttcctcgagtcggtttggggtcgcatggagttccgcacggcccacctcacctcgatggaggagaagcgcgctcgggtgatcgtcatcatctacggagacatcggcagcatcgaagatctggacccggagctgaaggcgtacctcaagatgaacacctacgtcaagtggggtgatcaatggttctgggacaaactgcgttacgcgatgcctcatcctccgaccgttaaaggactcaaaggcaagggtttgatcaagaatcacctgaagagctccgtcgacgataagctggagttgatcaagcccgttccggttacgccgccgccactgacgactcctccagccgaaatgaacggacacgccagatcacctccgttcaccatctccaacggaaaggtcgtcaacggcaacggttaccacatcaacggacacgtgatgaacggtcatgtcaacggacacatcaacggagcattcgttatcaacagcaacgccaaacagagcgacgtatga

SEQ ID NO: 838 - DNA, 2981 bp, Aedes aegypti
atgataacattcctaaacaatgatggagaaaatacgaaatgctcgcgctgggtgttatcactggcggaagcccgattggcagcacggcggcaagcacgtgcggaggcacgtgagattcggatgcgagagctggagcggcaacagaaggaactggaacagaatgctgaccgcgtgttcgacctgcagcagcagtcctccgggctgtcctcgctgggggacatctcgctgggaacacgatccacccgccttacggtcaacaacacggtacggggcagctcgctgtcatcccggaggagcagcgaggactcgctcgaggaggagggacgaagtctgcgggacctgcggcatgaactgagggaagtggaggaccggttccggaaggcgatggtcgccaacgcccagctggacaacgaacgtgcctcccagaactaccagatccagctgttgaaggacaaactggaggagatggaagaatcgcacgcccagctgcagcgagagttcaaggagaaatgccgggatcacgatgccttaaagcgggccaacgacaagttgtccgaagaactgaaactggtccagggccagctgaacgagcgggatacgctgatcgaggagcagggcctggtgatcgtgacggtcgagaacgaagacggtagtgatgcacgacgcgctctagtcacagcagagaatgcacaactcctaaagtccgcacagggttccttagatgtaagactcaaaaagttctcggaagagaaacaggaacttcaaaacgaagttcagacgttacagcagcaactgaacgacatcaaatcaaaaggcaggaaatacagttccttcaacggggcactggatgacgacgattatgaagatgcacaaagagaagccaacaagctgatcaccgactacaagtataagctcgcgaaagcggaacaggaaatcgctaacctgcaggccagtctagcacggtccgagtcccaggtgatacggtacaagagcacgtccgaagcggcagaaaaggccgaaagcgatctcaagatcgagaggagaaaactccaacgagagaaccgcgaattcatggaccgtttggaggagctagaaacttgcaataaccacctgctgaaacgactggacaagctgaagaatgcaaaaagtgcattgctaaaagacctttgatagagacataaaagttcatacccgcattcacaaaaaaaatcccctcatcgtcgttccctgttaaaaatgtgcacccgaaattacttcatcttccaaactgtatggttccattattcatgatcacagattgtaaattgtggaaatgatctcccgtttccgatcttgtatgtattttgtaaatgttttatttttcacatattttagtagtgagtgttgaaaggattcagttttaggtaccgcaaaatcgaaatcggcaaaagttttttcaagtacagtgcatatattaaattaaccagcttttcgcagttcgctccatgacaccggcagaaaggagatgataccctaactcctaacccaaaattagctccagcttggtgtgtacaggacagccaacaggtgtaacagttgttgtaaaatgcagtaaaatgtttatcgattgtacacacacatccaaatgatactagaatttgcacttaccagtaagtaggcttgtatagtaaatttattaaaaattaaacaaatatagacagaccgtttagtgtaataaattggaaaacctttaaatctgtgtacttgacagaatatagtgtaaattgatacagcagagattaggctcatatttaggcaaaagaaatgagataattgtgaaattctgcgagtagtagttaataattgagcatgaaaccaattttaatatttaatttattgaagaaaaattaacacctcctagctgacatggaaggtgcctcacttggcacgaagtcatttgtcataccgtatcatgcgaaactttcatctgccaagtgtcgccaaatgtcacgtcatatttcatcgaaaaagatctaaaaaaagttgccaatatgcaaaaatagctataggggcagaagagagagttgccgtttagtgaaggcaatacacattgtttgtaaaataagaaattgccaaatttaaaacacaagaaaatgcatcctgtcatcaagcgtgtcaaaagaatatcaagcatgagacgttgacggttgtcatcggtcagaaaactaaaactaacaaaggtaagttgttaaaccagttacatttacactgttgtttaaattatgaaccttatgaaatgtatactagtttctttcgttaacctctaaaacactgcatattgatgatgattattttggttcctggtagtaacctcattacttcaattacgccttcctaatttgttaactattttgtaaatctctcttttcgtattttaccaataaccacacaatcagtcaccatttttttaatcgaatagagaaacctttatcatactcctaaaactgccatatgtattttgtttgtttttttttacaattggattacggtagaaacctatcacctatacgttgcgccaacgattagagtatctgcaaaatctaatttgtacatttttgatcggaatcagatttccttcctaaaaaaaatattaaaatatgcaaaaatgaacgattgcgatgtcgttgttttcgcttagcttctatgcacatcttagatcaacaaaatgtaaaaaacacacagcaaatagtgtaaaagaagaaaccagaaacatgttgcactttatcgttggatcaaacaacttgaccctctgtaggaaaccaatctatccaaaaccctaaatgctctgacaggccgccgtatgatagaagtaccaccaacctatgttaggcagcgcaagacacacacaaaacaaaatagtgtaacaataaaacagcaacgtgtaacaaaacaagatttggaacgcaaaagaagaaaaatgtaaaataaactgattcaagcat

SEQ ID NO: 839 - DNA, 5196 bp, Aedes aegypti
atgtcacagctcagctcgcctttatgggcatttggcacaatcgacaaagtgtgtttcgactctcgaacgaacacattccaaggaacgaacaatatgcaaaacagctcgcctcaaaagacacaggactccagcaatgggatgatcggactgcaggcggagctcgggggaccaccaccgggacagctgatgaacacatcggccacaatgatggcgaacggccccccaaacggacccggtagtctcctggccccgggacatcatcattccaacgcgggaggagcaatggcacatccggcgcatcttcatcctccaccgccacctcagcagatgggtggccgttctggtgggacggctcgggaacgcgcccagcatgccgtggagtactacaacagcaacgtcctgcgggctcgagttggagcgggcctggccggaccacgcaactcagtccacgaacggtatccctacatccagcgtcatctagggatgagtgtcggcggaaagttggcgccacaaaactccgagaacctctaccgaagtaactccagccttgagcttattcacgatcacagtggccatcacgatggcctgcacccgggaggatcgaatcttcggcgagagtacggcagtcacggatcgatcgacgttatatcctccgatcggcaccacagccaaaccactggcgaaagtttcctggcaatgctccaagaataccggccagctgtatttggcatggaacacactcatcatcacacaggaaaccacactcatcacgatgctcgtaacggaggaatgctttcatccggggaagatagtctggaccgtggcaactccagtcccaagttacgcatgaagttcaatcgattgtggtcttcatcgggagctcacggagccaaacccggtcgtggacaaacgcagagcgcttcacttgatgacgcctctttgaatcccaacgtatcggtgctgtccaacgtttcgaacgttagcacaacctctacgaccacggtatcatctgcggacatcgaagaacgtcaacggagaagagcctttgcgcacttcgactgccaatcgctcaccgctaacctgggatacgccgccaagttgcgcgggcttttgcttgccagaagacgcaacactacaacaggagcttccgcagcagcaacgtacggaacacgatcatccaccccagacggcgacagcatagacgaagactacggcgatggccaaggcaacgaactgctcgagagttgtccgttcttccgaaatgaagtcggtggcgaagaagaacgcgaggtcagtctaacaaggatgcaaaatcccatgccggctggccagcaaagacgagctatccatcgacccgcgctagcctacggagtgtcccttctagaatgcggcgcaaacgagactctctggaaggccaacagctgcccctaccagaaaggccctcgaccgatcgaacaaatcgacaacggtgctctctactaccggcagcatttcttcagccaggaacatcaaaactggttcggaatggacgaacagctgggtccggtggcaatctccatcaagaaagaaaagctgcctcctagtgcgacgcctactcttgcaatccacggtgccgatgtcgcggccacgtccaaccaaactccccagcacctgtataggctcatagtccgcaccgccgagctgctaaccctgcgcggatccgtcatcgaggattccattccgaatcctcgcggaacgggtaagcacgtcagtaccaaagaaattctggaatacgttgcgccagaagtacaaatcagttgtctaagattaggcgtcaatacgccccagtgcgaacagcagctcctgaagctcgacgaacaaggtttgaccttcaagtacaaggtcggcatcctctactgccgagccgggcagtcctccgaggaggacatgtacaacaacgaagaggccggtccagcgttcaacgagttcctggatacagtcggcaaacgagtgcgcctcaaaggcttcgagcactataaggcaggtctggacaacaagaccgactccaccggaacacattccttgtacgccaactaccaggactgtgagatcatgttccacgtgtcgaccatgctccccttcacacccaacaatcggcagcagttgcttcggaagcgacacatcggaaacgatatcgtgacggtcgtcttccaagaaccgggagcccttccgtttactccaaagaacatccgtagccagtttcagcacgtatttatcatcgtccgggcggtgaatccttgcacggatcacacccagtatcgggtggcagtgtcgcgttcgaaggaagtgccggttttcggtcccccggtgcgaccgggtgctctctacgccaaaggaaagacctttgcagacttcctgctgtcgaaggtgatcaacgctgaaaatgcagcgcacaggtcggagaagttcgccacgatggcgaccaggacgcggcaagagtacttgaaggatctgacgagcaattactgcagcgctacgttggttgatactgggcagaagttctcgatattcccgagtaaaaagcgggaaaggagtaaaccgcgattctccggagacttgacccagcgtggagcgttctgttggcaggtggtattgcacgacagtggaatgtccactcaggtggattgcttcttggggatctcagcggagactttcgtgttgatcgaggaatgttcgaggcagatcatctttgtaaccccgtgcaaagcgattctgggatggtcaacgagtcagaattcgctgcgggtgtactatcatcaaggggagtgtgtaaccttgaatatgcgggattcaggtgatcgcgatgagcagcttgaggtgatcgaacgattacgagccgttacgaatggctgtggagcactggagctgagcttgaggcggaatcctatgggacagttgggtttccacgttcagccggatggagtggtgacacaagtagagatctctggacaggcctggacggctggactacggcaagggtaccgattggtagagatttgcaaagtggcagtagctacattatcgcacgatcagatggtagacttgctaaagacgtctgcgcaagtgacggtaaccgtgatagaatcgtttgcagacttcagtcctcggcggggctgtttcttgcaaaactgccgattcaatgcaatcaactatgaaagtgactacgagaccgtgccagaacgagcggacaagaatggcaagaagcatctacccagtgcccaactgcagtcggcaagccatcgtcgtcggtacgaacggaacttctctccaccacgatcaagcaatagctccggctacggaaccggaagcagtagtcgatcgtttactgcgctacatcagaatggtgttccacccagcgatcctcgggatcttcgatatggcccaacggatatgggcactctaacgagttcatccagtggccactcatcgaacgacgaacgctggtatgacgtgctggaacctcaacatgaagctccttcctcgacgatgcctcctccttcagaaccaaactatcatcacccaaagctcaccgcttccagtaactccctgcccttgtccggagccacacctcgaccgctttccctgcataacgactcccgccaattgaacaacaacccaaacggcaacgccaacgtggccctcctgaagcgtttgatcattagcgaaagcaacagtcctcatgacaatggaccctctgaacctctctacagcagttccatgaaaaaccttgccaatcatcaccatctcagcgctgccgaagaagaggacctctcgcgacacaactctccgcagctaaagcgctccgcaacgaccaccaacatctacgggatcaacggcggaagtggcggaggcagcaagaagccgttgaacaatggccctctcagttccagcagtacgtccagttcccgcaataacagccctcgaccgaacaacaacggtatcgccgatgccaagccgaggacgaagagctccgcccctcaacggaacagcgtcaactacacgggaagctccctccaggaagatctgatgaagctcatcaacccggactacatcgccgccgcttccagtgacgacaacttcaatgctggtgccatggaaaaaatgcataagggtaatccgaacagccacagcttggggaacatctcctccctaacggcttccgccgggttgaagcctatccagcagcaacagttgacgcagaaatctcgctcacgggaagggatcaacctgggttcgtcgaacaatctgaaggtcgccaaaaccaatggcagcgtgaacaatggcccctcgaatgggacatctgaacaggagtcggatgtcatattcaccacggcccgaccggcaacggtgatctcgtccacaaccagcaactgttccagcccggccagcgagttgaacaacaacaacaagctgcacatcaacgaggaccacctgaagatgtcgccgggcaagaagcagcagattatggcactggcggccgctgccggtggtattctgaagaatggaggcggcatgatggcgaacgggggtgggggtggaagttccggaggcaatgttaacggcagtggagggaaaattccgctgccagacatgaaggagatggactggagcagtctggtggatacggcgaccaaggcgatgacgcagctcaacgaatctggcgccaagcatccgcaaggaaacatatactacgacgacatcagccaagtcttaaacggcgtggttcagcagcagcaacaattgcaacaacagcagcagcaattgcagcagctccaacaacagcaacttcaacaacaactgcaacagcagcaaagctcccagttgactgtccaaaatggcgccggaacacctgccctgtcggatctatccacaactccgagttctgcgtcaccggtttctaccggaagcggtagcaccgccaacagtggccagctgatgtccatgtcaaacagttccagccttccggaactccagagtcaagtgacgcaactatcagacagggttctacgcgagcaacgtcgtagacggtccctggaacacgccgttcgtcgcttgaccgaagagaaccgtcggcttcaggacgaaagccaagctgctgtccagcaattgcgacgcttcaccgagtggttcttccagaccatcgatcgccagtcgtaa

SEQ ID NO: 840 - DNA, 4755 bp, Aedes aegypti; identical to SEQ ID NO: 365

SEQ ID NO: 841 - DNA, 1149 bp, Aedes aegypti; identical to SEQ ID NO: 347

SEQ ID NO: 842 - DNA, 1470 bp, Aedes aegypti; identical to SEQ ID NO: 354

SEQ ID NO: 843 - DNA, 1181 bp, Aedes aegypti; identical to SEQ ID NO: 387

SEQ ID NO: 844 - DNA, 2571 bp, Aedes aegypti
atgcagatttccaccgatgccgccggaatcccacagaaagccatcgacggatccacgtcggctttcttctcaccggaaacgtgctccctgaccaagccggaacgcgttccctggtggtacgtcaacctgctggaaccgtacatggtgcagctggtgcgactggactttggcaagtcgtgctgcggcaatggaaaaccagcgacgatcgtggttcgggtgggcaacaaccgtccggacttgggtacgaatccgatttgcaatcggtttaccggtagcctcgaggaaggacagcccctattcctgccgtgcaacccaccaatgcccggagcgttcgtatcggtccatctagaaacgagcggccccagtcagctatcgatttgcgaagcgttcgtctacacggatcaggccttaccgatcgagcggtgtccggcgttccgcgatatgcccccgggtgcatcggcttcctacaacggcaagtgctacatcttctacagccgtcagccagctacgttgcgcgatgctttggccttctgtaggtcccgcggtggaaccttgatcaacgagagcaacccggcactgcagggattcatcagctgggagctgtggcgtcggcatagaagcgatacctcgtcgcagtactggatgggagccgtgcgggacactcaggatcggaacagctggaagtggatcggcggcgatgacgtgtcggtttcgttctggaacctgcccggaggcgatgaggactgcgcccggtacgacggatccaagggatggctgtggagcgataccaactgcaacacacagctgaacttcatctgtcaacaccagcctaaggcatgcggacgcccggagcagccgccaaactcgactatggtagccccgaagggcttcgacgtaggcgctgtcgttgaatacaactgcgacgaaggacatctgctcgtgggaccatcgcagcgtacctgtctggaaactggattctacaacgaattccctcccgtttgtaaatacatcgaatgcggtctaccggctgccattccgcatggacactacgatctggtgaacggatccgtcggttacctcagctcggttcactacaagtgtaacgaaggctacgaaatggttggacgcgccctgctgacctgtgacatcgatgaacgctggaacggaccgccaccacgttgcgaagtgatcgaatgcgaaccgctgccgacgttgttcccgaacggagttgtagtggcgcccaacggcacagattacggatcccgagcggaggttgtttgcaaccgtggatacattccagagtccgatgagacgcacatcgtttgtacggctaccggccagtggagcaatctgctgccgaagtgcattgaagacccagcgagcaagacaacgacgccacccccaacgacaacgcgtccaccaattgtggttgtatcgacgacaacggttccagttactcagtacacgcagaagcgacctcagacgagaaggcccacaagaccaaccagccggttcacgacaactacgaccacaactcaatcgccgctgttcagcatcgagattgacgacgaagtccgtccgggtcacgaagagggaccctcgcgtaaaccgtaccgccccggccagaacacgataccaaagattccaaacgcacatgtgccaccgccgaaacggccgtcgtactacgaaccaccaaccacatccacgactactacaacaaccaccactaccactacacaaacaccaatacaaacacgccctactacgactagcacacggcagactaccacctcgcgttcgccgcaggacattatcctgtcgcagcatccgcaagacaacgaaatcgcaggctccgtcaacatccggcaggatcaatcgccgaaggtcaacgtaccattcgccgtcgataactcggacgccaagaatgcccgcctcaatctgggagccatcgtggcgctcggcgccttcggtggtttcgtattcctagcggccgtcattaccaccattgtgatcgtagtgcgaagaaaccgccaagcgaaccagcactaccggcaccgggcctcgccggactgcaacacggtggcctcgttctccagctccagttccgagtcgcgcaacggcctcaaccggtactaccggcaggcgtgggaaaatctgcacgagtccgcctccaagggccacaacagcaacagcaaccacagcagcggcctgaagcggaaggaaacgatggatgcgccgccgccgagccggtcgcgctcgcgggaaaacctcggcggcagccggtcgcgggatctggacagatcccgggagaacctgtcgtccaaccggagccgggactatccccgggacagcatggccgtacgggacggctccgagatggtcgtgtcggacgtgtgcgtcaagggcgagaagaaacggcaccaccaccatcaccacaagagcagccaccgcggcggcggcggcgccgggacggagacttccgggaaccgaacatcatgggcagcggcggcaacggtggaggcaacggacgccgaggcgaccaccgccactactgaccccgtagaatggtaa

SEQ ID NO: 845 - DNA, 3049 bp, Aedes aegypti
gcaagcagagcagtaaagtggaaagcaagtgtttacaactagtgcaaatgccgaaagtaccgatatatcatcagtgcgtaatctgttttggggaaaaggtataattgcgataatcaattttgtgcaaaaccatcctaggtgtgttgtgggggtaagaagaaaatagataaaacggattgtggaaaatttttgaaggtcgcatctgtgaccagttgtagctccaaatagcaagcagctaatcgccgcaaatccggcaaaacaatggcccggctaacggaagagatggtcattgccaggtcaaaacagtcagacctggcagcaatcaaaaagctgaactgttggggaagtgagctgagcgacgtttccatcataagacgtatgcgtggtgttgaggtgttggctttcagcgtaaaccgaataagcactttggcagattttgaaaattgcttaaatctacaggaactgtatctcaggaagaacaacattactgacatcgatgagctagtatacctgcagaatctaccgaaacttaaatatctctggctggaagaaaatcctgttgtggaaagtgccgggccagggtaccgacaaatagttctccgagcgttgccaaatctcaaaaagctagataatgtagatgttacacctgaagaagtttcagaagctatgcgaacaccagtagcccaacatcacccaaaacaagaggtatatgaagacccgccacctcctacgtatagtcaacaacagcaacctcaacagcaaccacagcagcaataccgaaatcagagcccagttgtcgaacgaagtcctccgaaccgggatagctactcccctgcaccacatacccagcactcatcacactactccagcaatcaccgcggttcctatcaccaatacgatagatcgcctggctcagaccaagacagtccagtttctggttacagagatcgtgttccgattgctcccagtatgtcaacccattcgatgaaggaatattaccagtcagactaccagcgacaaaatccacccactcattatcgacacagccagttggatctaacggaatgggatgaaagcagtcaaaatgcacatcaaatcaacaacaacaacggtcactcatcaaatcatatcaacaactaccaacagcagcaaagtcaacagcctcaacagtacgcccaatcaaactatccctcgaaccgacgaagcattggtgccaacagcgaaagggatttgtatcaatatcgcaatggcaacgctaaaggatctgagcagcgagatgaatgggaagatgtggagcgtcgaaggaatgaaaataggcggtcggattcaagattcaacgacaatgcaagtgtgatatccaatgctgtcctcaaccattttgctggagttcatcgaaggcctgttaatagaaactctaacttgttgtctgcaaccttgtgtttggttaaggaactggactatcccagtctagaggtagtggaacatgctgtacgatgtcgcatcgatgaactggccgaatagttttatatattaagatagttttaccttgctgaatggcgttctaatcgttctcgtctcgtatgccgtctcgaagatattatgcaaacgttattataatgaattcttaacacgtatctgttcagttatctacttctttgcactgtattacttaagatcctcttattgtttgactgcttcataagctaaaatgaatcgagagtgatccaaacgagatgtaaagctttctaaggcgaacatttgtaacatttttcagacaggaaaagaagaacttacatgatatgtgatttatattaattgagaaaagacttaaccacatgttagcatgaatgatgatgtacatgagaaaaaatagcagaatagtaacaaaacaaaataattgtattcaatagtaaacagcaatgaacaagaacacaataatctgccaactttgtaataaaattcaacaatagatttagctgttccaataataaaactaacttaatgtaatttttctattcggttgaacaaaatgcaagatttacggttaatgtatgatcaatttatgttaatgtatgatcaattttgattcagcgtttttgcgccctattttacattatcacgactgttaagacatattctcaaatgccttcttatttcacaacaagagcaggaaaattttctttgcgtttttgcaatattttgcaagtaaacagtccaatattcagtacaaatagaaaaacagaagtcgtaaaacaacttgaagggatgatttagtttcatgtcttcttctttaaaattggcatagagaggttttagcagtgaaataaggaaaatattttacatttattgtcgaggtcaaaggtgcctagtaatcataaccatgcaatatcgaaggtttgtgttcatgtttgctttgaaaagcctttgaaatgcttttaacgtaatctgttcctcgaaataaaccagtcatttgcagtttcgtccattattcaaatgaaaataatgttaatcctgaatcgggatcaccagaggaatacgggcgttttaaacgttaactaatgtaaagtaagtatgcatagtagatgcgaatacagtgtagcaaaaggatttaataaataactactaacaaacatgttttatcattaaatatcacattcatcacgaaatgcagtatgaaatatatttcaaacaaaattgcatacaagttattctcagccgatgtttcataacacttttagtcaagttttcaacaacacccttcaatccaccagccgttgtctgcgcgttgattcgaataatattttcagccaaagcttttcgattgactggcagtgttaagacggttgagtcgctagtgctttgcggtggctagaagcaactaatatttttcacgttgcgatatgcttggggtcggtaatgatttattactaatgaatgggttagatgcatggcatttttcgctactcataacataataacgcacatgtgctagcgtccatgcgcgaaaattgctaaaaggtaacgtgaaaattatttgtatggcgaaatg

SEQ ID NO: 846 - DNA, 9015 bp, Aedes aegypti
tatacagagatttccggggatgtggtatttggagagaagcacctgagagcatccgatagtccttattcactacggacggatctggaggtcgaacggaaggcaaggttgatcatcgagccgggggttacaatatatgtagcgcctatggtcggaatcaccgttcgaggttcactggtggcattgggcacatcggaaaacaaaatcacctttacgtcgttgcccaactctggctacaaggacatcgaatcggaccctcgagaggtcggtgcacggctggtggatggtcccaacccgctggcgggtagactacagctactgaatcaaggaaaatggcgatcggtttgcagcaactcgaagaactggaccatcgcagactacgaaacaacctgccgccagatgggttacaagggaggtcgcttctggaactggatggaccgtctacagaactacgaacctcggttattgtacgaggacccaaagtgcggaggcacggaagcatcgctgttcgattgctcctgggaaacccgacaggttggatccggtgtttgcgactaccacagtgatatcggagtccagtgtttgccattgtttgaccaggtaaccccccattggcggggaattcggttcgagtacgccgaaagtaaggagaagctagcgcacaatcacattctgtatgacttcatttcgttgtcggagttgaggaatgttgacatcatacgtgccggtacagggcggggaggaactgctggatcagctattgccgtgttgggaattccccctgttttggatcatgtcctagttgatcattcgtcattcacgggaatcaacgttacaaagcacgatgcagcattcatgtttaaggatgtaaccgtacgaagaagtcgcggatttggaatattcgtcaactcgagctatggatctacgctgctggacagcgtgacagtgagcgaaaatggtgctgatggcatccgatatgtgggccatgatctacgggctgacgaacgtaccgatcgtagcaaggtgttcgacttttgtaccttgacgactactgcttggcaaatttaccctctgcaactgtcgttcgaacagtctccgtttgccttatctcagaagcaatgcgcccagtccctcacaaccggctatggctatgttcttacgtttcactttgtgcacttcgagatggcacgcaacgaaagtgcagtcattcaagtttacgacggaatgtcagaaaacgatcgattgttagcatcgtggaacatacggaactcgactcgaccacaaactgtgactacaactcgagagaaaatgcatataaagctacgtgctgatcctagaagtcgagtcttggcacattttcgaatcactgccggtaccaccaaagcatacgatctgaacgtaacgcaagcgacgatcgttgataatggaggtcgtggcatagccatcgataatctacggtcgcaggttcatgtgcacgcatcaacgattgcgaacaataaacatgccgccggtttgcacgttactagcggtgctggtgatgtcaacgttactgactccaagataagcttcaacattggcgatggcattaacattacgtactacggtggaaatcggaacatttcacgcagttctttgagctccaataaaggctacggttttgcggtttggttgaatcagaccacaaaggatcgtcaggaatttttggagttcaaccaaacgacaactattgaatactctaatgtcatcaaaaatttggagattggtgttctgcatggaaactactgtggcgattcgtgggtaaacattacgggaaactggttcaacgacagcactcacaatgcaatcgacattcaatcatgttggttcgagacaatagagaatcgaaaactacgacttcagattggacacaataattttgaacattcgaacaagattgggattatcataagccctattctcaacttggaaggaaaaatcgagtacaatcaatttttgaaggggaggtacggagctttgttgacgaggaacaaaccctgggaagaattccgacatctaccagtccgactcatagttcagcacaactacttcatgtacaacagaggcatttacgttgcctctctggggttatctccaaacaccgacaataaaacacagtggttgttgtttacgcgaaactttgtgaagaacaacaagatcaaagaagcgttcggccctatggaagacgaaggagaaggtttgggtggagaaggccggttaaatcccagatcacgagtggctgcacctgtcgtcatctcctccaataacgttgatgtattccggaatatcatatcaaactatgaatcaaattacgaagtgggatcacagttgtcagatcagagcaaagccttgaacgttacatataactggttaggataccaggaagaggagaaaatctacgagcgactatttcatcgtaaagatcgatacgatctcgcaaaaattgaatacttcccttacttgttgcatcattctaatcctggcactcagaccatagctcagttcgcaaaatttgtaccattcttccacaaagaaggaaacgatcgcgttggcggagaagttgatggccaggagattcttccgtcaggaagttatactgtggaacgtgacatcaatgtccggccgggaggaaaactgattcttaacccgggagttattttgaacttcgcaccaagcgtaggaatgatggtcacaggaaaattggaagctcggggacgaaaacccgatgacatcatgtttacgttgaagcgggaagcagtaatgatggaaaacgacactacagaagctatcatgatggaccctgaggttatgatggacattgaaaccgaatccattgttgatttggggcctgtagatccgcagacccctaagattcccgttaggctggttggtggaataagtgaccatgaaggaagattgcaggtctacaccgaagggcagtggggaacggtgtgtgattacggttggaccataatcaatgctgccctggtttgccaccagttaggactagcacttaatccgaaagactggagactacagcgatcggaggttcccggagctggtacttcggaaaatgttcttctttcaaatgttcgctgtactgagcatgatattgacattacgcaatgccgagctgaaaaatcatcgcaaggagattttgagcattcctgcagtcatgagaatgatgttggtgtgagatgttatgaaggagcatgggcaggattacgttttggagtgttatctgagagagcagatcttcagtatgtaacgattgagaaagctggcctttttgattacatgactaacatgttcaaaccagcacttcaaatggacttgtcccgacataatttggatagcatccgagtcgtagaaaatttgcaggatgggttgggagtgatttactctgatatttatgccggatcggtgaatactatcaagaactcagaatttgcagcgaatcgtggaaatgggataagtatcaagcagctgggcttaaagattcatgggagcataatcaaagataacagaggatccggaatcaatcacgatgctgtaatatctgctcttgagcaacgagaaatcactagttggttcaatatggttccagatttcaacgttgatgattcagactatagaccaattatgcttccgaaggattctcaaaacatcgacatcgatcagtggcaggttaaacacataataaccctacccgttcacgatgagcccgttgaaaaaatgataactattcgttgccagccaggttatgtaataggcattcagctattgaaccctatcgaaaatagatctacggaaaatatttggatttatgattcgttagctggtagctcaaattctgatatttggcaagtaaaacgagatgtatcggtgttcccgcttactaccagtagctatggtgcaattctgcaatacaaaagtgggcacaatgctatcggaggtgcagttctagtcctgcggtccattcaagctccaatacaaaacatctacaatcgaatagttcgcggtccagtaccaactcttcaaatcacttcaacaaagattcaaagaaatttccgtggtatcactggtacttactacaatcgattcctgggagaacagagcgaactctatttgcgaaaagcgaatgaatcaatcaaattggtcaactgtgaaatcagtcataatcgagaggaagcaatgttcatcaactctcccttttgggacgtccacgaaagtaatatctcggaaataacgatccacgtgaacaacagtatgatccgagacaacggtagaggaatccgtcaattctccaaagacctgcgatcatccaataacctattccactacgttttgcaagatacaactgttgagagtaactcttttggaggactagagctcagcctgccctacgtttggcaatacaatgaaaatttcactcattcagtgttcttgggaaacgatacttgggttcggaatcgaaggtttggaatatcagacggacactatgcggtggtgaacatttcgtcaaacatattcatggataatgtttgtgcccatggattggttggattcaaaggaatggagaagaaaatgcgcattgataacaatcgaatcgttaaaaattccgggaaatatttgttggagttccgttcggatagtcagagtgaaattttaggcgagattccagcaattgtagcatttaatcatatcgagagtaacgagaaagtggtgtccacccggtccgaaatgaggaattttattcgaggtgatcgaggtaatgccaaagatcccacctgtgtgatcggattcggtggcgttcagaaggtgaaaatctatcgaaacgtgatttcgaacaacgagcaagattatgatttgatcgcgggaatcaaatctgcaaggctgaataatttcttggacgtacgagagaactggtgggggtcgcaagacgaagagcacatcaaaacacgaatcttcgactttgacgattggaacaatcatgctgaggcgcagtataagccatatctgattgaggatagcgtcgatggaagtgtttcggtggttcattccaaaaatagatctgttgacttggacaacttgggtggacgaatttttgaggatatatcaatattcaggagagatcaaccatatgtcgtcaaggcagatataactgttatgccaggagttacgatgaacatctatccaggtgtcgtaatggaatttgcacccaacgttggtattttggccttgggtacattgattgcccgtggtacacgcgatggagaaatcattatgaagcctattcaaagtgcttcggagaacttgaatcgtgttgaacgatcgttagagaatatggttaattacgactctatccgtctgtgcgcaaataggaactgttcaggaagtgaacaagagaacgacagaatccgagaaggcttcttggaatactataatcatactacgctccagtggatcccaatttgcgatcgtagatttactgaacgaaatgctcaggtagtttgtcgggagcttggttatgatccgcttgacgtcttcttcggtcacgatcgtcgaattgagttccatacaaattctcttactcgaatctggtcttgggttgagccaatggaatgccatggtgatgagctacgcttagaagaatgtcctgagagattaaacggtcagttgtacggacgtcgacacgaatgccagtgggattctgatttcgtgttcattagctgcaatggagaaccagaggagaggaactactggggaggagttcggtttgctaaccaggattttgaagccagtttgtacgagcatagaattcatgatgcaataactcattcgactgcgaagccggtagagagcgttatggaatttgttaaacttgatcgagcgggaatgttacacggagagaaatcgccagcgattcagaccatttccaaaaacccaagtataagcttcgtgtccgttaggaatagtgcgcaccatgctgtaaaccttgtatcaccaagtgatgctattcatttgaactacttatcggtctacaaggcattaggacaaggaataaatgcaatttcgttaaccggtgaaggacgcgaaagcgatgaatcgagttacaatcctttgaaagatttggatctaccatacaatctgttttcgatgattgacatatgtgatacgaacaaggagattacactggaagaacgagttctggtgtattacaaatatgacaataatccagttaattgtgtgaagatcttcaaaagtgcctatcgcgtaaaaccgcttggctttcgactgttgcagtcgaacctgttcaaccactccaaggaatacggtcgaagggatatgatacaactgatggatggtgatatctacaatgtatctgcgaggacgattggagttctcgaagctgattctgataatcagaagaagctattcagaactgttgaatctgcactgagcgttcgattgattgccagtggagcaccagcaaggcatgggttcatcgctgaagtggtaacgcttccaatttccgcaattggattcaatcgtgacgcacagcataacatttcgaattcggacattcaggagtgtgtcggtggaggattacattatgtgactgttggagaagtttctcctattctgacactggaaaggaacagattcatacgcaactgccgacagctttatggtaacttttcgtcgtgtgaggctaccattcgtgctgatgttcagaacatgcagtcattgcattttagaaataatcttgttcaagaaaatcagggaggtttatcgatacgagcagattcccgagggtccgctacgtcccttcgaggatggattcataacaatctatttgtaaaaaatcgaaaccgacctgcaatctatgtggaaggcagacagtcgtctccatatcaggaagttaccgttcataacaattacataactcaaaatgatgctgcattcaaggacgtggttgtgttgcgtcaggtggtttcaaacttcagctacaactatgtccacagtaacaagggtggtaggattattgaagtgtccggattcgatagagttcgccttccaatctatcagacgacttcacacaatggattttatgataatgttgcaacggattggagtggaagagcaactatagtggcagggacggcaggtcaacattatgtcgataatatttttgccaatccggagaatgactacgaaatgatcactgttaatcgttcaatcaccctggatgtttggaaaaccaaaatcgatgcaactctgaactactggagctacaacgaaacccttgccgttggatcccgtattcgcgatcgcttcgatgatcctcagctgctggaagtccaatacctaccactgcacatgaacaatcttacggtgctgaacggaaagtgcccacccggatggacgctactgatcgacacctgttacatgtacgtcggggcaccaatgagtttccgtgaagcgcgggacttctgccgatcggataacgcatcgctgccattcatccatggggactataatgcactgtggttcttcctggagcaacagtctcgttacctgcgatcggccgaaaaggtttgggttcaagatcccaactacatcgatcagtgcacttcgttcatctaccggaatgtggagattgaggaatgctatgagcggcatgcgttcctgtgtgaaatcgatcccaaggttgaaatcgatcctctcttctggaaagcggatgccgttgcaattggaatgatttctgcgttgataattgtgctaatgatgttgtgttgtctgtgtgtttgctgggtgtataaatctcggtatcgacaaacgcagagattgcagcgtaggaatagcattcggcaaagcttgcgcagtcttaacagcattgatccgcagggttcgattcgaagaaggaattttgtcgtctcacgctcaacggacacgctgaaatcggtcaccaccgggaccacagactacaaaaagatggcgtcaaatggttcgattgaatccgtagacaaaagcgtgctcagctcggagacaaattatgatatgtacgacaagcagcagtacagcaacgaatatacagagcaattgaagagccaaatgggttacactgatggcactacaagcgaggcagccgatttcatgcagcgccctaacgacagtccaccgcgtaccaaggtttacggtctaccggactatagttcccatggaggaagtaccgcttttgagcttgcatttagaaacgaaggattccgggacaactccactacttactcaggggttacccgaaacaattccatcaacacggccatcaacgaagacacacctatcattcatcaccagggcgataacgacgaaagtgggcccgatttctacggcaattcaagtactttaccgatgcggatcaaaggtgataatctatcattcctaaatgaactcaaaaatcgcctaccggagtacgaaccactgccttccaacggtcacagtagttttctgccagctcctccggagccaccctcggccaacgcatcccagctaagtgcaagtacactgccatacgatcagaagattgatcgccttaatttcagtgctcctcacgagtaccaacaaccgtcgattcaagttcgaaggccagaaccatcgacacccagcattgacgctcgggaaattcgacgccctgattcatacatgagggcggtcaaaaagtacgccactccaggacgggaacgggagtccataattcctccgccacgtgttgatagtaacggcagccgtagaccaaagactgtttatgaggcatcagctgaacaggaacctcaacgcgctccgcaacgtacaaactacgctcgctcccgttccgaagctctgctcgaaacaaacttcgacgaagcattgccaccaatgacggacatgctcagttcggatagccgcagctattctcaaccactagagactgctatgtaa

SEQ ID NO: 847 - DNA, 1053 bp, Aedes aegypti; identical to SEQ ID NO: 369

SEQ ID NO: 848 - DNA, 1211 bp, Aedes aegypti
agaccattcacagtagcgctagatgaaagattgtgattgcggctatcatgaggcatttgattattacagtagcttttgttctaatcagtgctttgctcattagcgccattcgagtaacttaccgatcatgtacagatgctcctgctcaatccggaatctactggatcagcatagcgaataatgccgcttcatttcaagtttactgtgaacaggagaaatttgctgggaattggttggtggtgcagagccgtaacgatgcttcaacaaacttcaatcgcagttggaatgaatacaaatttggatttggaaatctgaggaacaatttttggttgggtctggagaaactgcatcagctaaccagctcatccagttacgatctgatggtagtcatggagaactaccttgatttcatggcttttcaaaggtacgaaaacttcgcagtgaacgatgaatcggaggggtacagtttgagcttatcggataggaataccggaacagcaggtgattcattgcttatctataatggtgaaaagtttagtacttacgaccgggcgaacaacaaaggcaccgcgaattgtgctgcagagatgggagggggatattggcactacgattgtaggaagattttgagtacaaggagtaatttgaacggattgtacgatgtcgatcacatcatgaggaatggaagtggaatgtggtggggaatgtttggaggcaccggtaaacctctcaaaaggactagaatgatgatcaaactacgtgagtgaaacctgccaaaactacttacgagtgtcatggcaatgtgttatattttgttatacatctaagggattttgatgactacaatacaaagtttgaatttacagattaattagtcagtataccgtaacttaaacttgagctactgattctatagttggcagtcgtatttctctgttcctgaaactcgtctttctaatgtattgattctgagcaacataatgatcaatagcgcatgtaactgttcgccatgtataataagtcaaaacatttttgtgcgcaacgtaattgagcaggaagaatttctaacaattctccttcttcaatcaacgtatgcttgctaaacaatcatacttatcaccaagcattgcagaattcgttctcatttgatttagaagcacgatcaaaacaagcgaataaaaaaatatctcttctgtatcggttcataatcg

SEQ ID NO: 849 - DNA, 2070 bp, Aedes aegypti
atgacggaggccaacaacttacttgctcttctccaacgtcctctggagccaacatttcttccgaaagacgacggaaaaacggtcattgatgttccggatgatttcctaactgatcgttatcgtccgattggggctgagcttcagtctcgattctccagcgatgctgaacaacggattcccattcgaagcacggctccaccagatctctcctttgccgatggtatcgaccgtcgtggaccgttttctctttttatccctaaacatcgagaagcagctgctacgttgatcaccttgttcatgaatcagcctgatgtgcagacgttgatgagtgttgcaacctacagtcgagatcgtgtaaatcctgtgctgttccagtatgctctagctgttgccattcaacatcgcccggataccaaggacgtcaatatcccatcgatagtttcgctatttcctgatcagttcgtagatccagctgtttttcctaagttacgcgaagaaggttctgtcgttcagcgagctaataggatggtgatcgatatcccaccgaactacacagcttcagatcgcgaggaagaacaacggcttgcctacttccgagaagacattggtgttaatatgcaccactggcattggcatttggtgtatcctggagacggtcccgattcggttgtccgtaaggatcgtcggggagaactgttttactatatgcatagtcagttgattgctcgatacaatattgaacgtttctgcaatcgtcttgcacgagttaaaaatctctcaaatctgcgcgagccgattcccgaagcgtacttccccaagatgattcgcagctccaatgctcgatcctatccgggaagacacgccaacattacattgcaagacgttaatcgcgtagataacaatactaatgttcaggtgaatgatctggaacgttggcgcgaccgtatccttgaggctatcgatcaaggatttgtgttggacacgcaaggaaatagaattacattggatgaaactcgaggtattgatattctgggagatattgtggaagcttcaagcctatcgccaaaccagcgtctgtatggtagtcttcacaatatgggacataacgttattgcctacatccacgatccggattaccgctacctggaagattatggcgtgatgggtgatgtgaccactgcaatgcgtgatcccattttctaccgctggcatggattgatcgatcagatattccgacgcttcaaggactcgctcactccgtacacgtcatctgatctgacattcccgggagttaccgtcaactccgtcggagtgcagctgaatggtgccaacactccaccgaatgttctcttgacctactggcaacgatcacaggttaatttggcatcggggctggactttggaccggagggcaatgtgtttgcttcgtttactcatttgcaacacgccccatttgcattccgggtggagatcaacaacgataccggtgccgtgcgacgaggaaccttgagaatctggttggctccaaaagtggacgaacgaggaacaccgcttacgttccaagagcagcgaacgtactttgtggaaatggatacatctaccgtgacgttgaaccccggagtcaacactatcgtgcgtcgttcggatcaatccagcgtaacgatcccatacgaacgcaccttcagagccgtaggcaacaccactcagcccagtgatccgaatgcgttggctcagttccgattctgcggctgcggttggccccaacatatgctcatcccgaagggagccgctggcgatggcgttgagttcgatattttcgccatggtaacagactacaccatggatgctgtagatcaaacgtcggacacccttggaccgtgcgatgatgcacactcgttctgcggtttacgtgataagctgtaccccgaccgtcgagccatgggattccccttcgatcgcaaggttgaggcctcggtcgctacactacaggactttgttactcccaactccaacatgaggaccaactctcttagggtacggtacaccaacaaactgatcgcccgtgcttag

SEQ ID NO: 850 - DNA, 1308 bp, Aedes aegypti
atggtcgacaagaccaatcatctgggtttccggatactgtatctgcattcgaagggaaacaaaaacaatattgcattttcgccatgtgctctggccagtatattggtggcgttgtacgaaggcgccgatggaaaaagtgcatctgaaatacacgagaatctggtggtaccgtacgataaggatatcttgcgagtcggctatcgggacattcatcggcggttgaggagctatttctaccgtagggaaaatcttctcagtgggttgagtttgagcagtgaaaatataacgatacgacctgaatatgaatcgatcctcaaattctacggctacgatctggaaaacattccagaaatgaaaatgcagaccaccacccttgctccaacttcgccagattacatggagacgactactttcattaccgattatgatatgacctccagcgaagaggaacagtcaaccacggaatcgatcgcaactactttcgatttgagcatgggttctgcggaaccagacggagacggctccaccactaccgaatcggaacaacaatccgaagagactgaaactacaaccgtaactatagatgctaacgatgcggagaccactaccgcatcggaagacgaaaccactgaagaagaaacttcagaaactccagcagaagatgaacaaacggaggagcctactgaggaaccggctaccgaaggtggcgaaaaaagacgacgaaatcttcgtaaacgaggacaaaagcagagccaagtgcacagacgacaatctcaagccaactaccgaagaagaatgttgcgagctaggcgaagccctgaagagtttgacctggttagccatcaacggttcttgcaaaatttccttctacaggatgtaacaactgcctcaccatttgccgcattccccgctttctcagaacggtctaatcagttccagcaggatcggctattggacgacactatcgagcataacttctacctgagcgaaacggaaacggtcaaagtgccttataagatttacaacactatattgaagtacgcttacattgatcgacttcagtccacggtgcttgaactggaactagattccgatgactataagctgataatcatacttcccgattacgaattcggcatgagcaatcttatgaaactattgcaaaacggcgagaacgtaccaaatatgagagatatcgtaaaacagatggcaccttcgtgggtcaaaacgattgtaccaaagttcacgctaaaaggaaacatcattcttacaagcgacctgcaaaacgtaagtcggaatttcgtttga

SEQ ID NO: 851 - DNA, 1488 bp, Aedes aegypti
atgtgttgctgtaattgctccaacactgccaagaaggtttggtccttcatgggagtggtgctgatctttggcctggcagcgttcttcggctttgggttcccagcaatcgtcgattctgtggcgcgacaggaattcgtcatgaaacccggcacagaagtgtacgaaaactggatgaactctccagttcccatgttcatggacatctacttttgggattggacgaatcccaatgaaattaccaaccccgctgttcgacctaattttgtccaaaaaggaccatacgtcttcaaagaagttcatgaacgcatcaatgcctcattcaacaatgaccacaccatcactttcaagcaaaaacgaacctggcagtacgtcccggaacaatcgggtggagatttctacacagaccgagttacaacaccgcatacaattttgatgactgtaggaaagttagtcgcggaaatggacgaccctacgctaggggatcttgtgaatattattctcaacaataacgatcttgttgatggcatcacttacaaagacgttttggttagagacattcttttcgatggagcagaggatagactgttggcagctttacaaaatttgctagctcttctacctgaagtgccagaaggtgtggaattgccaccctgggatggattcggatactttattgaccgcaataccagtgcagagtacgacggcattttccgcatgaatactggcaccgattcgtggaccaacaccgggcagatgcgtacatggaacgatgaacctacggtcccgcactaccgaggcttgtgtggccaagttcgtggttcaacaggttcagtgaacgccccaatgaccagtgcccaaacaagagatccagatgactttgtgctattcattaccgacttgtgcaaagctataacgctaaagtatgatggtgattttgtgctaaacgacctcgaaggaaaggtttgggtgggagatgatcgagtgttcgacaatggccataacttcccagaaactgagtgccaatgtactgccccacaggatcagtgtccagtgttgaaaccaggattgctcgatgtatcgggatgcaaatttggtgcacctctcaaggtcagtttcccccacttctatctggcggatccgagttatttgaatgcagtgacagggctaagcccaatgccccaatcgcatcaattccgctacgctttgcatccattctccggtgttccaatgtccgtcaatggaaggttacagtacaacgtacatgtgaaggattatggattggatgctactcggggagttccagacgttatgttacctgctttctgggtggaacagagagttctccttactcaacaagtcattgatgatcttatgtacatcgatacgctacgatcagctgggcatatcacggcgtttgtgcttgtcggcgtaggagtaatcgcctttggcgtggcgctctacttctctatcttcgtgtggaaaaactag

SEQ ID NO: 852 - DNA, 1399 bp, Aedes aegypti
cttttcctactcgggttgtccatgtcttatcgcgtaacgcttgatcatcagtagctgtctaacataataaacactttcttatcaagtgtgttgggaatgataatatagcatctgttttctgtgagttggctgtatggtttgcaactaatttctcatagtattcatcagactgttccaattgtgatcagaaatgtcttttaaaatgataatctttattcccttggcagtgatatgtaatgcacaaatgttctatggtgtaatcgtggaagcagtccctgaagtcagcagcaatgattgtggtggcattggatgtaacttattgttccggaagctccaattactggagaacgagttcagagcagtgaacgcagacatgaaaaatctcatagaaagaacgtacaaacagattttggagcgtttagataaactcgaaacaacgatcacgcatcgcttggaaagatttgaaaatgaaaggatcaatcaagaggactttcgctgcaaaaaacaaccaaatcgaaataaagtgagtgatgtaacacaggaaattgaaaaatcaatcagtcaattgcagcaaacagtagaaatcaacttctctacaatgaaaagcgatcttaaactgatcaagaccctggttcccgacaaatcttgcaagcatctagtgtcatcaaaatccggaaaattttggctaagaccattcagcaacgaaaacacgatcgaagtgtattgcgaacaggaaaagttcggtggaggttggttggtgtttcagcgtcgctttgacggatcggtggatttcttccgcaactggacacattacaagaacggattcggaacagtggacggtgaattttggcttgggttggaactattgcaccgactaaccagtgatagaagattcgagctgattgtggagctggaagcgaacaattcgaccgtcaaatttgcgaggtatgatgattttgcgataggcagtgaggaggaaatgttcgctttgaaaaagcttggaagctttttcggaactgctcgtgatgctttggattttcacagaggcatgaagttttccacaatggacagagcgaatgggaactgttcttataattatgcaaaaggctgcatgagtgcttggtggtatggctgtggctatacaagtgatctgaaccaaccttacgttttgacgaaaagaaacattatacactgggctggattttcttttaaggaaggactaaaatcaactacaatgatgatacgagaaatttaggcctacatctatcacaacgcgaataaaactagaactagaagtcgagtctagtacacgacactgaagacggcattacagttgagttcgatacacgcgaatttatcaaaggatacacattatagtggaattaaatggtacagtact

SEQ ID NO: 853 - DNA, 465 bp, Aedes aegypti
atggctctttcattatatctaatcgctgttatctgttcgttggtcggcttcacagcctctcagcagacatgcgacaacgacaacagattctgcttcccaaatgttgtggcgaactggatcggagcggccgagtactgtagccgaaacggatggcgattggccgttctggactcggagcagaaacagcaacaggtggaggaattggcccaacgagtggacgcattcaaaacggctaaagtggaactgtggatcggagcaagcgatttggccagggaaggcaagttcatgtggcacccgacggggctggacgtgtcctactcgaagtggatcgccggaatgccggacaacaaagacggttacgaacactgcgtccatctgtggtacgaaccgtcgcggcttatcaactggcactggaatgacgtggtgtgcgcttcgatgcgtcgctttgtgtgcgaacaggcgtaa

SEQ ID NO: 854 - DNA, 2247 bp, Aedes aegypti
atgctgggaaagttaacagcgctcatatccacgttggtcgtggtccattcacaatttctggccttcgagcagcatggacaggagtgcgcactctacgtcagcggccccggcaaatcgtccgccttcgactacaacctgaatctgttccgaggcacgccatcaccgctgcacgcggagcaaacgtcttgcatcacatacgatgccatcaatcaagcctacttggatgctcgcaagcgcatccgcgtttcgcaacccaagggagactggaaaaccgaagatatcgccaccgtcggcgagctgctgttggacatctccatccaactcgccagaacatatggcctctcctacgaggagattgagaagggtctcccgtcgatcgacacctccaagactctgatccgcgaggtttgcccggctttcctggctggagtcgagtgccgtcccggcaagtaccgtcgcgtcgatggtctgtgtaacaacctgaaacaccccacgtggggagctgccatgactcctttccagcgtctgatcggcccactgtacgccgacggaatcaacgctcccaggatctccgtaactggacatgaactgccgttgtcccgtgtcgtatcgcgcaccatccatcctgatgagggctaccatgatcacgccggaaccgtattcgtcatcgcatggggacagttcatggatcacgatttcaccctgaccggaaccccactggaccccatcaaccgtaacgatccagaagaatgctgcaagcgtccacctcacctcaagcatccgtactgtaacgaaatccgcatcccagatgatgactacttctaccgcctgttcaacgtcaagtgtatcgacttcgttcgaggcttcccgtctcctcgcgccggatgccgcctgggatcgcgtcaacagttcaacactctcacctcagtcatcgacggaaacaccatctacggagtcaacgagaaattcacccgcaaattgcgtaccggctacaacggcctcctccgcatgaaccccgtcttcgccgagtacggcctcaaggacctcctcccactgaagttggacattccagatgagggctgcactcgtcccaacaagagcatgttctgctttgaagccggcgagatccgagtcaacgaacagctggtcctgacctgcatgcacacccttctggctcgtgaacacaatcgtatcgctacggagctgggacgcatcaacccgcactgggacgacgaaactctcttccaggaatctcgtcgcatcaacatcggtatcatccagcacatcacctacaacgagttcttgcccattctgctcggcaaagaagtgatggagaagttcggtctgctaccactgaaggaaggatactgggatggatacgatgagaacatcaacccggccatcatcgacgctttctccgccgctgccttccgatttggccactcgctgctgccgacggccatcgaacgttggtccaaggctcacaagttcatcgcctccaagcgattgtccgatctgattcgtcgcccgtacgatctgtaccgtgccggagtctacgacgagtacctgatgggtctgatgaaccaggttgcccaggctatggacgactcgatcacccaggaggtcaccaaccatctgttcaagaaggagggcgcccgtttcggtatggatctggtatcgttcaacatgcagcgcggtcgcgaattcggcgtccccggatacatggagttcagaaagttctgcggactgcccacggccgataccttccaagaactgttcggatcgatgccgaatgagaccgttcggcggtacgagagcatcttcgaacacccttcggacgtggatctgtggtcgggcggtgtgtccgaacgatctctgccaggatcgatgttgggaccgaccttcgcctgtatcattgcgacccagttcagctacgtccgccgtggcgatcggttctggtacgagctgccgaaccaaccgtcgtccttcacgcccgaacagctgcaggagatccgcaaggccaagctggcgcggctcatctgcgacaacaccgatctgatcgatacggtgcaaatctacccgatggtgttgcccgatcatgaaatcaatccaagagtgccatgcaagagtggaatccttccatcgatcgacttgaccaagtgggccgattacggtcacgaatctcactcacctcatcaatatcaattcctaaacgaattacctgagaacgtcggcttcaagaaataa

SEQ ID NO: 855 - DNA, 1254 bp, Aedes aegypti
atgaacctctggatcattggattttgttcaatatattttgcatgttctgtaagatctcaattcacgtcggttcctgtaagttatgacgctcagaacgatcataacgagttctcatggaatgcattcaagaaggtattcaccgattacaaggaaaacttcgtcatgtcgccgtattcgcttcgtcggctgttttcgtgcttccaaggtgtgaaacttcttacctctgcatctggtacaaacctccagcaggagctgagcaatgtgttgaaaattgcaccaaaccagcagccatcgggccaagatcatagaccttacgttgaacagtgggtacggtactccagtgccaagtacctcaacaggacggcaatggcagtggccatcggaagcgaaaaagtctcaactgtatatgaaagcattattaacaactgtgtgatctacaccggacatcttcagccatccaatgcccaacgtatgggacaagtgatcaatgatgcactgaagaacatcaccaataacgcggtgcagagctacttgaccgatacggacatcaatccgaactggaagttcttcgcgatcgactcgtggcagttcgaaggattgtggaagtataaatttcaggaagagttttcagcaacctgctatttctatgcaagtaaggagaagaaaggactcaccaagttcctgtacttggaggaaatgttgaagtatggaaacttccctgaatggaacgtccaagctgtcgaccttccgtatcatgatcaaagtccgctgtcttgccttcttgtgatgcctttagatggaaattatgaatctctgatcaactccatgaaccagtcccgttttaaagatgtgctgtccaagttgaaagaaaccaaaactacagttcgtatacctcagttcggattgcagactacggttcccggaagacaactactcgaatctatgggaatgaaggtaccgttcaaccagggtgtgttcaaagtgtttgaacagggccaggatgttgcactgggagaaatagttcagaagatggaaatgagtatagcagccgatggagaaaaacaggctcaatcgtttgtggacaaacgacaggacaagcaatttacggctcatcaaccgtttctgtttgtggtatacgatcggaatgagctggtaccgattttggtcggattctacctgaagacgccaccggaagcggcaatgggactggaagataagcagaagtgcgatgatccaccggttggttatcagtag

SEQ ID NO: 856 - DNA, 4032 bp, Aedes aegypti
atgcgtccctcaccggctttgttgtcggtcctgtttggcaccattttcggtgtctttggtgcatcgctgagtaaatcactcctttcgcaagctcccgacgaatgccggtggtccggttacagtgaagacgatctaacgctcgtgtgtagactaagaactattaacagtgagctggagaataccaattttagtgtactgcatcctgaaaacaccgtccgacttcggttacagtgtaacgatggactgtttttccaatccagcatcagccctggcagcttccgacagctgtccgaactgcgatcgctctcaattgagtattgcaaaatagcgaatctcagcgatggatcctttcgaggtcttaaggagcttatgaacttgacacttcggacgcacaacaccgattggtcatcggttagtctggagatcgcgccgcatgtcttcaactctgagctgtcgaagctcgaacagcttgatctaagtcagaacaacatgtggtccatacctgatggcatgatttgtccactgacaaagctgcaatatctgaacctgacacagaataggctgcgagatttgtcagtgttccattttagtgcttctttgagcacgcggctctccaagaaatgtggaggctcaataacgattctcgatctatcacacaataacatcgacaatctgccaccagccatcttttccggtcttgggaaactgactgaactgcgcctgcagaacaacggcctcaacttcattgccgatcgcgctttggaaggcctcctctcgctctccaaactcgacatttctctaaaccggctatccaaccttcctccagagctcttctccgaagccaaacacatcaaggaaatctatctgcaaaacaacagcatcaacgttctggcccctggaatcttcagtgaactccaacagctcctcgttcttgatatctccaacaacgaacttacctccgagtggatcaatccagctaccttcaagggtctttcccggctgatactcctcgacttggccaacaacaaaatttccaaacttgaaccatccatcttccgggacctgttcagtcttcaaatcctacgactccaggacaacttcatcgaaaccatccacgaaggcaccttttctgaactaaccgcactacataccttggtcatttcaaacaatcgcctttcgaacattgagtacttctccttccaaggcttgagccgtctgaccctcctatcgctggactacaatcggatatcacggattgatcgggtagctttccggaacttatccacgctacacgatctgcacctgaatggtaacaagctgttgcaagtcccggatgcactgtacgatgtcccactgctgagaaccctagatctgggtgagaaccacatcagcaatatagacaacgcgagcttcaaggagatgtttcacatgtacggtttgaggttgaccgagaacaacgttgaaacgattcggaagggtacgttcgatgcgatgaagtcactgcagattctgaacttgtccaaaaatcgactgaagaaggttgatgcggcgtgcttcgataacaacaccaatctgcaggcgatccgtttggatgggaactatctgacggatatttcggggttgttcacgaaacttccgaatctggtttggttgaacatttccgataaccatctggaggtgtttgattatgcgttgataccgacagggctgcagtggttggatattcatgcgaacaagatcgccgagctggggaattactttgagatcgagagccagctggcgttgagtacgatcgatgcaagttcgaaccagctgacggagattacgggcagtgccattccgaatagtgtggagttgctgtatttgaatgataacttgatatcgaaggtgcagtcgtacacgttcttcaagaagccgaatttgacacgggtggatctgtttgggaataagataactacgttggatccgaatgcgttgcggatttcggcggtgccagacgacagggcgttgccagagttttacatcggaggaaatccgtatcagtgcgattgcaatttgaactggctgcagaagaacaatgtggactcgagaacgcagccaaagctgatggatttggatagcatctactgtaagctgttgtacaatcgagggaggacgtatgtgccgctggtggaggcattgccgaatcagtttttgtgcaagtacgagacgcactgctttgcactgtgccattgctgtgatttctatgcgtgcgattgcaagatggagtgcccggcgaggtgcacgtgttatcacgatcagagttggacgtcgaatgtggtggattgttcacgagcagggtatgaggagcaactgcccgagcagatcccaatggactcgacgcaaatctatttggatggaaacaatttccggacgttgagtagccatgcatttttgggacgaaagaagttgaaggtgctgtttttgaacaacagcaatgtggagatgattagcaatcggacgttctacgggctgaaggaattggagattttgcagttggatcacaatcagattacgggattgaatggatttgagtttgtcgggttggatcggctgaaggagttgctgttacagttcaataagatatcaacgatcgcgaatcatagctttgatcatttgcccaacttgagggttttgaggctggatcataataggatcgtggagtttaacatgtggcacttgccgaaacagttgacggatttgcggctggcatccaatccatggtcctgcgattgcgagtatgtggagaagttccgcgagtatttgaaaacgtacgactttgtgagggataaggtgaaggtacgttgttcagcaacgatcacatcgggaaatgacacggccatgattgttggaggagcggtaaatgggtctgcaacgggggcttctgctgttattccgaagggagtcccggatggcagtggggagtcgaatggggttggagttggtggattcttgatttatttggacaacagtacgacactgtgcagcggagcggtgccactcgataacatcatcaacggaaacttgacgtcgcgcaagactgtgctatcgcctccaccgatcgaaggttatatcccgctgctggtggctgcgctctgtggtttcacggtgatcatcatcatgacgctgattatgttcgtatttcggcaggagatgcgtgtttggtttcattctcggttcggagtgcggctgttttaccggaatgccgatatggacaagaacgagagagataagctgttcgatgcttttgtgtcgtacagctcgaaagatgaagcatttgttgcggaagaattggcacccatgttggagaatggtgacccttcgtacaaactgtgcttgcattatcgggattttcccgtgggtgcgtacatagccgatacgatcgtccaggcagtggagtcatcccggaggacgatcatggtcttatcggagaatttcatcaaatccgagtggtgtaggttcgagttcaaatctgcgcaccaccaagtgctgcgagatcgacgaaggaggctgattgtgatcttgctcggagaggttcctcaaaaggacctggatccggacattcggttatacctgaaaaccaacacctaccttcagtggggtgacaagctgttttgggaaaaacttcgattcgcgctaccggacgtgccaaacaaccaaaggcgtcggcagcagcaatcgatcaatatgactcattccaactttcgaaacaactaccagctcactcgaacgccaaataataggaataacaccagtaaccaattgatcatgctccaacagcagccaccacaaccagaccccagactgcggcaacagcagcagcaagagcattcttctcttcagcagcaaccacttccgctgcctggacttgcgcagcaaccgcaaccaccacaactgttgcaacatcaacgccagcaacagcagcagcaacaggagcagcagcagcggggtgccggcaatgcctcgccccgaacagtggggatccacatatga

SEQ ID NO: 857 - DNA, 453 bp, Aedes aegypti
atgcagttcaaaatcgttcctcgtgcagttattgttcagttcctgttggcggctgcgttggtggactccggaagacttccgctgaacaagtacatcatgatggatttccaggtatcgttcttcgaagcgtggcgaagctgtcagttctacggactccaactggcttctgtaacatccacggaagataatcgggagttgagcgagctgtttaacatgtcgaaccgcggcaatgacacattttggctcgccggaacggacataggtcgcgaaggtaaatggatctggattacgacgaacaagctggtcgttcagtacagtcactggggcagcattagtccggagtttcatgagtcgcagaactgcatggcgatcggatcgttcgacaacgacagaacactatgggatgacattccttgcgacgagccccgcaagtacatttgtcagaaggtttga

SEQ ID NO: 858 - DNA, 3924 bp, Aedes aegypti
atgtctgttgccgcagctctggtagatggacgtaacaactttcttcgtcacgatgatgcgttaccgaaaggatgcacctggaccggtgcggtattggaagtttcgcaggagaaaagatctgatgagctgcagtgcaaaatcaaaaccataaccaagaccgagagtctgctagctaatataagtagttatcaaattgataggataaaatcgctcaaattagagtgtaacgacataatgttcttcgaaagttccttagaatcgactactacgcctggaaactttctaggcaatttaaacagtctgctgaaattgtcgatagagtactgtaaaattaagtacatcccagcgacagcgttttcgaatatgaaaacactgaaaagtttatcactgagcacacacaatattgactggtctgttatgaacctagagctacatccggatagcttccgaggattaaccgagcttaaggagatgcaccttgcggataacaacatctggagtctaccaaatgaggtattctgtcctctttacaccttgcgggtgttaaaccttaccggaaacagactgagtgatatttctcagctgtcactgtcagattggggcaaaggtccaattgcacctggcaaagcttgcaacacaggactagaggtgctagatctgtcaggaaacgacattacgctcatgcccgacaacggtctctcagcattgagatcacttaatgcactttacttgcaagagaatcttctaaaagaaatcgctgaccgagcttttgtgggtcttggaacacttgaaatccttaacctctccaacaataagctaaccgcattaacgccagaattgtttcaatcatctcgcaagattcgtcaagttaatctacaaaataattcgctttcggtgttggcacccggagttttcgaaggactagaccggctcgaaatgcttgacctgtcgcgcaatcagctgacctcgacttgggtcaaacgagacacattcgccggtcaagtgcgcctggtggtattgaacctcggctataaccacctcactaaagtggaccagcatgtgtttaaagggctgtacagtttgcagattctgaacttggagcacaatgccatagaactgattgccgacggggcgttcagtgatctgaaaaatttacatgccctattcctctcgcacaaccgtttgcgacagatcgaaccgtaccatttcagcgagttgtacgttctgaatcagctgatattagaatcgaaccagattgcatacattcacgagcgtgccttcgagaacttaacccatctacatgatttaagtctaaacgataataggctggaagagataccgtccggtatgaagagtttgaagtttctgcagtcgttagatttgggtaaaaatcaaatatctgaaataaataactcatcctttgaaggattggaagagcttatcgggctacggttagttgataatcagataacagaaatttcaagggacactttctttgcactatcaacaattcacgtgctgaatttggcaagcaatcggatacgacacgtagaccagtcggccttcagttcgaatccaacgcttagagccatcaggttggataacaatgaactggaggatgtagcaggagtgttcacctccctcacgtcgcttgtttatttaaacatctcggataacaacattggttggtttgactattcgcactatccgcagtcgctcgagtggttggacatccacaagaacaatatatcagagctgggcaatcggtacgacgttggtaattggttccagctgaaaatgttggatgtttctcacaatcgtataaagtacatcaattcaagctcgtttccgaaaaatatcgaaaccttgctgttgaacaacaatctaatcgaggaaattgccccggagacatttaccagcaaggagagcattgtgaaggtggttctttatggaaatcacttgcgtcggctggaaatgtcatcactggcactgacactggtccctgatacgcgaactatgcctgagttttatattggagataatttaatccactgtgattgcagcatggaatggttacagcgcatcaacgagctgagttaccttcgtcaatatccacaggtgaaggatcttgattcggtgatgtgtacaatggagcacgagcgcggtgagttagtcaggcccctgatggaaatgaaggccagtgagtttctgtgtaaatacgagagccattgtttcgcaacgtgccactgctgcgattttgatgcgtgcgattgcaaaatgacgtgtccagaccggtgcaattgctatcacgacacagcatgggagtccaatatcgtagactgcggcagtgtgggattaaattcgattccggttaaaatcccaatggatgctacggacatttatttggatgggaataatttcggtcagctggagagtcacgttttcatcggcaagaaaaagctaaagtcactgtatctgaacaatagccacatcgatggcctgaataataaaacgtttggcggaattccggcactcagtgtgctgcacctggaacacaatgggctggaaagtatcagtggagccgaattcgagcagctgcgtgaattgaaggaactgttcctggatcacaattccatcagtgccatcggtaacaaatcgttctattatcagaaatcattggaagtgcttacgataagtgacaataaaatcagtgaattgaagccctgggaactgatgccactgggcggtaggttccggctaatctcgctaagtggtaataaactggcctgtgcatgtgaatcgatgggtaaactagtggactgggccgagcgacagtttaacgaaacgaacggactaagtgaatttcagtgttcgaataataaattactaaaggacgcgattaaggagtgtgagagccacaagagtgctccgattgcgacacctaccgtgcagcggacgattatcgataatgattttatagactatttgccactgttgattgccgtgctagccggactagtgctgacgattctcctggtgacgctggtgttcatcttccggaacgatgtgtgtctgtgggcgcattctcggtacggagtaaggatctgtaaggatccgctaaatgcgatggagcgatgcgaggatagtgagaagctttacgatggatatcttgtttatagtgctgccgatgctgatatggtcactagtcaaattgcacaagaattggagcataatggttacgcactttgcctgcactatcgggatatacactcggcagcctttctggcggattcactacaaggcgctgccgacgcatcccgcaagttaattctatttataagtgtgaaatttatgcaacttgaatggtctcaaccagagttccgagccggattgcaagcggtgctagagctaatccgaccatcccgacggaaacagaagcttatcctcattacttcggtgccccaatcgatgctcacgatggatcccataatggatatcctcacgcgaacctgcaccgttatctcgtgggacgatcgtcgattctgggacaagctccgttttgccatgccggacattggcaaaaattcccctgtaaataaagcccctcatcgcaaagccattaacatccggtatactccggctccaacaaatcctaccgcaccgacggccacctggccaaaacgtctgaactctgaagtatgcgtacagtatccaccgcagtcggctcattcccccaaccacagtacttacaacaccgaggatgaactttcgactgcttcctcgccacagtacgaagccccaacgcttcaccacgcatccaacaacaccaacaccctgggccacgtgtactccaccattccggagtcgcagtacaacacccatcactccaatcgcagcgatagcaatcgaccgtactttgtgtaa

SEQ ID NO: 859 - DNA, 1161 bp, Aedes aegypti
atgaaatttgttttaataatcggctgccttttggcagtggcactagccgaggaaagtgccccgaagtgtgtagcgtcgcctacaacagctagcggcagtcaagcccgcgctggcccgtactgttcgggagatctgatcttcgaagataactttaactttttggacttcgagaagtgggaacatgaaaatactctcgctggtggtggtaactgggaattccaatggtataccaacaaccgtgcgaattcttactgcgaaaatggtatcttctatatccgtcctacattggttgctgacgatactggtgaaggtttcttgagcagtggaactttgaacctccatggaggtcaaccggctgatcagtgcactggtccattcttctggggttgtgaacgtgctggcaatcccagcaatatcataaatccaatcaaaagcgctcgagtacgaactgtggattcgttcaacttcaagtatggtcgtatggaagtcagagctaaggtaccaactggtgattggctttggccagctctttggctgttgccgaaacgacaggtctatggatcgtggcctgcctctggtgaaatcgatttgatggaatcacgtggtaacattgactaccgtaatggaggagtacacattggtgttgaacaggttggttcaactttgcactttggacctaatccggatcaaaatggttgggctactactgttgcatacagaaattccgctgccggccaaggtttcaacaacggcttccatttgtaccaactcgagtggaccccagatcatattacatttagcgtagataaccaggtgcttcgacgcaatgatgctggttctggattctgggctaagggtggttttgttactacttcaccggcttccgagaacccatggatgcatgctactacaatggctccgtttgatcaagaattctacatcatcatgaatttggccatcggaggaaccaacggttacttccccgatgttccgccagcaaccaatggcgctcgtggtaagccctgggcaaacacttcaccaactgcggcacgtgatttctggaatggcaggaattattggctcccgacctggcgcatggcggaaaatagaggaaaggaatcatcgttccaggtagactacgtgcgagtatgggctttgtag

SEQ ID NO: 860 - DNA, 1308 bp, Aedes aegypti
atggtcaattctacgcccgtcgaagtttctctaaacgaatgcgtagatttgagcaaagtaccattaggtgcattgaattacaaaacgtatgaactgctgtcggcattgctaaatagaaagaaaatatttaaatcagaggacggctattatcgtgattggcgagggttgtttcaagtactcaaattggataactatctggtagcagagctggaaaaccataacaatccaacgaaaagagttttggatctttgggagaactcattgaaaggagctaatcttaaggaccttcaaaatgtgcttggcttaatcgacagatgggatgttttggacgatagcaataagttattttatgacgacgcagaaaagtttctttccaaaaccgctaaacaggtcagtacagatcaattagaggaaacgagcattggagcggatgaagacattattacaaaagatgatactcgacaaaataagcagttttacgatgcgttcattttgtttgctgatgctgacattgaatttgctacaaaaatcatggagcgcatggaggagagaaaattgaagatttgtataaaggatcgagatcttcttgccggtattacttttgagcacgaagctatcattaagctgatttctgagcggtgccggcgattggtggttgttatttccagagaattcttgaaaagtccgttgaacaatttctttgttatgtacgctcaagccttgcaaattgaacaaaagaaacgtaaaattattccttgcgtgtacgagcgattggagcttcctgcaaacctaaagttttatttcattttggactacaagcgctcgaacaagctgtacaatttttgggacaagctggaagatgccataaaagttcgaacagattccccggtgactgaaattaagaatcaatcaaaagcaatagaaactgtaagcattccaaaaataacagttgaagatgcaaacgaatcatcggcagataaagttgatcgaacgcaaaccaaaccagaacaactcacaactggtacatcccattcagtttctcagcccatcaagaaatcactatcatcgtgggatgttagcaatgcgctcaaccgtgtactaacaagtaagtctaagaatgcatcttcgagtacatcagaacttccaaccggtgccgagaacagtgatcaggaattgaaaaaagtaaagtggtattccaagctgggtttatcgtccagtaagtccagcttggatggcaccggcgaaaaatctgagaagaaaaagacgaagtggtacaaaacaagcaaaaagattgcaactgctatgtga

SEQ ID NO: 861 - DNA, 1719 bp, Aedes aegypti
atgacggaaatcaagtctactatcaaggagcagaacgcgactcagcagcatggcacttctgatatggttcatagtaacagtgctcatcagaacaattcgtcggcaacttcaaattctaaaaagcatctaaaaaagcaaacaagtgcactggataatatagcattccacctagggattaaaaaggcagataatgatcacatcgatgatcgcaatctttttgttactttactgctattaggtgttttagtcattctttttattgccagtgtgactggttttttcgttatgtggttcactgatatatatgacaattctttattggagaacctaaaactgagccacaaatcaacagcagctgaatggtgggagaaaccaccagtaaacccactgctaaaggtacacatattcaactataccaacatggatgattttttcagtggaaaggccgacaaactcaaagtagtggatttaggtccttatgtgtaccacgaaactgcggaaaaagtgaatgtttcatatcatggaaatggtaccataacctataaggagctgcgatcttaccaatttctggccaatcaatcaagtggaatgcagtacgacaaggtcgttgtgccaaatataccaatgataacagcaatttcacaaagcgccgatgaatctttgtttaaaaaaatggtgttgaataccgctctctctggcgttgatgcaaaagccttcaaagtcttacctgtagatccatttctatggggatatgaagatgatctattgaacctagcaaaaaagttttcattcgacaatgaaatatcattttctaaatttggtatacttatgacgcgaaatgggacaagtgctgaaacatttacgatatattctggtgaaaatgacctaaagcagctggcgattattaaggatttgaatggaaaatcttcactagatatatggacaaccgacgaatgcaatcgagtagatggcacagatggatcacaatttcctcctcatctgatggataagcgacaaactctatatgtttttattaaatcattgtgtcgcaaatttccgctgcgatatgaaaaagaagtgaccttatttgatggaatacctgcatggcgttataaagcaccaaccgatgtctttgctcatcccagtattaatgcagacaatcagtgcttctgccatttgggttctgcttcttgtccattaagtggtttattgaatgcaactctgtgttcttatggagctccaatttatgcatcttttccacatttctatactggtgatagaaagctacttgaaatggtggaaggtttggatcctcagagagagaagcacgaaacatttgccgacattcatcctagactagcatttccaatagatggtgcttcccggtttcaaataaatattcaggtgaaaaaaacatcatacatttcaggtttagagccattcaatgatggacaaattttaccagtcatttggcttgaagtggtacctggtcacatatctgaggaactgcggaacatgatttatcacagtacattcagtgcgaatgcgatacaattctcgttcaagtatggatctttacttatctgtgtgacaacatttgcacttctagccatgacatgctatttccgtacgaaaaatgcagatgatactaactctgaaaagcctgaagatcagcctactgtgaaacttaactcaatgaacagcgaaataaggtcttag

SEQ ID NO: 862 - DNA, 6050 bp, Aedes aegypti
gtttcagattttttcccaacccgatggttaacactgttgcattagtactttggaaaatcgtagctatagtcacaatatttcttgcgttctgaacttattttgtttacttttgacggttaagcttcacagaaaaaaacaacagttgttttatacgaaaatttggaaaaaaaaatttggataaaattgtaaggtacaaaaccaatacaaaacagtacagttttctgttacataatatcaaattgtgcttgatttgtatttacacacaagaataatgttgcttacgcattcgattacaatacgttgtattgtatctaatgaagacattgtattgtacactaatggtttattccattcactgaatggtacgtttttacccgggtaggcccatctactttttcaaaaacgttttgacatttcttattctatgtcagtatcttgaatggcattcaaagggattcgattatctggtgtgtcgattctgtgtttttggactatttccatgtttcgaataataattattgatgtttgcatttgagatgcaaatgttgagtaaacgtcctcgaaatgcgcatcatttaaaagcgtgtgatgtcatgaattaagcgtcagtgaggtgtaggatttttgagaagatgtgtcctttactgattgccacattatacttcatacttcagtacactgcacctgcaaattcaagcgaagtgggccactacatcatattggtacctactgtaatccatgaccactccaaggtgtcgatcggcctgtctactgtaggttatgaggagaacaagcaatttcaagtgatactgaaaaaggagcagtatgatgataaagaaggagaagttgtaaatgagaaacatcgtcaaagtagtgatacgcgactagttcaatttacggtttcatcacttgataatgaaccttatcagtttttaatacacgatcccgatggaagtgttcagacaactcatgtggaagtctcaaaacgaccagtttttatttttatacagaccgataaacctctgtacaagccaggagacacggtcaaattccgtgtgctagttcttaatcatttgacgcgacccatcgactctttgaaagttatcaatgttcagctcaaggatagcaacagcgatctaataagacaatggcattatgcacgactccaaaagggagtatttcaatcgcagatagatctcgcaaatttcgtacctctcggtaactggacgctcaaagtttcggcactaaatggtattgaagaaacgaaaacgtttaacgtagctgaatatgttcttccactacacgaaatacatattactgcctcgaaacaagtccaaatgaatgacgaaatactgaagctgattatagatgcaaaatatacatttggcaaaccaatcataggttatgtgactttagctttcaacgaacttaattaccctgacatgtatgagattaatggacgagctgtgattagcattcccttgagtgatatagttgacacggatgttggcgatgatgtgtaccaccttaatgtccaggtcaaaattgaagaagatgaatccgaacaaatctacgaagcaagtgaaacaattccaatccacaaaagatcttataaaataacgctacggaaatcttcagaatatctgctagaagaagaatcaatatggtgttggctaacgataactaatcctgatggtatgcctctaacgaatcggaacgtgatgacagtgaaggtcactgagatgttaggatcccggtccaacaagcattacagttttcaaaaggaaccagatgatgagggtgttgtaagcctgaaaatagattcgtcaaatacgaccgatcgactcgagttggaagtcacgtatgaaggggaaactactaaatttgaaattctacacggatcagataataataacacgcgcaacgattttatcaaagcttccctgcttgttcagaaacccatgttgaaacatccagttgaagttttagtgcaaagttcgtttcgtatgaatctagttatatactacgtgatatcacaaggagaaatattggccagtgggaggatttccgtgaactttaaacgaactgcaacttttagttatttagctaccttccccatggtaccggaagccagtctagtcgtttttactataaacgatgcaatgttgtggaaagacattgttagattcaaagtgcatgaattggacaatttcgttgacatagaaatatccagcaacagcgcagagccacgtgcccaaatttttttggaggtaaaatcgaatccagggtcaacgataggtctgctggcagtcgacagaagtttgctccaactcggtactgggaatgacatcactcaacagattgtgcttgaaaagctcggtaaaccaaagattgatgaagatgttgaactggagcgtttaggttttaccgtattgacaaatgcaaaaagccatttcatggcgagcccgctgggaagctcacctcacctgctgacccaacggtttggtgatgatgaagagcttcacttaggccaagatatgcaagcagaccatggaactcgtattcttcgaaagaattttcctgagacctggctttggacggaaatgatagaagtggatgacaagggacacgtggatatcacagacatcataccagacaccatgaccagttggtcaatcagtgcctttgcaatcaacacgaatcatgggctgggagtagtaaaaaatccggttgctttaactgtgcttaaacccttcttcgtcaccgttaatctaccgtattcaattgtaaaaacggaacaagcagtcgttgaagtattcgtacataattatttgaaccaagctcagcacgtcacggtacgagtacagaacgcacaaaaagatttcattcattcggacctggaagtttcaaaaacagttttcgcaccgagtaacagcgttaaaacagtgacatttgcattgaaacctaagcgatctgggaaccttacagttacaatattagccgattgctccttagcgacagatgccatacaacgtaacctccgagtgacgcctggtggattgcaatactttgaaaattctgcacgattcattgaagttcagaactcatcgatgtcgttcgatcctatcaagttggtaataccgagaactgcaacgtatggatcggtatcaattactttctcagtcgagggatttttgctaggagcagctctgactaatctcgatcatataattcgattgccatctggctgtggtgaacagaacatgctcaatttggtgccaagtgtgattgctttggaatacatggacaacactgacacactgacctacggtatcaaagccaaagccatcgattatctgcagaaaggctaccagaatcaactcaagtacaagctaagagatggatcctttagcgtctttggtcaatctgacggtcgcggaagtgtatttttgactgcactagtagcgaaagtattcacattcgctaaaagacatataacaatcgacaattatgttatagagaaggcctttaattggcttcgggaaaggcaattaagtgatggacgcttcgtagaatctggacgaatatactacaaagagttacaaagtggtgtgcaagatggcacaacattgacggcttacactttaatagcctttctggaacataaatcacttactcagaaatacttgtcagttgtaaataaaggcacagaatacattgccaaaacgtacagatttgatggaaatccatatagtcttgctttaattgcatacgtactccagcttgcaggtcatccaagaaaacattattttttcgataagcttgtagagctctcaaagattaatgaggatagaactatgcgttggtggggaagtgggtccaccagtatcgagaccacggcttatgtcctgctgacctacatgagtagaggatcgtacattgatgctaaatcgatcatgagatggatggtgtcacaaagatatgacaaaggagggtacagtaacactcagaatacgtttgtaggtctccaagcactgggaaaatactcgcgtgtcatgtctttgtcgaatcaaaattacgatgtcttcgtaaattacgatagcgaacgccaacggctgcacatgaattctacgacttctctagttggacataaatttaatataccgtcagatgtacgacaagtcaaagtagacgttgaaggcaccggtgctggagtatttcagatagcacacaaatataacaatattgctcatgacagtgtgccacgatttaaaatagaaaaaacattgttcaaaatccgttctgacggtgttgccaatatgacaattcaggccatttaccgaccgaaaaaagattttgaagaaactaacatggtcatgatcgaagttatgtttccaaacggttacgttgtaacaaatagccaactgaagcaactcgaaaaaaacaaccaaattcgacggtcagaaactgcagatggggacaccaggttgattctatatttggatccgatgcggccaaacaatcccgtctatgttgatgtggaagcatttcggaaatcaactgttctaaaccaggctccgggatggatcaaggtttacgactattatgatcccacacgggaagccatcgaatatttcgatcccatttccaactaaaatatttcaaaggcttaccagaagcattcagtataattttgaaacatgtaatgcatttacgaaaggtgttaagcattggcgtaggaacagggaggccagttcgccccagaattttgtatgataataagtataaaagtttaacacaaaaaaacacgattcttacgcgaaaaaatgttctgaatgaattaacattactcttattattgacaaaaaacagtagttacgttcttctattatgcacagcagtagttgaataatttcacttgccatacatattggcctaagatggacacacgaacccgagaaaaatgaaggaatacttttgcgtaggcagagccgtagcgtagcctcacggcgcccttggcgaacctccctttgggcgcccccaagtcaatttcgttttcataatgcaagtgtgtaagtgattttcgtaaaacttcccatgtaaagttgatttagagtgggtcgatgtatgtcgtataaatgttataaattatgtatgtatgtatgtcgatttaatgttataaattataacatcaatatggctcatgaggtgctcttccttttttttaaattagtttcaactgtaattatacagtaatgctatctttactcataccgattacacgattcaattgcagcttcagcagcataattacttgggataaatttcaatagccattgaagactcttttgaaactattatcgaaatcaacaaaataaaatcatgttgacacttaagtattcacttgttcagagtacatttaaatattttgtaattataaatagaaggtgtacacgatagtccttctttagaactgtagaagattatcttaaagatgctctgaagtaaacacaagaaaattcatgaggtgcatctgcagaaacaactaagaaattctttttcaaatcgttggaccatttgttttaatttataaatgtcttaaaaacaatgtttatacattggtttcaaaaataattgcaaaggcttttagaaacgttatgatgaatttgcataacaactcctcctcaaaacatttttttagttgtttttcgaagagcctcccaataaatggaagcagattcaccaaatcctttaaataaagtcaaaacaatttttttttgtttcgacgaaatattgttaagaacttcaattcctaaatagtaacatgtaaaaattggaaattattctattaattgaaaaaaggcgatagagacaatcgcagaattcggtgcgattttttaaacacttttcactcaatagcctgttcttagtgatgtttttgtaagaaattcactagagtaagactgcaacagttctagaacacccaacaggtgaaaagtgatctaaaatatattagtgctatatcctctccacaaaatcaaaaattttcg

SEQ ID NO: 863 - DNA, 675 bp, Aedes aegypti
atgaagaagaccactcgaatcttacacaaaaaaaactggtttatctcctctactcagtctaagtcaatcccacaccgtgataagatgtcaactttcgtcaaggcggtgcttcttgttgtgatcggcttccaggcatggatcgccctcgcacaggatcccaacggatgtccgaacattgtcaaacgtgccggatggagtgcctccaaatcgtccaacgttacctaccagatcaaaccggtccagcatgtggtgatccaccatacggcaacgcaaagctgcaacgaaatgcccgtctgcaaggagatcgtcaaatcgattcaggatcagcaccagaagcagaacaagtggagcgacattggttacaactttttggtggccaatggtggaaacgtgtacgaaggaattggctggcatcgagttggagctcatactaaggggtacaacagtaagtcgattggcatcgcgtttattggagacttcacgaaggagcttccatcggcgaaagcgttgcgagccgcggccaaacttctgcagtgcggagtaaacatgggagagctggatgaaaattatctgctgtacggagctaagcagatttcggcgacggccagcccgggtaaggcgctgttcaatgagataaaggagtgggatcattacgatccatctccagtgctgtag

SEQ ID NO: 864 - DNA, 1204 bp, Aedes aegypti
atggttcggtgccgtttttgggcgattttgttcgccgtgatatattgcttcaaggggattgcgtgcgcggtaggttcagcgttgtcaagtagcagcgaggcagaacccggtctcgattaccagaagctagttgcaaaactggagatattggacaccaaaatcacccgcgtggaagtgtcatcacgggagcaattttcctcacttgagtcgaagcttgataagattttgcaattggttgataatcttggccagtcgatgcacacggcacagaaagacattggcgctgctagagaggagatccagcaattccaaaatcactctcaaggtcaattacaagcactagccggtagtgtatcgattattgagtcacttttagttgaaagtcaccgacagaagcaagttcagccaacgagaagtgagtcgactgcgattcgcaagacggttccagttgagcaaagatatttcgaaagctgcgatgttgcgccgaggaatgtgtccggaattgctagacttctacccgatcttggatttggtgaaccattctttgtgttttgcgatcaagattacgaaagtggagggtggatagtgattcagaatcgttacaatggttcggtaaatttctaccgcggatggagagaatacaagaatggatttggaagtttgaatggtgaattttggctaggtttgaacactattcacgctttgacctattcagcgccatatgaattgcacgttttgttggacgatttcaataattcgacggtagtggcaaaatactcactgtttgctgttggcaatgagcacgaatccttcgctatcacgaagcttggtgactatagtggaacggcaggagatggtttatcttaccataggggatcgaaattctccacaatggatatgaacaatgatattccaggaaataatggtggagtagactggactggtgcatggtggtatcgaaaaggacattacagcaacctcaacggtcagtatttgtccggaaaagtcgatcacacgaagtttcatgggaaaggtatgacatggaatcccttcaaaggcgatgattactcgttgaagcggtccaggatgatgatcaagcgtatattgtagtcagcagtagatagtcaacaagcattacatgattcgaaacattgttcctcttttatatcaaaatattccaaatttatatcaattgaaaaggtat

SEQ ID NO: 865 - DNA, 1301 bp, Aedes aegypti
atggcaaagttacttgttctgctagtgttagcaatactcggtgctgtggccaacagtgccagtaatgaaagatgttcaggattcggttatgaacttctaatggcaaagttgaagttcatggaagagaaattacttgaactccaatccaatgggggatcgaaaaaggaaggaaaattccggctacacaatcgagacctcaaagaacggaatcttccgcagcaaatcaggagcgtattggatctgcaaacggatactttgtacgctgccttcatgacgagcctgcggaaactgccatccaacactaccaaactgtggcatgcgtatttggaaggaaagctcctgaagtcgtgccagcagtctagaaagaaagtttcaggacgcttttggttgagtgaccatggattcgaagtccactgtgaactagctcagtacggtggtggctggactgtgattcagaacagattcgacggatcggtgaacttctccaggggttgggacgactacaaggaaggctttggcgatctggacggcgagttttggttgggactggataagatctaccaactgacctcaacaaagaagtgcgaacttttggttcacctggaagactttgatggattggctaaatttgctcactacgttcggttcgccatcggcagtgaagatgacaaatacaagttggctaaattgggtagatacaatgggaccgccggaaatgccttagttggacataaaggattttcgttcagtactgctgactcagagtttgttggtgcgcattgttctagaactgaaccatctggatggtggtatcccagatgctatttttgcaatttgaatggattataccggaatgtgaaagacgtagatgcaatgacgtggtatagtttccatagttattatcgtggactgcgtgtttcaaagatgatgattcgagagatttaaattaagttcagatttaataatgatgctaagttgctacctgtaatgtaaacgaagactattatagacggatttcacgccaactcgacacgcgattggcagcaccctttcagaattcaatgaaactttctggatgtcaaaagtatgttaaactaagatactttgcatattttgtattttcaaaatcgatctagactaacatttgaaaagggtcaaagtttttttttactttttttataaacccatataactcgaaaacggtaagacctacaaaaaaatgttgtatgggggactgtcgtgaaatttcctgaagttttagaaaaaaatattgaaaaaataaaaaaacattttctacaccg

SEQ ID NO: 866 - DNA, 1344 bp, Aedes aegypti
atgattacagaatgtgctgtaaaatattacagacttcgagagtacgaagatcgcgtcgctgtccagcgttttgagggttatcaatcgatacagatgcagaatgcctatgtttcctcttctgcaaacaataaatacaaagctagaattggacactacgttgaagatcctttgatagaaactgttgttacctacaattgctacggaactcttatacatcgcgaatttgtgctgacctcagcgagttgtatcgacagcttcaaggatgaatcactcatagttcaaatgcgccaagaaaagaagttctatctttctactaatccggagtatttgctgcaagaaaaaagcgattatcgagaacaggttacggtttcacaggttttcatacaccctgagtacagcaaagcacctttgcagaatgatttggccattttgcttcttgatccagttgaactacaatttgacgaatacttcggaccggcatgtctatggacgcacgattcaactgaaataaaagaattccaaactaacggccatggcccgctaaggacggtccaaggcctagaggatagggttgaactactgttgaaagacagaaccgaaactgaactgtacttgatatcgaaggtattgaaggattgtcctcagatgttatccaaacatcaaatttgtgtcggagaagatgccactcttgtccctggcacttgtaagtcaaaccacggatcagcgatgtcacgtgagcttagagatttgcagcaggttttctatgactacgtctttgccatcaacagtcaaggagatgattgtggccttaatacaccttctacgtttaccaggatttcaccgtatataaagtggatagacagtattatctttggagaaaacgttcagttcaataactcggacatctactatggagacgaatgcaatcttaaaggtggtgaatcgggagtttgtttaacgattccggaatgtcctggcattgtggacgagttgactgggaaatcacccgcagaagtgaaaaggtgcggattcatgaacgacgaagccttggtttgctgttctgcggctgattccgcacaaaacaatctagagagcgcacacctcagtgaggtgatcaaggagatcgagcagtgcccggatctttatgctgatctaagatctaataggtctccgtacaatctatggaaaggtgccgttaccttcttgttctcaactgaacatgttgtgttctcacattactacattggcgacgaggatttgttcgaactcccgtaccgggttgaaaaaaagagaaggtggacgaagaagaaaaatattgaccaagttgaaaaacatttgtgctag

SEQ ID NO: 867 - DNA, 1449 bp, Aedes aegypti
atgagattaaaagctatcagcacggtacttcccctggtttgctttacattggccgggctgtcagcttaccgctgcttggccgctaaaggagtgaattgtgggcagcgtcagttgagcttcctggctttaataaagtcgggaaaagccgcaaatgaaggcgattggccatggcatgcagctgtttttaaaaaggatgtcggatacatttgtggaggaaccataatcagtgaaaacttcattttgacaggagacgaagacaaacccatcgatatcctgcaagaagcaacactttccgtggtagatcgtgccacgtgcctgaagagcaagccattgcatttcgagaaactgctttcggaaaataacagcaacttttgtgctggtaaccgtaacgagacaaatgtgtgcgatggtgatagcggtggtggaatgtttttcgagcttggcaatgcttggtacatacgaggtttggtcagtaccggagttcgttccaaaaacagcagacattgcgatcctcagcagttcgtagttttcactgatattccatattatctgaagtggatgcacgatcaccaacagatggctaagaaacgaaatttactagatttgggtaattgtggactagatgaacatagcttgacgacgcaagaaattgacaaaccagtatttttacaatatccttggacggtaatgctggagttcaaaggagatttatccacgactattcacccattctgcaacggagcactcattcaccctcaattcgtagtcacggttggacattgtgtggatagcaatttgaaaaagtacaaacttaaatcggtacgcttaggagaatacaaccagaagacgaaccctgatgtcggtaaaaagataaacggaaaggaagtcagtactaatatacaatcaatcgatatagaaaaggtgttcaagcatccagagttcaataaaccacgctacgataacaacattgcactgctgaaattgaaattccctgccgacattgatcgacccaatgtgaaaccaatttgcattccaactctagaagatcataatgagcagtacgttgtcagcggttggaaacgtgttggcaaagagtctcatgttttgactagagacttgactttgctggaagatgctgacacttgcagagaagtctacaggaagttcaatattcatacgtcggtgaaccacatctgtggaacgtatttccaggaagacatccagcaatgtttccattttatgagtggtgcacctatgcagtacgtaaaacgagttgaccagaaaaatcgttactttctgaaagggttgttctcgtttggatttcctggttgtatgctgaactatacagacgtctttacgagtatccacaaatataccgattggatatcgaaaatcgttgatcaagaaacataaagaagatagtagcataataaactggttttgagcgcc

SEQ ID NO: 868 - DNA, 1287 bp, Aedes aegypti
atgattggaggcacttgtatgctgagtggtcaatgtgaaacccctaataatggcactgaaaaatgtctaggaccagaacatgtatgctgcatggataaagttgaatcaacaacaattcgggaaacggcatctgaagctaagacatgcttaaataataaaggagtatgtactgaagaaaacgagtgtgatggaaaaatgtataacgaccgaagaaacgaatgtggtggtttagtctgctgtagtttaccacaagatactgacacaagttctgaaagcacttgtgattcgttgggtggtacgtgtaaagctgaacaacattgccgtgaaatagctgatcgaattgcagactgtgcagaagacactgtgtgttgtttatcgaatgggtcgtcagatacccaggctccaacagatgcaggagaggtttcaatcaaagaatgtggctaccgaattgaaacgggaatcaaatttaacactatcaatcgagaccacggtgaatcgcaatatggcgagtttccctgggtggtagccatcatggtgaatgaatcagcaaatgttaggttcacttgcagtggcacgctgattgatccggaagttgttattaccgctgcagagtgtgtgaaactatttagaacgaaaccagagcaactcatagttcgtgctggagaatgggacatgggagccacaatggaaccaattccataccaagagcgtcgtgtaaggaaaattaaaagtcatgtcggattcaagcctctttcattaataaacaacatagctattttattcctggaagacaaatttgatcttacttctacagtaaacacagtttgtgttcctccccaaggtttcatcattgacaatggggaagtgactgctactggttggggtactactccaaaaaaccgtaaaaaatttcaacaaattctcaaaagcattgatcttccatatgtgcaaaaaccagattgcgaaaaggctctccgaagagctacccggaataataagttcaaattacactctagctttatttgtgctggtggtgaagatggtgtagatacatgccaaggagatgcaggttcccccataatattcccaatcccggatgatcctgagtcccgatactatgcagtcggaatggttgcttggggagtcggatgtggcaggtctggaacaccatctgtctacacggacattggacaattcagagaatggattgatgaagagttggcgaatgaaagtctatcgatgtattattatgactatcaactacaaggctcgaatgatgaacagtag

SEQ ID NO: 869 - DNA, 1512 bp, Aedes aegypti
atgagacatcttctgtatagtgtagtgattgtttgcctaattgtacaagtgaattatgtctcggcacaagaattttctattcctgatatagaatttgaattcttgaaaccgcgtggcttccgagccagcattcccgacgttcccggaataaagctgttcgcctttcatgctcgcattaacaagccgttccagcagttcgaagaaggtgattatgcggatgacataacggaaccgtccgaggatggtcgttgggtatttgagaccacgaaagccaccatcaccgatgaccaaactgtccactattgggtatacgttcagcacgaggatcgttcctattggttggccaatcagaagcagaagcggaaagcagctttaaaaactactacgacgacaacaacgacgactacaacggtgaagccgaaggcgaccaaaacgacaaaaccgtccgaaaagagcactacaaccaccgaggcaccatgtgccccaaccgttaccaccgtgaatgggaaacccagttgcgctggacgaatggttttcgaggataccttccaaacgtttgacttgcagaagtggcaacgggaggtgcgaattcctttggatacggagtcggccgagtttttgtcctatcaggaatcaccggaaaacagctacgtcgccggggggcacctgttcatcgtgccgacgctgctcaacatgaatccggacttcaacgaggaacgcatccgaaccggggagctgatcctttccggctgcaaatcacccaccaacaatgagtacgagtgtcgccgaagggcagccctgtccaccatcctgccgccggtggtttccgccaagctgaacaccaaaaacagttttcgctttcgatacggtcgagtggagattcgtgccaagctgcccaagggggattggatttttccacagttactgctccaaccggcagaaaattactatggctatgcggatttggcttcggggatgctgatggtggctcacgtcctgtccaatgagcatctgattacgcgggaaggcatcctcgttgatgggcatcggttgcgaggtggtgccattttaacgaccaaacccaaactgcgggatgcttttctgaaggcgaacgttttggacgagcatttcagcgataactttcatacctatggacttgtgtggaagccggacagcatcgctctgaccgtggatggattccagtatgctaccctgagggatcggttcaagccgtacggtgcggccaacaatttgacccaggcgaatttgtggaatccggacaatgccatgtcaccgtttgatcgagagttttacatatcgcttggcgtgggagtcggaggtgtcacggattttcccgattcgagcatgacgggtccgttgcggcagccaaagccatggaacaacaccagcccgaaggcggagtactttttctaccagaataggaacgtgtggtttcggacgtggaccgatccggagctgaaagtggattacgtgcgagtgtacgcgctttga

SEQ ID NO: 870 - DNA, 1113 bp, Aedes aegypti
atgtctctggtaattactatcgactctagagtgctgttggaagattcgtgggaaccaattcaatgtgacttaccgggactaacgaagagaggcatctgcacggctgccagtaactgtgaggcatatcaaagaattttgaatgaaagcaggggtaactcaattgaaagggaagatttcattcaacaattacaatgtggaaagttcgaaggagaccgagtatgttgtccagatagtgatagctaccaaattggtgtttatgaagatgctgcaacgtgtggccaagccgcttatggctatcgtattcgaggtggagtgattgcagacatagatgaatttccttggatggccatgctgctaaagatgcaccgtaaatcacagtcactttattatcattgtggtggcgtactgataggaaagcagttcgttctaacagcagcccactgcatcagcccgaagaatggggattcaaagcaggatccattaaaatacgtccgcctgcgggagtacgacgtctaccaggatccggactgtatgatggccagcggtttcatggattgttccgaggaaaaactagacatgaaaccacgcaagctgatagcacatccgggctttacagtgggctctcaggaccggaatcacgacattgggctcattcaaatcgatcccattccgacgtattcggactttctcctgccgatttgccttccggaaacgggtttcgaccagggtgatcgacgaggccggatgcataacgttgccggatgggggaaaaccgactttttttccggttcgggatcgattagctggagtccaatcaagatgaaagttgccctcccattcgttgcctgggaggtgtgccgagacgtgtataaaccgatgggagtggatctgcagcgaacgcagatttgtgccggtggcaagagggcaagagattcctgcgcaggcgacagtgggtctccattgatgtattacgatatgaagaatgcagtgtgggtcctaacgggaatcgcaagctttggagttaaagactgtggaatggaggggatacctggagtttattccagtgtaaaagaacatctgtcgtggatcaaagaaagtattagcagtgcctag

SEQ ID NO: 871 - DNA, 1116 bp, Aedes aegypti
atgaaatcatgcatatttttgagcttgtgctgtgttttagtgatctcaaggtgggcatcatcgcaagagattgaagactgtctaactggcaaggctcacaaaggtaaatgcgtttcaattgcgaattgtccatcgctgcttcggattgctcaaagtccagtgatttcggaaagtgacaaattaaagcttagagaacatgtttgtggcaatcgaaaggtttgttgccgatcgccattgcaagttactacaacttccacaacaactgaatcttattcttatgatgatgttgaagaaagtcaaccaacaaatcaaccgctgttacccaaggaaaacgattgtggcttggataccgcgagccaacgaatcattggcggagatattaccgataaggaacaatttcgatggacggtagctttggattacaagcatccaagaacagggggtgtcaaatgcggaggatccctgatcaacacaagatatgttttgactgctgctcactgtgttttcagagtacagaaacaagatctcactctacgtttaggcgaatgggatatcgaacaaaaccccgattgcgaggaagaagatgaagaagattgcaatccggaagtgcgaatcgtacgagtgagtcaaatattaattcacccaaattacaaggacaagacaaacgacattgcacttttgagaatggaacaagctcttccggatgagtacacgtcgcatattttgcccatttgtatgccgctgtcggctgaactcatgcaagatgctttcaccaacagaaatgtcagcgtggttggctgggggaaaaacgaaaaagaaataagaagccgtttcaaaatgttcgctgaactgataactatcaacaatcaacgatgtgagcaagcattagagaagccacttcatgacacgcaaatgtgtgcccaatctttcacagaaactattcgtgatacctgcggaggcgattccggaggtcctttacagatacagatcaaggggacatactatctcattggcattgtcagccatggtccaccttgcgggaaaactttactgccagcggtttacaccagagtgacgtcgtttttggactggatcttacagaatattactgactga

SEQ ID NO: 872 - DNA, 297 bp, Aedes aegypti
atgcagcccctcactgtcatttgtttcctggctctgtgcaccggggccattactagtgcctacccacaggaaccggtgctggcggacgaagctcgcccttttgccaactctcttttcgatgaactgccggaggaaacctatcaggccgccgtggagaacttccgcctgaaacgggccacctgtgatctgctgagcggattcggcgttggtgatagtgcttgtgctgctcattgcattgcccgtggcaatcggggaggctactgcaactccaagaaggtgtgcgtctgccggaattaa

SEQ ID NO: 873 - DNA, 1841 bp, Aedes aegypti
ataaaaatgggccaccttagtgcgcatagataacgaacttcgcccacactggaactcggtgcatccatacaccgtttcacacagttccagcaaagctggctataccaacataatctaaccaaatatttatagaaagcaacagaagtgagtcgtcctccataagaatcggataatcgaacggtacattcctatcaagaagagtcaagattgaaacgtgcgtgtgaagtgaagattcaactaatgcacacagcgagcaagccggttgcttgtgactggagttactagactgtggaaacacaaggctggctgaggtggtgtggaaaccgctttcagagttgcagcacctaccgaccgaccaattcattgcgctgttagaacgagtgatagatactacctacctatctacgtgggtatcgcacaaaaagctccacctttcgccaaagatggcctgcaaatgtctcaagtccaaagtgctcaaagtgacactgttcgtggtgctggtgaccttcctgcccgggttgcctccgtatccgacgttcccgttcaaggcgtttagcgtaacccctccacgagacttggagggcgtcctagcgcccaaccaactactcaacaacgcagaacagtggctcgaaaaccaactggttgcaccggaaaccattctggtccgagggaacacaacctatgcgtccgttgccggaggcaaggtcttggaaatcaccaaaaacgatcagatccgggtggtggccaagttcggtgtggaatgtcagggaaactacgacgaacgcgtttgcggtcgtccacttgggatagcgttcgatacccagggtaacaacctgatcgtggtcgagccctactttggcatataccaggtgcagatcaaaaccggcgaaaagaagctgctagtttcgttggacgaggttatcgaaggcggaaaagtatcccgcaagcctggcattccgaacggtttggcagtcgctcggaatggagatttgtactggtctgatacgtcttcggatttccgctttgaagacgcactgcaggccatgcttctgaatccgtccggccgtctgttgcattactcgcgggcttccggtcagaaccgcgtgctaatcgacgaagtctacggtgccaacggagtagctctcagcaaagacgaaagcttcgtgctggtggccgaactcggaggacagctgatccgtagatactatctgaaaggtgccaaagcgggaacagacgacatcttcatcgatggtctgccgggatcgatcgacaaccttgttggcgatgatacaggtttatgggcttcggtggtgattgccgctgacaaatcgaacccatcgctagtggccatgcttgcacccttcccgaatgtccggaaattcctcgtccgcgtgatgagcttggcggagcttccattcgacttcatctacaagcagacgggcaatcaactggctttgcgagtgtccaacttcatcgggaatcttggaagcgtggcaccgctattcccaaaacgtggcacggtcctccggttggattgggagggaaacattctgacagcactgcacagcgacgatggccgcaccaatttgatagcgcatgccgtgcagagtggagattatctgctgctcggttcgcccatttatccatcgattcggaaggttaagctgacggaagaggtgctgcaaattgtgtcgccaggacgcaaggtgccagcgaaggttaccgttgataccaaaaagaagcagaaaccagcgggtcacgaagaattgtgaggtagtttatgtgaatgtagatttttaagtgtgagggttaataaagttggatttgtgtgtgaaaggtta

SEQ ID NO: 874 - DNA, 474 bp, Aedes aegypti
atggacttcagtacaactctaggagaatgcggcttctcgtttcgtcttccgaaacaacctaaatacggtgacgaaattgcaatcaaaggagttcttcaaaacgatgcggaaagattttccataaacctgtgcttggatcggccggacggatgtgacccaaacgatgaaccagaatggattgcgtaccatttcgggttggatttcaccgagggcgatggcaattgtagagtgacacagtgtagtaagaacgtcaactggaatagcccgttgttcgccgatggcgaggtgttcaacggacgaactgtgaatgtcattttgcgtttggaagaggaaagcataaaagtcttctacgaagatacacaacacgttgcggactacgaatacagtcatcagttgccgattgaacagatacggaccatcgagttacgcgatgggatcgcccaggtggaagaaattcgattgaaattttcctga

SEQ ID NO: 875 - DNA, 3416 bp, Aedes aegypti
cacaaaaggggcaaaaatttcaatatgaaatattttttaaataaaaaaaaaacttctgcaaaattattcttctcattgatagttttcaaaatatttcggaattaaaagtaattttctttaaaaaaggtcaaagtgtattgttctgagtagatatatttttcaataaataatggcatttcatatgacacttatttagataactaacacgaaaaaatcaggcacacctgtaaaattgaaacatgtgggggaaaagttcgtttaagacaatcgtttttaaaactgttacaagtaaaaatgggtaaatatttttacgcgaatgtggtcattatatttgtagccaatattttaaagttccactgtacagtatttgtatctaaataaatttaattgaattaatcaatatttccagataaacaataacgagcttttctggaaatattgattgattcaataaagtcgaattttagccctaccttgctctaatagcttttttttaatataatacaccatcagctgcagctgatgtctgtggcgcaatgagttttcatcacataggggtgacattttgggattctagggttgaactatctggctatcaaatggtataaaaggcacgtttttcaaagcaatacaatttttcgatttttggacatcgctttccccgtagtgcggtggggcaagagatcgagtctagtgtgggacaaaagttcgctaactgaagcacaaaatacttttatgacaggaatacattttaccaaccgtcggtattcaaacagacaggaccaaaatccaatggttccaatggtttcagaaaaaatgtatattttattgccataagttatttcaaatatgtcatttaactaaaagggcaaaagtttcaatacgaatattttttaaataaaaaaaaaacctttttgtttgtttgtttttttcagaacttgatgaagatttgattgaaaaaatggtggaaatggtcaattcagctctgagatattgttttgaatatttgcgaatatttgatgatgccctcctcaatatttattcacctacactagaaacaatttcctagaataatctagaataaagtatgaaaaccaaatgaattgaaaggatgcaaactctggtgaattaattagtatagtactaaattatttatttataggtgttccactaaacagctcgtagatttactatctagaaagtgtataacactgccatcaaatgtaataatattcaaaatcatgaatttttggttctttggggagctgagtactggttttcatattgatccccatgtggatttgaatttatttagaaaatgtttgaattattggttaaagatttcaacagactttattacatcgaaagattacaagaagacgaggctcttatttttgtactgttatgtgaactgcaaaatttcagaattactaagacttcctacccacattttgttattttttttacgaacaaacaagttacaaaaaatgatgtaaattccgcttaaagcagtggaacgcaaggaaaggacttccaaaaaaagagcaatttctcacgtgttttcttataaacctttcagttcaaaacgatcctccccctccttcttctgagtgctctatcctggcaccatgccgaatcatcccgcatcctaggtgtgttcgttttccctggccgcagccactggatgatgatcgatgccatcctgaatggtctgcttgatcgaggccatcagatcaccgccattgccaactatcccctgtcgagaaaacacgagaactacactgaactgcgggtggcacccatctacgacttctggaagaattccgtcaaggtggaatcactgtacgatctaacggatatatcgatccaccgaatgttgatggatttcctatacaatttgggcctggagacggcgcagcatggatttactagagaaaatgttagggacttcatacggaacgatgacagccatttcgatttgattttggccgaacagttctaccaggaggcgtatctgatgtttgcccataagtacaaggctcccatcgtatctgtaggaacatttggtttcgcacattacatgggccctatgatgggtatgatgaacatgttctcgcatgtccctcacgagtttctgcccttcatggacaagatgagcttcccacagcgtatctacaatgcagcggtatcattgtatgagcagacgttacgatccttctactacttaccccagcaggaaacgatggcacaggagaactttggacatctccctggtcctttgcccaaggtcgccgatcttgaacgacaagtttctgtggttctgttgaacagctactatccattgacgacggcgcgggctcgagttcccgggatggttcaggtgggtggactccacattaaagaacctaaggctctgccggaggatttgaagaagtttttggatggagcaaagcatggcgccatctacttcagcttgggtacaaacttgaagagttcggatatgccaaaggataagctggaagccattctgaacgtattccgatcgatgaaacagcgtgtggtgtggaaatatgaggacgaatcggtgaaggggcttccgagtaacgtactgatcaagtcgtggatgccacagagtgacattctagcgcatccaaatgtgaaggttttcattacccatggaggattgctgggaactcaggagggtgtttatcgagcggttcccatgctgggcattccgatctatgccgatcagcatttgaacatgaataaggccgtgctgggtggttatgccgttcggttgtacttcccgaacatcaccgagacttcgttccggtgggcattgaatgagttgttgtacaacccggagtacaagaaaaacatggacagggtttccggagtattccgggatcggccggtaccggccctggacgaagcggtatactggacggagtacgtgattcggcacaagggagctccgcagctgcgatcggcaggattggacttgccgtgggttagttttgtcatgttagatatggtggctctggtggtgggggttgtattagttcttgggtgggtgttgaggaagttagcacgtgctttcatatgccgcaatgatggaaagcgtaaaagaaaagccgaataaagcgttattaaagtaaatactgcatgtgtttgatatttctttggatgacggtatgataattgattgagcacctcctatttgaatatgtctgtcatgtaaaaaaattaataaacattactaaacaaaatttaaaactgattcagaaccgcaataaatataatgaaggaattgcataaatttagactaaaaattagacaaggcaagttattatgggatccataataatgatttgatgaacttttattcaagaaaaacgctaattgaactttataac

SEQ ID NO: 876 - DNA, 3001 bp, Aedes aegypti
atttgtttttcttttaacgtaccttccaagattccaatcgaataaaaaaatcattcaaagatacttacatgattttctccaagagttccaatgtttcttctggaacttgatttagaactacttcgaggattacttcagaaacgtttccaggaatttctcaaggaatccaaacaagggttctaactagaatgggtcttattaaagaaaataatccagtaggatattttgagaaaaaccttccggaaattactggaggtttcctataggagctgtttcgaatattcgttaaaatgttgctggaactcttgtggtaatttccgtttctagatgatctaccgaaaacacaacagtaattatacaatgattagtataattaaaaataatagcatcaatcacttaaccagaagataacgctatgaatgaagaagcctttaatttttttttcctttttataacttatagctttaatgcaatgtttgaacgcagatagttcccgtcaatttagacgaaacgtgcctaagcttgatgccttactttatgacggtatcataaaataaaagtcatccacctagtctcatcgattagcagcacgtgaagttaacgtcaacaaaactcatcatgaatgcacaaatccggttggatgaggtgagacgtcgtcgccaagatgaaaccgttgctcaaccgaaactgctgggctgtgatattggggctgtttggcctggtgtgcgatcaggcctggtcgtacaaaattctgggactattcccacatccgggcgccagccatttccacttcttcgaaccggttctgaaagggttggccgcggctggacacgaggtgactgtcgttagtcacttcccgaaagacaacccaccgccgaactatgtggatataccgctggaaggaatgaagttgctgtcggactcggttagctttgagctgttcgagtaccgacccgccttttctcacttcatggagtttttcatgctgtacgactggggcaagcaagcctgtgataatgcactcaattcggccgccatcaaacaggtgctggaatctaaagttcagtatgacctgatattggtggaacaattcaacaatgattgtatgctcggtgtggcgcacctgttgaacgctcccttcattggactcagtagctgtccgctgatgccatggcattacgaccgagttggcaatcccattaacccatcgtacatcccagccctgttcatgggctattcggagaagatgagtttctcgcagcgaacggctaacttcatcaccgcgcaaactttcaaggccatgtacagctggttcaacgataatgccgctaatgccatgatcaaacagcgattcggagatggtatgcccgacatcaaggacctccagaagcggaccagcatgatgttcgtcaatcagcattactcgctaagtggaccaaaaccgttgactccggctgtgatcgaaatcggaggtgctcacattcaggaatttaaggaactcgaccccgaactgaagaaactgctggatacggccgaccacggtgtaatctacatcagctggggctcgatgatccgagctgaaaccctgccggaagacaagcggaatgcgattctgagcgccctgggctcgttcaagcaacgggtcatctggaagtgggaaaacgaaaccctaccgaatcagccctcgaacgtgtatattaggaagtggctaccacagaaggaaatcctatgtcatccaaaggttcgtgtcttcatgagccacggtggactgctaggaagttctgaaacggcgtactgcggcgttccggtggtcgctactcccatgtacggcgatcagtacaacaacgctgctgcactggaacaccgcggaatgggcgtggtcttaccgtatgaacaaatcacccgcgacacggtctacgactcgttgaagaaagcactcgaaccggccaccatggaaaaggccaagcaagtttcgtactcctaccgtaaccgaccgatgaatccggtccaaacggcggtctggtggtgcgagcacgtggtcgccaccggaggactcccgctggccaaatcctactcaaccgaactgccgtggtacgtgtaccacctgttggacgtaaactttgccctgcatgcgttcaactttgtgtaccacctgtgctggttctggctggtcaagcgcgtttgctgtcgaggcgtttcggcgttcagcgaaccaaaagtgaaaaccaactagtgggttgggcgtcggattcgaagcgtgaaatagactgtaatagcaaatattctgaaggcgggagaattattcacttagcctctgtgagttaaagcagtgaaaactgcaagcggaatgttagttcgaccggaaactaaaattcacaactaaaaactcaaactttttagataacacctatgttaaattcatagagaatattttagattatcgttccagtgtattgcagaggttatgtttttccaactatttgcttttagctattttcgaaaaatagtttaatagtaaaaacaactgcgaaccttacaactagttggtaggtactttttgaaactgatggaaacgagtagtgtatgttctaggggaagttcgaatggccagaaaagagagtagtttttagttagttgactatcaccagtgtaaattttatttcttgtaaaaatatctgaacctaatgtgtacaataaatcaccacattttctaaatgccgcgacggaacaaagataaagattatctgcttattaaaacagctttttttatacttaaactagatttgtagtgtcgaccaagtagcttggtttacagtttcgcccgaagctcctcgatgcgcgaatttgcactcttctgcaaatccaccagcttcattgccagtcccatgttgccttgcactttgaccttgccctggaagaaggccttctgggggttcagcttgccggaaatcagatccactacgtcgatgtcgtttatgatgaaggtgacgtcgggtttttc

SEQ ID NO: 877 - DNA, 1991 bp, Aedes aegypti
atgaatgtcgagatcacgccaaactattcgtacatcttcgactttgaaaatgagttcattcatcaggatacacgtgtctggatggtcaagaactggacctacgtgttctactactgtggaatctacatggcggtgatcttcggaggacagcattttatgcaaaataggccaagatttgagctacgtggattattagcgatatggaattcattgctagcaatgttcagtataatgggtgcctgccggacagcgccagaactggtacacgtgctgaggcattacggtctcttccattccgtgtgtgttccaagcttcatcgagcatgatcgtgtaagcggtttctggacctggctgtttgtgctgtccaagctgcctgaactgggtgataccgtgttcattgtgctccggaagcagccgcttatcttcctgcactggtatcaccacattacggtgctgatgtattcgtggttctcgtacaccgagtacaccgcctctgcccgttggttcatcgtgatgaactactgcgtgcactctgtgatgtactcgtactatgccctgcgtgccctgaacttcaagcctccccgttcgatcgccatggtgatcaccacccttcagctgactcaaatggtcgttggctgtgccatcaacatttgggcccatggcttcctgcaaacggccggcaagggcagctgtaacatctccgaaatgaatatcaaactatccattgcaatgtatttcagctactttgtcctgtttgcccgtttcttctacaagacctacctctcaacgaatgcgcgcaagggcaaacgctctatccagtcagcttccagcaatggaagcgcttctgttcaatacagtagcatcagtagcagtaaacaggcctccatgggtggctcaattaattccaatctgttgacggcagcacaacaaaccgataaggttaaagcacacaaaaaaccaagaaatcaaatttcaaccgggatcttctcttatctgtatttacgtgcttcttctcgtgtcaccttcctttcctcttacgcggaaagggaattggcgccaatagcattcaacaccacacttaggtgtacacgtcgttcaaatgcagttttagtggtgcagctaattaagtgagcgtagcggaaagtcagaaaaaaataacgtagctcaaagaaggatcctgccgtcttagtctaggcgttcaatctgctccttaatttagtgacaatagcaagtagagacaaggataagcccggtgacactcatccaaggcaaagtagtcactaaaatccccaaccaagcagaccgaagactttctttttgttacgtttgttttttttggtcacaaaagatgcataccatttactacaacatactatagcgtaacagaacattcaggtggaatatgttaagagaaaaaatagcgtagaagagctaaagacataatagtaggagcgaaatgatcaaagcagaaggaacatcgttttgagaagacagcagagaagacaaaagtgttgtaaggatgagatttatatggcttacgggtgttttcctctggccacttaactagaagtcggacagcagtatggtacggtacgagactaaacaagaggactgacaggagttacagcagctggcttcttatttatttccctgggagggtagggaatcctacattagtttttttcgtttatttaaatctgtttgtgtattattcttttctcatcaagatgtgttagctaatctcgacttcattttcctaactgggaaaaggttttcgtagaaaacaaaaaaaaaattgggtagtaatctgttgtttcgtgggtgtagttttagatggctttcatttatggttactgttaaagatgcaattaccgaatactggtacaaatattcgaaaggtgaagatgtacataatgttatattgaatttattttccacaggttttatgcaagtcaataggcgtggaaacaataaagtagaaatatctaact

SEQ ID NO: 878 - DNA, 1770 bp, Aedes aegypti
atgctggaaccgataacgatccacacctacaaacccctagcctgctcagcaaacaccaacacaaccgaacgcaaccaaagctacatccatcacatcgggaagaagcccctggtctatcggaatgtcggccaacatctacaaatcgcagcggaaaagtatcccaacaatgaagcactggtatcgtgtcacgagaacaaacggctcacgttttcggatgtgctggaaaaggccgatcgtatcgcggcttccttctaccagctgggcctgaagaaaggtgatcgcgttggaatttgggctcccaacggaacgcagttctacttgtcttcgctggctgcggcacgagccggaatgatatcggttctgatcaacccggcttatcaagtacctgagattgaatatgctatcaacaaagttggggtgaaggccatcattgccaatgagagctacagatctcagcagtactacaacatgttagctcaactggcaccggaactagcccagtgtaaacctagcgagctcaaaagctctaaactgccatcgctcaggacagttgtcatcgatagtgaacagaataacaagctgccaggtgccatcgctttcaaagaactgctcaatcttccctcagagccggcaatttccaaaattgaggcactacagtcgaaaatccctcctgatagtggtgttaatatccagtttacatccggtacaacaggtcaaccgaaggcggctttcatgtcccactacgggttcgtcaacaatgcgatccacattggtcacaggaacgagtttgacctgaaagaccatcggatctgcgttcagacgccgtttttccacgtgtttggaatcgtcatcgggatcgtaggtgcaatgagttacggaacaacactggtcttgccgggacctgggtttaaggcgtccgaatcgctggagacgatcgccaaggagaaatgttcggtgatctacggaaccccaaccatgtacgttgacttggtacgagccgtgagagagagcgggatcaaactaccaccagtcgatcttgccgtaacgggaggagctgcctgttctccacagctcttcgtggacattcagaaagctctgggagttcgacaagtgaaaactgtcttcggtatgacggaagcctctgctgtgttgttccaatctctgtttaacgaatcaaaggaaaatgtccttgagacggttggtcatctaacggatcactacgaggcgaaggttgtcgatcaggatgggaatacagtgccgtttggaacgtctggagaactttgggtgagaggctacggaaccatgcttggatactggggtgatgagcagaaaaccaaagaaacaatcgacgttgacaagtggttgaagaccggtgatcaattccagctacgagaggacggttacggaaagatcgttggtcgcatgaaggagatggtgatcagaggtggagaaaacatttaccctaaggaactggaagactttctgtgcacacatccgaagattttggagacgcattgtattggtgttccagatgaacgaatgggagaagaaatttgcgcttatgtgcgacttcaggattcatccatgagtttagatcacgcagagatgaaagcattttgcaagggaaaaatcgctcacttcaaaattcccaggtatttaaggattgtcgatgacttcccgaaaaccgtgtcaggaaaaatacagaaatttaagctagtagaattattcaaatctgaatccgtccaaagtgatcagaaataaagtcacgac

SEQ ID NO: 879 - DNA, 5417 bp, Aedes aegypti
ccagtcgtcgcgcgatttgcaaaaaaaaataaaatggctttagaagaaaagaccgctcgctcggtgcacccattctgaacgtaccccacattccccaccatttcaaacgaacgcccgctagcaccgcccgtgctgtcaaaacgccagtacggtgctacccttggccacgtaatgttcgctgtcacttttcgaggagccagtagtttttccatcatctctcgcccaatccagtcgtcctccgtcgtcgcgtagatttttttgttccgtcggaaaagtggcccgaaaaatccgtcaaatcatccgaaattgtgtgttcctgatgcgccacggagtggttacaatgttccacagttgattgcctgcgtggttttggtgtacggaaattttgagcagcgattcggagcttgctagaagaagcaactctttgtgtgctttcctctgtaagcctttgcgagaaaagtgttccgcagtcgtgggttttcagttcatcgtccaacattgggaaagataacccaagtggaaccattagatgatgtcgaatccatctcagtactatggaatggcaaatggttatgctccagctacaaatggaccacaacaacagcagagccagtttccgccaacgtcacaacagcaggttatgcccccacagcagcagtattctgcaaaaaacattatgatgaacggtccatcgcagtatcccccggggatgcctggaggagcccctcaatacggtgtcccacaaacatccgtggccccggttccattgcaaaatggaccaccgatgacgcaaaagccgctatttaatactcagttgccgcagccgaataatcgagtagcgaatctagtttcgaatggcaacagtgctacctcatctaggacgtcatcacctgctctagttaacaataatattccggcgtcgcagttgccaccatcaatgaacagccgaccaggtacctatccgacgccgtctagtcacagtcaacagactactacacctccaactaataactacaccatgggttccaacaacaattggacaagtgggatccctgcaagcacgataaacacacctccaaagacagcttcaggtctttcaactccactaaatgcctccactccaacgttaggaatggcacccctcaatgggcccgtcaacaatcttacagctagtatgcaaaatttgaacgtcaatcgacctccctctgcccaacagcaaataaaccatgtaaatggctctggaactcaaaaccctccaatttctagcagcagctacactaatcaacctcaacctggtcaagtaccgccaatgaaaccgccaaatgtttcgcaaccaacaagtagtacacaagcagcatatggccagctaccaccactaactagccaacagggacgacctgtaaatggcaaccacgttcccaatttgcaaatgcctccacaaccccaacagcagaatcttcctccctcgagtagtgcaggtcaatcttacccaggcatgccgccagcaccttcggtcgtgacctcggcaacatctgcaatcggcaaaagaccgctgtatccttcgcagactatgcctccaatgcccacaccccaacaaaccaacagctactatccaaatcaacaacaacagcaacctcctatgcaaggaatgcagcaaaatcagcaattccagcaaccccatcagcatagtcatcttccacatcagcatcatcaccatcatcagcaacaacaagtccagcagcagcagcaacttcaacaaccttacggtgccaactaccaacagcaaccccagcaacaggaccaacagtacaacaacgttgtgcggagtgggttcaaccgcctatggggcaacaatacggtagatcttcttcagaatcgacacattctaccggtcgaaaaggttcgaccgcctccgatccatctgaaccatccgtttcaggaggctgtcaactgtaatccagacattttccggtgtactctgacgaaaattccagaaacgaaccaactgctgcagaaatcgagacttccactgggtgtgctgatacacccgtttagggatttgaataacctgccggtaatttcctgcaacacgatagtgcggtgccgggcgtgtcgaacctacatcaatccgttcgtgtttttcgtcgacagcaagaagtggaagtgcaatctgtgctaccgagtcaacgaattaccggaggagttccagtacgatcccgttacgaaaacgtatggagacccaacgcggcgacctgaaatcaaatctagcacgattgaattcatcgctccatcggagtacatgttgcgacctccccaaccggcaatctatctgttcctgttggatgtgtcttcgctggcacagcaaaccggttacctgcacaccatctgcagtacgctgatcgaacagctggacagtttaccgggcgatgcacggacccaggtcgggttcgtggcctacaatagtgcgatccacttctacaacattgccgagggctacaatcaaccgcacgagatcaccgttctggatgtggaagatgtgtttcttccgtacccggataacttgttggtgaacctgaaggaatgtaaggaactgattaaggacctgttgacccaattgcccaagcgattcgaacatgctcacgatagtaatagcgcgttgggagcggcacttcaagtggcgttcaaattaatgagcgcctgtggcggtcgagtcaccgtattccaatgctgtttgccgaactacggccctggagctctgcaatcgcgagaggatcccaacaatcgatcatccaaggatgtggcccatctgggcccggcaacagatttctacaagcggttagccctggattgttctgcccaacagattgctgttgatctgttcctgttaaatagtcagtactgtgatgtagcaacaatttctgggattagtaagtttagcggtgggtgcatgcatcatatcccattgtttagtacatcgaaaccgcagctggtgaaaactttgcagaaatgtttcgaacgttacctaactcgaaagattggcttcgaagctgtcatgcgagtccgctgcacgcgaggattggcaatccacacattccacggaaacttctttgtgcgatcaacagatctgctctcgttgccgaatgtgaatccagatgctggtttcggcatgcagatcacctacgaagagagcttggccgacgtcaaatcggtatgcttccaggcagctttgctgtacaccagtagcaaagcggaaaggcggattcgggtgcacacgctctgcattcccgtcacttcgagtctgtcggaggttatgtactcggccgattcccaatgcatcgtcggtttgctcgccaaaatggccgtggatcgttcgctgacctcgagcttgtctgatgccagagatgccttcatcaacgcgactgtcgacattttccaggcattcaagattgcgcagaacttgccgcaaaattccggttcgattgtggcaccggagaatctctcgctgctgcccctgtacatcttggccctgctgaaacacgctgcattccgggtaggcaccagtacccggttggatgatcgagtatttgcgatgagtgagatgaaaacgatgccactggatcagctgattcggtacatctatccggacttctaccagctggacagtctgttccaaagtgccacccaggagggagcggatggtgaaccccatttggtggaacctccgcggttacaactgtcggctgagaaattcgattcacgttcgatgttcttactggactgtggaccccacatgttcatctacgtgggatgcaatgtattgccatcaatcctgaatgaagttcttggagtgaacaacttttcggaaattccagacttctgtgtcgaactgccaagccgggagaccccagccagcgaggcactttttgcatttatcgatgccatcaacgaagagaaaccgtattcttcttacgtgcaggtcatcagggacaacagtcaattccgttcgtacttcgtggagaagtttgtcgatgacaggaatcaaagttcgctatcgtactacgagttcttgcaacacctgagaacccaagtgaagtaaaaaaaaaaataagaagatgaagatatatttagctgttttcaagttgaatgtaggcccgaacggagagatttttaataggtaagcactcacacaaacacacatacacacaacaaccacccacaaacacacactgcgtagtaaatgcatcccgagtgggacggtcggggcgacaattttatccttctgcgaaacacaggacatacctaaatatgtagcaaattatgtaatataaaatatagcgagagtaattaaaaaactagctaatcaatggttgcaagtgtaaagtgaaacaataaaaaaaaatatataataaaatatgaaacaatcgtaggtaaactaaatgcgaacaaatacactgaattcgacgactgcgaatgttttctttctacgattgtgacatacactagggttatgaaaaaaaggaagcaaatgtaatcacttgatgaaaacgctgtaagatgtatcccctaagataaaccaagattaataaattatagtttaccctttcgattgataacggcgcgtttcggtaacatttcctatcttgtcaaaatccgtagttcaagagacgaatttatgtaaaatgagattttttgaattactgtaaatcaataatgcatccaaaacacgataaaagcctttttattctcaatgatagaagcgcgtagttgttagatgtaaaaaaaaacgtttacatcattcaaggcacctaatagatatggttgatcgataagttagtttctgctcaaagcaaaaaaatcaattggttctgccaacagaaggcattttcattttaatggcattcatgtttttgtttccacaactgtaggttagctttgtaaaatatattttgctgtttatatctaggagcttctatgtattaggttgaaaagaaccattcacttattgtttacgcagtcataattgaataagagaagcatgtaaatttggatgcaattgtggaaaggctacgcggaacaaaaacgttgcgcgaacgactggtgagctatatttgcgattgcctactttagttattgtatacctttcaaaaataggttactgtatagttattttgttgatatatttcaatgtcctctttcgactaaagtatgtttgcgtttacctaatatctatgtactactggaaatggaatgtcatgttaaacgcttactgtttatttctgctgagacttttggtaatgggcagtaaacatcggagtaaacgaaaacattttggtgtatgcatgatgttgattatacataatcaaatcttatgatatgagttatcaataaatcacaaatactgtatgagcagagaaaaa

SEQ ID NO: 880 - DNA, 1710 bp, Aedes aegypti
ctcgtcgccaacgtgtttcctcgcttgctgtggtgtgtgctggaaaacggtttttacttgcgtttagtcaaattcaatctttgtggtgagatcgtttgatcctttcttagcaacactactccaaggtgtctttttgcgcgtcgagtgtgcagtcggaaggataacaggaagtttgctcaagaagtgcacagttcgacgttaacggtagaatccgtaaatcgaaaagatgtcgaggaccctcgaggaatcccccaatgcccacatcaataagaccctgctggacaagtacatgagcctgccaatgccggagggcaaaatccaggccacctatatctggatcgacggcaccggtgaaaatctgcgctgcaaggaccgaacgcttgagttcattcccgaaaaacccagcgatcttcccatctggaactacgatggaagctcatgttaccaagccgagggacacaactccgatgtctacctgcatccagtggcgatcttcaaggatcccatgcgcccgggcaacaacatcctggtcatgtgtgaaacctaccggttcgacggaactccgacccagtccaacaagcgccgtacgtgccgcgaggtgtgcgataaggtagctgaccagcagccttggttcggaatcgaacaggaatacacgttgctcgacattgacggcaggcctctgggatggcccaagaacggattccccgggccacagggcccatactactgcggtgttggtgcgaacaaggtgtacgctcgagatatcgtagatgcccactaccgagcctgtctatatgccggcatcaagatctgcggtaccaacgccgaagttatgcctgcccagtgggaataccaggtcggaccgtgtgagggcatctccattggtgacgagttgtgggtatcccgcttcctactgcatcgtattgccgaggagtttggcatcgttgccacactggatccgaaaccgatggtcggcgactggaatggtgccggtgcacataccaacgtatcaacgaagaccatgcgcgaggaaggtggcattgttgagatcgaaagtgccattgccaagctgtccaagtgtcacgagcgtcatatccgagcctacgaccctcgcgagggcaaggataacgagcgccgccttacgggaaagcacgaaaccagttcaatctacgatttcaatgccggcgtggccaatcgtggagcctcggtgcgtattccgcgtggcgtcgccgacgaaggcaagggctacttcgaagatcgccggccaagctccaactgtgatccatacagcgtcgtcgaagccatcctcagaacgatttgcctggacgagtaggactgtttcccgtcaaattgtggtattttaaaaaggtctaacaacacaaatccattcaacctaaaagagaaaccggtgcattctattgtaactaacgacaatgttttttgtttttaaaattataacaatctatttatgtttctgttacgttacgagaaatcactgaaagagagctattatattatattaatattccatctggacataagcacgacaaccagaaccgatattggcagggagggcatagtgaagcctcttgcataaagtagatcatctagtgaagataaaagtgtttctcgtataataaatgttattaaagtattgaaaaagtaagagtttgtgttaaagcattgaaagaaagtaaaatccataagaat

SEQ ID NO: 881 - DNA, 2607 bp, Aedes aegypti
ttctttttttcaacaggattaccggaccctttcgcaaaaattcgcgtcgatggcactgcacaagagtacaaaacggaaatatgcaaagcatcgctggagcccaagtggaatacccattacgatctgtacctgggcaagaacgacaacattacgatatccatctggaaccagcgcaaggtgcagaagcgccagggttccggcttcctgggatgcgtccggatcgtatctagcacaatccagcggctcaaagatacaggatatcaacggctagagttatgcaaagcctcgcatgatgatccggatccagttaaaggacaaatcatcgtatctctcatgtcccgggacggtaccactggcggtactccgttggcaatcgttggcccagctggcgatgtacggggcccagacgacgacgaagagattttgaaggatgaactacccgctggttgggaggagcgtctaactcagaataatcgtgtgtattacgtgaaccacgtcaccaaaaccacacaatgggaccgaccaacggaaccggccggttcccttccgccagctttaagtaacggaagcagtaataatagtagcgccgactcgataccacccggtccgtcgaaatcggccacaaataatagtatcaatactcggatacgtgatgacagcatgctgataacgcctagctccagtactagcccgctaagcgaggtcaatagcccagtgacatcgaaacaaacgactgagttgtccgcgacgcggaatcaaggaatgttgtcgggcttgccaaatgcaattggttcactatcgcttgatccgtccgccgcacgttcacctcaatcgaatggcattatcccaaatgcacacagcacaccgacttctaacagcagtaatagtaataatactagcagtaacaacagcaatattgcaaacgtttctgcaggtgggggaggtaatttttcagtgtttaacaattccaaaatgcgtactacccaacaaggacaagtatatttctatcatattccaaccaaaatgtccacatggcacgatccacggataccgcgagacttcgatacacaaaacatcgcaccggaaaccttgggtcccctgccgcacggttgggaacaacgaaagaccgcatcaggtcgggtgtatttcgtagatcacaacaatcgaactacccagttcacggatcctcgcctaaatggacatatcctacaaatcatccggaaacaagcacaacctcctgtcagccagagttcttccagcggatctgcagcgagcgggtgctcttcgacgaatccggttgcagcaactgccctcagctctctgtccggtgctggtccacaggtttcaaacaacggagttttgacggctgttgccggaagttctcggctaatgatgccaccggaagcgaccgcttccggcagtaatggactgcctgtggtatgtattggctatcaacgtgttgcagaatcaataaaaaatggaacactggaagcaccaaaattactcattttttactgttttaaccgtataaaattgaaatatttcaggaacctacaccgcaccgagtaccacctaacaacattcccgatctgccgcaagggttgctggatgtatcgacgagacctggtcggaaagatacgatcattgcgcgtcgagctgcaagccctacagccccagtctggccactgccggctggaggtgtctcgacaggaaatctttgaggagagctacaggtatgctagttgttcatttaaaacacattattcatctatattttacataatggattttggctacaacttactaattcaatatcaactattgcaaaatatagaagtaccaagcgacctgacaaaacatgagtaccaattatctaccttagaaaacaatatcaacggggtgatagactcgacgttcagtgtggaaaacaatagctttggagcgctgaaggtacacgaactgaaacagaatggtgcttcggtgcaggtgacggaggataacaaacgggaatacgtaaagctttatgtgaactatcgatttatgcgagggatcgaacagcagtttttagcactgtcgaaaggatttggtgaattgataccgagccaacttttgcgacccttcgaggaacgggaactggaactggtgattggtggtatcagcaagattgacgtgaacgattggaagacgcacacacggctgaagcagtgcactccggagacgccgcagatcatatggttttggcagctgctggtaaatcgaaatagttcttcagaactagctgatatattatgtgtaatgaatattatcatttttatgttccagattgtggaatcttactccccggagatgcgcgctcagttgctgcagtttgtcactggttcgtgccgggtaccgttgcaaggtttccgtgctctgcagggttcaaccggagccgtagggccccgactcttcaccattcatctgacagcggacgctccgattcaaaacctaccaaaagcgcacacctgtttcaatcggatagatctcccaatgtacgattcgtaccagctgatgtacgataaattgacgcaggccgtcgaagagacatgtggatttgccgttgaataa

SEQ ID NO: 882 - DNA, 6372 bp, Aedes aegypti
gtcaaagtccgcctttttcgtcttgcttttttccccgaccgcgacaacgaagtcttgcacttttccactgttcgtcgtccgaaaaacattgtgcgtgaaaaatagtcaggaaaatctttcttttttattagtttttcccagtcatttcctcgcgtagtgatcccgataaacggaagcaatcgacgcttttgtgagtcctcgtattgtggtggtgtaaaagttgtggaaacccgcattccgagtgttgattctcgattggaccctaaaattttcaccgtccacacgaaagcaaggcaaggaaccccattctggagcactactttttgatactacaggtagcaggtacgggaatctcgtttcacggcggatggaacatgctgaaatcagaagcctgattcgtggttcgagtggaatcgagtaaatcagaatctatccggcgtcttaattttcaaaggttttcctaaaggactcgaagctgagtgaactaaattaactattggacagtgaagaaaagaaactactgtttgaacccacgagagttattgaggagattaaactgaggagctgtagcagttggataaatcccaaaagtaattccacacgatggaggaatcatacctaaatgatttggaaacggcggcgcacatcataatggcccctcctacggtggtcaccaaagagcaacgccaacaatcggaaaatatctttatgaacttccgcaaaaccaaatccccgtacgtcctgtgccagacgatcttggagaaatccgtcgtcgatttagtgctgtttgaggctgccgacgttcttaaaaaagctatcattgccgaatggaagtacattccggaccaggacaaagcatctctccgacagtacttgctgaactacatcatccagcgggacattccagttttcatccgggacaagctgctgcaggtggtggcaatcatgattaaacgggctagcttggaggacgttggcgccgaaagagcacagattattgaagagacgaagaaaatgctcacttccggtgacgtaaaacagcaaatccttagctgcagtatcataatggctattttggaagaatactgcaatatcgtccggtcggacgacaccggtcttaccacctacgagcatttccgcgcaaagaagcaatttgaagattcagaactgcttaaggtttttgtcatgacacttcaatcgatggaggaactaatcaaaatgtatgacgccggtaattcaatgcattcgtatctgttcaagcagatgttgtcggttatggaaaccattctgacatggggtttcttgcttcctaaattacaagtgattcgtgtgctacaaccatcgctgtccaagaaaatcatcgatacctcggaaacggtgacgaaagcattgcacgctcctccactacgattacacgcccagtggaaaaacattatttttgagcctaaactgttggagatcttcttctacatatactggaagacaagagataacgaggagctgcaaccgaaagctttgatatgcattcttcagttgtccactctgaagggtcccatcatcaccgagaacaaggacgaaagtatgacctatctggtcaattatctaacgcatttcctttccatgctttctacgatcgaaatcaaagagaaagaagcatacagtttttcacttatattgagaaaattgcttcagcttctaccacgagcagagatcaaaggacttccgaacagcctgttcgaagcttacatgcaacaaaacttgacattaacgctaaaatttattgaactctccgcgatggaggaagccatgaccccggatgaaacagtgtacatcgacgctttgggcaacctgctagagatttggctacacattctcaacgacaaggaaaactatccgatcgaagctatggtacccttcatcacgcaaatgtttgaaaagtacattcagtatcacctcgctgcaccagacggaatgcgaggcgttggtcgagatggagattcaatcgacgaaattgccgagtttgaggaatccgatcgggagcgtttcaaagagcaactgatcatcatcggatactttggacgcgaaattttatcacattcattaccattgctctcgaaattgttggaggatcgaactcgaagtttgggaacccagcttcatatgcttcattcgactaaaacaatggacgcatgcagttcgaaaactttggtaaatctttttgaggacatccactggattttgttgattactggtcacgtattggcattggaagcggatggagaatcggcaatgataccgacggagattctgcaattctgtaatcagtgcgttgccaacaatgtaacggatgtgaacaatagcttaaagctgttggcttctcccaatcaagacattcaagagattccaaacgccgaggtcaatgcagatccggtgatccgattgatcgctgctggtttccgactgtgcgagctggagaagagtgccatcgaagtacggatgtatcatttccttagtcccgagttgagtactacattagtatggttcctgcggcgatggtccgatgcgtatctgatgccgctcaatgaagatacggtcagtgcaacgttcaaacaagcattcggagctggatctcaaggttcggtttgggtaataaattatctcctgaacaaaatctgcctaaatgctcagtatcttcgagcggaacaatccgtcattgaggaaacatgtgatctgtttttggtactgcttagccggaagccacgctgccaagctatttttggctcggaattcttccgatcaatttgtgatctgaaaagtgtagacctgccggtatcgatcaaacgaaaactgttgaaaggtttcgtaatggttggagccagcgtggagaacgaagagctacgagcagattacttggggaaaatccttcaacccatcgaagacaagtacaaaatgttgatctcacatcaaaatttccaatccgtctaccagaatgaggatgttaaactgaaggtgatcgaaatcctggaagagctgatcgggtgcgtacagggcgcctactctaactcgttgacgatcatttttaccaaaattcaaggcatttgcaaagagattcctactttcttgaatttgtaccataattatacgattattgtcgagctgattttggagctagtttgtgagatcgtgtccaacattgccaacgtatcctcggaaaaagccatcaggacggccatcttggagtgctgcttctcggtgatccgaatctacgtgaaaaacaattccaaccgtgtatcgttggataccgccaaccaggatagtgatccggtggatctgattcttattcttaaattgatcaaccacctaacgtcgaaattgctcttcacggatgactttgccggttcggatgaaaccaatgctcagtcgtcggagatttgtatttttggtatcacgcacatcgtaccactgatcacgatcgatctcatcaagtatccagatctctgtatgcaatactacagcacgatcacatcgttcatcgaggagaagtcacatattattcccacgttgcatcccgacttgctgaaacagctgctgggatcgatcgagctgggcctaagttccttcacttcggaaatcgagtgcaagtgtttggaattcctggaaatctacgccaacagtgtgtacttcaaccaggatcctcaggcaccgatggctcaactgctgcttccgttcctcaagctgatgctagacatgatcttcggccaaaagattgatttgaacaacacaatggactggtaccggacggtgtttgtggtgatctgttgtttcccggagcattacaaggaattgttgcacaacttcctcagcgagcagtttgactcggaggcaagtatgggcaaggatctggttgaaagtatggccacggtaagtaatattgagttcgttaacaatcggttaacaaagtccaagtttatcgataaatttgacaaatttgtcgtgctggttagtacaatggtgaagaaataaactggttttattttactatttggttacgagaaattgaataaggaaaaagaatattgcttttttttgaaacagtaaatatgactatctctttttgtgtttctctaaaagtgataatgtacgctagaaaagaaatctgttgttctaacatttatatttcaatgcttgaaaggtaagcataaaagatcgaagagcacaaatgaagtgattgacctaccagaaacaaatggtaacaccaaaagtccggtcgatgggtatcgaatgattgtacttgtagattatataggaaactttaactatgtattacatttgccatgtactgaaggcagttttgtgtcttcgtgttatgttattctgcgtttactttttgtgatcgtctttttaaatgtattgctattttgagaaactttttttttatgggaatcgtcgaatgttttgtgtagtacgatggaggatagcgatcgatcttgtaaatctgtatgtaggtaggaatgtgtacttagataggggcatgaacataacagccatttattcctctttgtgcgaatttcggtccaatcgtttttgtttcatcttttatcgttatcatctttaaatatttcgactttaagtagagaactgtacagtttttcaaataattccatggcctttctcttgttgatagacatgatcttactcttactgactgtcctatagtctgtcgaaatgaaaaaaaaaatcactttactctggagcactgtgcaaagcttatggcatacaacacaatcacttaacagttgtaggtttacttttttttcctttcaaatttaagaaagccctctcgaagaaacggaaactctcacgtggtacgattaggtaacaaaccatacattgtcataaaaaaatattatcgggaaacgatctgagggaggttggattaggaaacaatgttttgaggtcgaattttacacgcactttttgcataactttttagtaacagtatcaaagtagtgaatcaaaatgaagtaaaaactatatatttatacaaaagatgtaatgtaatgacgacattaaaatagttttttgaatggatgagtaacttaacgatctgtaacgtttcggaatgaacgtccgatgtggagttatttcatgtaacgaaattggtatgaactttgtaaacgactttcgattatttattcactttattatacgcttcgctgttgaagagaaatcggtcagacactagagtatattttaccgtataattattataattaagcgttacattttataaataggatcagatttttaccatcgttatgtgaacaaagactaaacttcttataccgttacattcatgtgtgcattcattgtgcagcgattttgtggtgtcatcaaaatattacattcatcagtttttatttcgtgtgtagttcattagaaaacgtaaaccagaacattttctatattttgaaaccttgtgaaccttttagaagccattacttagaaagtttttgcgaaagtacattggaaatcatctttttcgtgtaaataacgtttttgtcggtcataaagtacgtgttctgttgtactatatatttataagccaagcatctttcctcggaagtgaaaccatttatctaaaacccaatagagattatcgaaataaaattggaaaaagtatatttctcctttctagttaatagctacaacacccagaagacagcccagtttacttctggagtttgaacaaattgttgaaattttactggcactcttttgaaaacaatcaaacattagaacacacaagcatgaatacccaaaacccaatctctctttcgtagaatagatggtaagttttaaacaaagtcatgaacagatatacgcgcatgtgtacaacaaatacaaatacacctatccacaaagcaaaagaacagcgttagagaaatgcgttcattcgtatcaatatcaattcccaaccggaaacagcaatcctgttcggtgctcaagccgaagacattgaaaactaagactcgagatcagaaaaaaagcattttgcgcactcgaatcgcacgtaaccgcgcaaaccacgcatggcagcagttaccgtgccgccgttagctcagtgctggatacgtgtgaatcgatgtaacttattactttctaaaagtacaaaataaccagtcacatggagcgatatacttgaagcaaactagacacccaaaagtaaagaaacattttgggagagtgaatcacggatattagctaagcgattttaaatttatctttccgaaaagtgatactgacgtaaaatgaaacaaataaaaagaaaacttggatccaggtattattcctgcgtaaatgaataaaaaa

SEQ ID NO: 883 - DNA, 1795 bp, Aedes aegypti
aatccttacgtaattaatggacgaacccttgagaagttctcgcaattctctagaggtccgtgaaccaccaattgggaatcactgacttaaaggcttataaattcttacaagtgtttctcgtacgaaggcaatcaccgctcattgaacagtccgcatgtatctatttcttcatctgtagatgtagcggtcttatatccagtaaaagccaccttgttgtctacccaaattaaattgattaaattgaatttgtgttttgtgagctcaacgatagagcttttagtttagtttgctatcacccaacacgtgtagcatagcctcatctgtagttttgataaacgtttgaaatcgaacaatttctcatttatcttgcagttcgaacgaaatggccaaactaatcgatgggaaacaaatcgctgccgacatccgcatggaactgcgcgaacagattgaggaatggatgaagcaaggtggtaatcgtgctccgcacttgactgccattctgattggggaggatcccgctagtaacacttatgtttcgaacaaaatgaaggccgcagccgatgtcggcatcactagcaaaaccgaacgctactcggcggacattaccgaagagcagctgttgaagcgtatcgaagagctgaaccaggacgactccgtggacggaattctggtgcagcttcccgtgccgggtcacatcaacgagcgcaaggtgtgcaattcggtgtcctgcgacaaggatgtggacggtttcaacgaacggaacattggccggctgtgcctggatatgaacacactgattccgtgtaccccgttgggcgttcaggaactgatcaagcgcaccgaaattgaaactttcggaaaaaacgcggtggtggtcggacgttccaagaacgtcggtatgccaatcgccatgctgttgcatgccgacggtcggaacgatacctgcgccatggatgccaccgttaccatgtgccacaggtttacgcccccggaggaactggcacggttctgccggacggcggacatcatcgtcacggcaacgggagtacctggcctcatcaaggccgatatggtcaaagaaggggcagcgataattgatgtgggaattacccgggtgaaggatcccgaaaccggcaaaaacaaattggtgggcgacgtggactttgacgaggttcgcaaagtggctggccacattacgccagtgccgggtggtgtcgggccgatgacggttgccatgctgatgaagaacaccttcatcgcggcaaaaaatttggcacacaaaagggctgacaaggaaaagtgagatagtaatagcaggacaatataagtgatgctgcgatgggaacgggagaagcgaatcttataaaaatgtgtttataaggaagtatttcagagagttttcaattatgtttaattgcattaatcattaacttgtaggcttagaggatatgcttagtaatactaagaagcatttatttatgtacgcaaaaacaacgttcggttgcaaaatatagcacaatagactttatggcaatgttattttccgttattgtgatactatgatgacattctattgcatgattactaaaactgccaccaaattgcactagtaatcttaaaattcctcaataaatgttccgattgaatgtacatttgaatgaaaaaaaaaactgtttttcaagattgctaatgattgaattatggattcttgagactcgaagcaaattcttgaataatacgtacaattatccttgaaggtgccataatgattggggaaatctaaacaaaatgtcca

SEQ ID NO: 884 - DNA, 2026 bp, Aedes aegypti
attttgttccacactattgccttctatacccttacattacaatcaacgcaccaatcttaacaagcacatcagatgcacgaaagaacgtattagtgcaacttcggtagcatcgtgtatgtgaataatttatagttggtctagtagtgaataatcaacaaagcagatcgcctcccataggctgttgaaaacttttatcagcattagtgggtcggaagtagaagtttgtatcagaatcagaacaaatcctgaatgacacactttcgttatcaattttggtgaacaacagatgattgactatcatcataatagtagcggttctacgactggatggtgtgtatatcagagccaacaatgaccttcttataaatataaaagtaaatgcaaaatcagtcctcgtcgtcagttcagcagtgaacttgcttattctacatcaattttatgtattgtgttccgtgttcgtgctcagtgttgtgtgcagtcatcatttggaagtgcactcagatattcgcatcaaaatacaaattgatgatcatatcagtaaaatcgatcaatatctaggcacttcagccaatagctatcagatataacggtttagagtgatatttgaatccttaagtgatttgtgatattatagaagaataatggcctctgagcgtagattaacccaattccgaaactgtcgcttattgagaaatcatcaattggtgcgagatgatctgtgggttcgtgatggtaaaataattgatcccgagaaggtgtttttcgacgaaaaacgacaggctcatgttcagattgattgtaaaggagcaatcttggcgccaggattcatagacttacaaatcaatggaggatatggagttgatttttcctatgacattgcaaccgtcgagcagggaattgccaaagtatccaaagggcttcttacgcatggggtcacttcctattgtccaacattggtcacatctccacctgagacgtatcacacggtgctgccaaagatatccaaaaaaacaggtggtcaccacggtgcaactatcttgggatgtcacgtagaaggcccatttataaacagtagcaaaaagggagctcatccacaagaatgcatcaaggaattcgatcagggcttccaaacgctactagacgtgtatggatcacttgacaacgtgtgcatcgttactcttgctccggagaaggaaggtgcatcggaagtgattcgtgagcttagcaatcgtggtatcactgtatcagtcggccactcgatggctaaccttcatgatggtgaagtcgcagtgcagcatggtgcaaagcttataacgcatctgttcaacgctatgctaccgttccatcatcgcgatcctggattggtaggtttgctgactacggacaatatcccagcagataacctggtctactttggcattatctctgacggagtgcacactcatcctgctgcgctcagaattgcttacaagactcatcccgatggactcattttggttacggatgccatttcggccatgggcttaactgagggtagacatagaatcggacagatggatattgaggtgcgccgtggtcgagcttatgtcgctaatactgatactctatgcggaagcatcgcaccgatggatgaatgcatacagtttttcaaaaaagcttcaaactgctcaattgaatacgctttagaggctgcatcattacatcctgccaaatgtttaggcattgaagaccagaagggcacgcttaaatatggagctgatgcagatttcgttattttggatgattcattgaatgtactgtccacatggattgccggagattgcgtttatgagaacgagtctttgttatccccaaaacttgatgctacttatagaacgaataacatcgtataaaattattagaatgttaggttgttgtagaccaatgacaatttgccgtataatctaagtcaaccattccgaagttaatattattagcgcaacaaaaaaaaacaatttcagttgaaataaatttgaatcgtttttac

SEQ ID NO: 885 - DNA, 924 bp, Aedes aegypti; identical to SEQ ID NO: 403

SEQ ID NO: 886 - DNA, 970 bp, Aedes aegypti
atggtgctggtgctgaatggcgtcctgcaggatgagtgtcccatggatacgcactcgctcttcgtacaacatccggtttaccgggaaacggctacacagttcctgtccattccgacgaaaacggttggtgctcccggattgctgtacgtgtgtcaacgagagatggccgccgtggctccacacgacaaaaatgtaaatatcataggatcggacgatgccactacgtgcgtcattgtggtggtgcggcattcaggttccggagcggtagcgcttgctcacctcgatggcaacggtaccgacgaagctgtttcaacgatggttgcccgcgtccaggaacttgccttcggctatccagagggccgaatcgaactacagctgataggtggcttcaaagattcccaaggatacgcggaggatctgtttagcaacatcatgcaatcgttccacaagcacccactggagatcgatttgacgcaggcctgcgtcggcgagttgaacaccatcctccggggggatctcaactggccaatcatctacgggatcggagtgaacgtcaaaaccggagaaatattcccggccacattcccagacaaggggcccgatcttcagctgcgcatggcacgacacttcactgggggccatcaggtgctcgacatctacgactcaacggtcggaatgctccgaatcggcccgttcaactacgatccactgcgcggggtggacctttggctgtcgcagagcgacgagttcatccttcaacatctatccactagtcccgaagttgaaccaccccactttgctatgcaagtccgtgccacacttagatacatccaggacaaccaattcccggcggtcacggtgttccggaataacaacccgcactactttaggcgagacgaaacgaccggctgctgggcaccggtgcgcttctagtagatccaatcgagacaccttgtttcctacgtagtta

SEQ ID NO: 887 - DNA, 4325 bp, Aedes aegypti
ccagctttaccaattctgaagttctgggtaaaacttcagattaatttttggtcggctattcagcgcaaacatttgtggaacagtttgaatttatgtcgtcaaacaatattgtatattactgagccatctctagtcgggaaacgttcctcgagatgatatctgatgcctgattaaaatttttgatcacatcgctgatttgcggcaccgtcacaatgtgtaccctatcgttagaacgtttacaaattacgaaccaatggaaccgactcgttcgccagaaatgttacttttgaacagaagctctcacagttagagttccagttgtctatctggtcactcacttctgttcggctacctaatacctgtaaggcccgaacgccatatcctcgtcgcaagttcgtcaggggtagatattcgctccgtcttatcttgtcagcaccgttatcaccgtgttgtggtgggagcttatcagcgataaggcagtatacctcagtttatcgaacgggaacgggactctgatggagttttcctgacgacgaagtcgctggtttagttagcacacatcgatcgggcagcgccaaacgcgaactgcgaacggatagtcttgtgattgtgcaatgtgaattagggattgctgtaaggtagtcattgacgaagaatttttgcgttcattttccgtggtatgcaacgacaccagtctcgaagaaataggatgttgcggaacgacgaagataccagtttgattcggatcaaagtggtggccgctcactcgctgaccaagaaggacatcttcggcaacagtgatccgtacgtgaaggtggacgtcaatacgatagtcggcgatgtcaacattgattctatggtcaccaagaccaaaaggaagacactgaatccgacgtggaacgaagaattcatcttccgagtgaagccaaacgagcacaagctggtctttcaggtgtacgacgaaaaccgactaacgcgcgatggcttcctgggcatggtcgagctaacgttgattaaccttccccgggagcaggaaggtcgggccattgctaccaaaaactatccgcttcggccgaagaagatcaccggcatgctgcggtcgaagattcgcggttcgttggacatctaccatgcggtgatgcgcgatcaagacggtgccgatcagaacgcatggtccctggccgatcaaccttccccggcagcggcgacatcgtccaacggggatgcgttgccaccgggctgggaggagaggcaggacgcgattgggcgcacctactacgtgaatcacattgcccggacgacgcagtgggaacgaccaacggcagtgcccacgcagcacggtaacaacgaatcggcggcggcattccagcgtagatttcacatcagtaacgatcccagcgacagctcgggtgccgggggcggcagtgccaacaatagcaacttgaatgtttccaatcgattatccgcaaagttcgcgtggcgtagtgctcgtggtatctccagcatttccacttcggagtccaggatctctactgctggtggatggccgagttctgcatacagctgtcgatcgaatactcgaatgacggaatcgattgccttcgaccaaccatcgttgccaattcgaactatggaaaatggtctatccccgtcgccatcgtcctcgtcgctatcgagcggtagtagaccaatccgacctgccccattgccaccgacagcaggcgataccccgaccagtggcagacgtctagctccacagcctccagtacctgcacccagaagttcgctggaaaacggacgacactcgccggaagacaacaatgccagcgacagggtcaacaacaacagcaatgatagcagctcgttacttaacgataccggaggcagcagtagggagtgctttgatttcttttctcttaacaatcacaaaccatcaaaaaatcaggttcaaattttacctcctctactgtttttacagacaactgacggaccctcgagtctatccggtccaacagctcccgccgggcaacccccgctgcccagttcggaaggcctgccacctggttggaccatgcagtatgcagctaacgggcgattgttcttcatcgatcacatcaacaagaaaacctcttgggtggatccacggaccggggtggcaagcattataccaaacgcggcggccaacggtggcggccaagcgggtggcgcggcgggcgctggtggggccaatgctaacgcacggcacctggacgacgaactgggaccgctgcccgagggatgggaggaacgggtacacaacgacggacgcactttcttcatcgatcacaatacccgaacgacccagtgggacgatccgcggttgtccaatccaaagattgccggccaggcggtgccttactcgagagactacaagcagaagtacgagtacctcaagagccagctgaagaaaccggccaacgtaccgaacaaaatcgacatcaaggtgcggcgggcatccattctggaggattcctaccgaataatcaactcggtgaccaaggtggaactgctcaaaaccaaactgtgggtggaattcgaaagcgaggccggcctcgactacggtggacttgcccgggagtggttttatctgctgtcgaaggagatgttcaatccctactacgggctgttcgagtactcggccatggacaactacacgctgcagatcaacccgtacagcgggttgtgcaacgaggagcatttgaactatttcaaattcattggacgaatagcgggcatggccgtgtatcatgggaaactgctggatgcgttcttcattcgaccgttctacaaaatgatgctgcagaagcaaattgatctgaaagatatggagtccgtcgatacggagtattacaattctttgctgtacattaaggaaaacgacccgtcggagctgatgttgacgttcagcgtcgacgaggagagttttggtaccactagtcagcgggatctgaagccaaatggggccaacatcgaggtcaccaacgataacaaggacgagtacattaaactagtgatcgactggaggttcgtggccagggtgaagagccagatgcatgcatttttggagggattcggatcgttggtgccactgcatttgctgaagatcttcgatgagaacgaactggaactgctgatgtgtggtatccagagcatcgatgtgagtgactggaagaagaatacgctctacaagggcgattactatgcgaatcacgtggtggtgcagtggttctggcgagcggttctgtcgttcaacaacgagatgcgatcccggctgttgcagttcgtgacgggaacttcgagggtgccgatgaatggctttaaggaactgtacggctccaatggtccacagatgttcactattgagaagtggggtacgaccgacaatttcccgcgggcccatacttgcttcaaccgattggacctcccgccttacgagagttactcgcatctgaaagacaagctggtaaaagccatcgagggtagtcaaggtttcgccggagtagactagagtctgaatcctgaattcacgccactgattacaatactacattcccccgcaaaaacagtagtcgaacgcaagcaagcaagcacacacaatttgcaacactagaagcgaattttctcgggaagagaaacgagtcgttcttaaattatatctagttgttaacgattatgtacagaagcgcgagcagatatgaagtgcaagcactctcgattaggacaagggaaacaatttttcagcgtaaggaaatgctacaggaagtctgccataatatgtaaccgaccgataatgcgagtctcctcgttccaatgattcacaaacacatacacgaacacttacaattaaacacacgcactaggaagttattcccacactcaagttttactaggaatgttttaaaaggaatttaaatccggctatagaaccacggagagcaggagagagtgagtgccttgccgctatcgagataagacgaaagtttatgcgaagcaaaatgcaaaatttttaactcattggcacaagaaaggtatagaaagtggggcacatatttacaatgaaattggcgttgtccagtgaagggattacatttggcgggattagttttttttttgtttcgcagagggtatgcgcacaagggaagtgattatttagagctggtcaaccgacgatagttcaatgaattatattgttgaaatcggaatgatgtatgtatgtatgtatgattatttaatttatagtgaacataactatcaagattgagattattatatttgataaaaattcg

SEQ ID NO: 888 - DNA, 3082 bp, Aedes aegypti
ctccgatgcgacccaaaactgtcattggcgtcaccttttttcggtgctgctggttcacgttcgtttgcggtgcagtgaaaattgtgaattttaccgtgaaattccatcggccgtgattttacaacacccgatattagtgcattggcctctcctgcaacaggaaaacatattttctccgagatgagtaagacggatttgccggcggtcgaggatctgaacggactggtatccggtgacaacggaaaccccccggtcggtcaaccgaatcttaagcgccccgttcgggtggcgaagaaatcggtgagcaagcaggatgctttgccaatcgaggaagccctcaagaccgagctgacgggtacgaacaacatgaagacaccgatctcggtgctgcaggagctgctgagtcgccgcggaatcactccgcagtatgacttgatccaggtcgagggagctgtccacgagccaactttccgctatcgggtctcgtaccaggacaaggatgccatgggtacgggcaaatcgaaaaaggaggcgaagcacgccgctgccaaggccctgatcgataagctggcaggcaatgccttcggcgatacccaaaccggtgggttgaacatcaaggccgaagccggactcgacggcgatgacgaaccgaccggaaatcccatcggctggctgcaggagatgtgcatggctcgccgctggccgccaccaacctacgagaccgagatggaagttggactgccgcacgagcgccagtttaccattgcctgtgcggtgctcaagtaccgtgaggtgggcaagggcaagagcaagaagattgccaaacgccaggctgcccagcggatgtggcaacggctgcaggatcaaccgctggaaccgaaccagatcatccagatgttggacgaggagggcaatgaagaggtcacatgcttgaatgacaaatcgatcgactttgtgcagatgctgcacgagatcgcaaccgagcaacggtttgaggtgacctacgttgacattgacgagaaaacgttgtccggtcgcttccagtgtttggtgcagctgtctacgctgcctgtggccgtatgccacggtagcggaagcacggccaaggaggcgcaaactgcagcagctcgcaactcgctggaatatctgaagatcatgaccaagacctaaggggtgtaacgaggcatcatgagaacggggctcggtcgataaaatcatattctcgcgtagaagaatagcaaaggcaaaaaagaaagaaaatcgtgttgacaccaaattttccaaatacatcattgtaaaagttcatttaggcaatacctggcgcaacaaacgacgagaaatgaactatttgtgtatcgaccaaaggcgagccgagaacaatttgtctggagcgcacctagcgggatcaagtaaataattgtggaacaccatctcccgccaacaacatgattgaccgcgctccgatgggacgccagagggcgtcaataattcttgaaacaaacacatttttactctaggtatttgtcaacgtttatctatgttttattattttgatgtttttttttgccgtaatgttcttctctttggagaatactgacaaaggtgttttaccttttacggtgaagattgtatttctacattatttttgtttgtttggactttgtaaatttttttattaggcataaggttcttacgattttttttcctctgatgtattgtgtactcaaaaatttttatcgaatcagattaactaaatacataaataactagtatcattatcaagcatttaatcgatgaaaaaatatgtaaaactactcttagctacactgaaaaagcaaaacgtatagcagataacgcatacttgaaacatgagttattctaccagcgttttaaatgcatacgttacaccatttctcaattgctatagtgcaacgaaaatcaattttctccaattgaatgaaatgaaatctgatcgaaaccacacacactgaaatggttgtcccttatgaaataaataaaaaaaagatcaacaactcaagcgaaccattcgagttatttatgtgtatagtgtaatacgaacttggcaaaacaataaaggtatcataatcgctaaatcttggatcaaacaaagaaaaatgattggaatacaacgcagttgttacgcaaataacaaacaacccgaagttgaacggaacctttctttcgaattacaaatattggaagcaaaaatgtgtgcgtattgaagccaaccagatgcaccagatgtcgcgccctccgttttggcaattagccaaacagacaaacggagagtacatcttgcattaaaaaccataatacaagctatactttgcatagaattagtgggttttattttccaagaaaatatacaacacatccaatgtcaagttactctataatagcatatagaatacagttttgtctaggttttcagctttttttttaccgcgattgaaaaatatggattacaaccttgattaatcgatcattacaattttccgttttcatctatacatgtaacgatatgaaaaataaacgttgctttgtaataattattggaaaattgcatcgtaaatgtatttgctgtcattgagagtattgaagtatcaagtcaaagaaaataaggtaaaagcacacattacttgaatctaacgccacgtaaatgaaagcaaaaagatatatgaatacaattagtgggattttttcgagcatctaactattattaaagcttaataaaacataaacgagaaagaagaaaaaacagcatgaaggataaaagtcccatacttgtaggaaaatgggcattattttaatgcaaagtatagaggttgtaacaaatactgaaacaaaacatataatttcaacggaatgatgaaaacaatacatatatgaatgtatcaagtgtgcaaaatatgctttttcgcgatgtaagtcaataccgtttgaaactgttgaacaaaggtagtattgctgtttggaaaaggatatttcgtacacaattttcttgtcttgtagttttcttgtatccaataaataatcaacacatataggttagcaaaggcaa

SEQ ID NO: 889 - DNA, 2737 bp, Aedes aegypti
tgtccgggtggtagtcggtcgtcgcggattgatagtgttttgctctcgtatccatccataaaaagtgagaagacctacaaaatctcccagcagctgcccaaacttgcacggttttgggaaacgggaaaaagaagttcaaccagtaccgaagtaacaatccctccagtttttgtgccggtcggattccgctgatttgtgaaggtcgccgaagaagaacgagaaaagccagcaatgctgcgaaccatcgccgtaaggaatgagaagctcctgctccagggatcccgcaaagttctccggggaactgccagcagggcgctaagctgcgaagccgcccggaagtgcactgtccaaaaaaactctcaaaaatggacttcaacgggatcccaaatggcctcgctatggcaggtgaacttcgtccgtggttactgcagtaactatccagcccacaataaggtccttctgccagcgctttcacccacaatggaactcggtaccatcgtcagctgggagaagaaggaaggcgacaagctgaacgaaggtgatctcttggccgaaatcgaaaccgataaggccaccatgggattcgaaactcccgaagaaggttacctggccaaaattttagtgccagccggtcagaaggacgttcccattggtaagctggtgtgcatcattgtcgagaacgaagcggacgtcgctgccttcaaggactacaaagacactggtgctccagcagccaagcctgctgcccctgctccaccagcagctgcagctgcacctccggtaccaactcccccaccggttgcggctgcaccgccaccaatggcagctgcccccgcaccgatgaccgccgttgaacagcgtggaccccgggtctacgctagtcctatggccaagaaacttgctgaacagcagcgactacgattggaaggccgaggatccggtctttatggctcactaacgtctaaggatcttgcaggtctgcaggcggctggtgcaccagaagcccgtgctgcagcggcaggagcacccagcgttccggccggggcagcctacgttgatattccggtgtcgaacattcgtggagtgatcgccaagcgattgcttgaatcgaagaccaccattccacactactacctcacggtggacgttaacatggacaaaatcaacaagctgcgatccaagttcaacaaacagctggagaatgatggcgtgaaattgtcgatcaacgatttcatcatcaaagcagctgccttggcttgcaaaaaggttcctgaggcgaactccgcatggatggacactgttatcagacagttcgacgccgtggatgtttcggtggcagtttctacagatcgtggtctcattacgcctatcgtgttcagtgccgatcgtaagggactgtccgatatttctaaggatgtcaagaacctggcggctaaggcgcgggacggtaaattgcaacctcaggaattccagggtggtaccttcagcgtatccaatctcggcatgttcggcgtgacgcacttctgcgccattatcaaccctccgcagagctgtattctggcggttggtggcacccagaaacggatcgtacctgataaggattcggaacaaggctggaaagagagtgactacgtagcggtaactctgagctgtgatcatcgcacggtggacggcgctgtcggtgctcgctggttgcagcatttccgtcagttcctagaagatccccattcaatgctgctgtaaaggcgtactaagcttgaaaattgaatgagtatccatgccttatttgaaacccaaaaaagaacaaccaacccgctccatcaccatcagggctaccaggtctccgggaaaaatgttttcacaactaccaccacactcacctgcagaaataagtagaatattgtacagttatccatagacaagcgccgttatccccatcacatttttgcttcaagtggtactggagcagccatcgtccatggcgagaaacatccctctcgttacgatatgctccggacactttgaacaactgtctgccaataaactatttagtgaaacagtcatattagtagttacgacacactcgtacaaataagaaaccttgttaagtgtaacgaaaagtaaaacaaaaaaatcaatgaggcaaagtgatcatcaatccgtacgaagaatctgtgaaaacgtggaaccgatttgttttgagaaaaagtaaaattatcactgtccgagcggttctcacctttatctgcaagcaaagctactgctttctagttcagttagtaagactaaaatttatatttattggtttcaactgcgaattgatcgcgattgattggtttatgttgaacaaagtttgattttaacttcaatcgtgtagctagtatacaaaaaaatcaaggaacttcatagaacattttcaaaattttattcatgtcaatcgaaattacatcttgaggttagtcaaatgcccacacgaatcataacttccgaaccttcaattgcaacgatcgaaacagagaaaaactgactccagggagcatcataggtactacacacaatggatcgtgtttaaacgaatattagtggctattttaaagttgatattttcatagggacaaccttgcaccagtctaaagacatcgttttgaaccatacagcaggagatgaaattaatgttagaaagaatcgattcgtcgtacaatataacgttggtatttcacagcgtgtaagcaacccg

SEQ ID NO: 890 - DNA, 3067 bp, Aedes aegypti
cagtcatgtccggagatcaagaaagatatgctgaacgtccatctggtaccacacacccatgacgacgtcggctggctgaaaaccgttgatcagtactactacggaagtcgtaccctggtccagaaggcgggcgtgcagtacatcctggattcagtgatagaatcgctgctcaaggatccctcgaggagatttatctacgtggaatcagcattcttcttcaagtggtggaaagagcagacgccggaattgcaggacaaggttcgagatctggtgaatgagggacgattggagttcattggaggagcttggagcatgaacgatgaggctacgactcactatcagagcatcatcgatcagttcacatgggggttgaggttgctgaacgacacctttggggagtgtggacgacctcggattggatggcagatagatccgttcgggcattcgcgggaacaggcttcgattttcgcacagatgggttttgatgggtatttctttggaaggttggattatgaggataagagggaacggttatctatgaagaatccggaaatgatttggaaatcgagtgccaacttagaggactctgacatgtttacgggagttttgtacaacgtttatcaacctcctcctggattctgcttcgatatactttgctcggatgaaccatttatcgacaatccatacagcgctgagaataacgtggaaagtaaggttgaccagttcataatcactgttaagaacatgagttcgtcttaccgcactaacaacattgcacttacgatgggtgaagactttcactatcagtatgctgaaatgtggttcaagaaccaagataagcttataaaatacaccaacgccaaacaggccaacggttccaatgtgaacgtcttctactccacgccatcctgctacctgaaatccttgcacgacgcggacataacttggccaaccaagagcgacgacttcttcccgtacgcttccgatccgcatgccttttggaccggttacttcacttcacgtcccacgatcaagcgtttcgaacgagttggcaatcatttcctgcaagtctgcaaacagctaaccgcgttaactcccaacaaagagaatcatttcactccacatctcaatgtgctgcgagaagctatgggtgtcatgcaacatcacgatgccgttaccggcaccgaaaaacaacacgtggccaatgactactcccgaatgctacacagagcgatcgaagcttgtggagcgaacactcagggtttggccaaaaagttctcccatggaatcactcgggatttcactttcgagttcgagacctgccatctgttgaacatcagcaaatgtgaaatgacggagtctaaggacaacttcatggtcactttgtacaatccactcgcccattctggctatcagtacgttagattaccggtttccggcaaaaaatacatcgttaaggattatcgtggcgttgaaacaccttcgcagatggttccaattgctgaatccgttctggacctaaactatcgctttagcaacgcaagctacgagttggtcttccttgccaacgagctacctccgctcgggtacaagtcctactacgtttcgcgtatcatcgaaaccaatccttctaatcctacggcgcaacttcagtcggatcaaccccacaaacagtggcactcggaagaagtcactattggaaacaagtacttgaatgtcagtttcgataccaacggtttcctaagtaccataacgttgaacggagttgcgcatcgactgcggcagacattcgtctactacgaagctgccatgggaaacaatgtagccttcagaaatcgttcatccggagcgtacatcttccgccccaatggaaccgatagcgcgataaccgatagtgtccagctcaaggtattccgtggcaatgtcgttcaagaggttcaccaggtgttcaacgagtgggttagtcaggtggttcgagtctacgccgatgagaaccacgtcgaattcgaatggatggtgggacccattcccattgaggatcgagtcggtaaggagatcgtgtccagattctacacggctgctcaatcgaatggagtgttctggacggattccaatggtcgcgagatgatcaaacggaagagaaaccatcgtgacacctgggatttgcacttagaagaaacaattgctggaaactactatccggtaacggcaaaaatcgctttggaagacgaaaacatacggttggctgtgttgaacgatcgtgctcagggtggatcaagcttggaggatggagcgttggagttgatggttcacaggaggctgctacatgatgatgcgttcggagtggaggaagcattagacgaacgcgcattcggccggggacttgtagctcgtggtaagcactacgtagtgtttggaccgaagaagacaagcagccccactttgcaagcgaaggaacgcttcctgcagaaccacgttctactgcccaactgggttttcttgagtgacgtttctaagttcagttatgaggaatggcagaagcgtttcaacaatatctactcggccctttcgctctcccttccactcaacgtcaacctgatgacgttcgaaccgtggaaggacaacagccttctggtgcgcttcgagcatctactggaaaaagacgaggacccaatgtactccaagccggttaggttcaacctgcaggacatcttccgctcgttcagcatcgaagaaatccgtgaaactacccttgctggcaaccagtggaaagaggacaacaaacgcttccaattcaaggcggatcccaactatttgaagcaaatcacacgggcagaaattgtcaatccgttcaacggtaccgagagagtggtgaagaaagacgatcaaccggcagtggagaacttgaagaacgtcagcaacgaagggttcgagattgtgctgggtccgatgcagattcggaccttcgtgatgcagctggagtttaggccatagacagattttgcagttcgaaaaatgtagggttttaagaacgactgattctatcaaaatagagtatgtgagatga

SEQ ID NO: 891 - DNA, 3116 bp, Aedes aegypti
ccggtaaataatagcagtcttcgggtgagtgattggaaacgttaacggaattgaaagtgcaaaatttcatccccggaaaagttggtgaaaaatctagaagccagtctagaagtttttttgctttcggctctctggggtttgggagaatccgcggaagaacaagcagaatattggtgtgagggagaggaggctcttttcatcagagggaaattttggatgtgtgttgtgtcgagtttggctgtcaaaaaataaaaagagcaaaacgtcagccagtggtgttggtggtggataaacatcgcatcgcacacttcgtggattctgatctcgtcgcagttttgacaagggaaggaaaattccggacgatttcttccttttttcgaagtgtaaggtgttcgggggcgtttgttttgctggaagcaggttgcataagccagataacagtgtgcaagaaacgcctttcaggtccggaagcaggaatttggtacgccgagtgtgaacttcctgtcggaagagtgagaatcgatagatcctaaagggaagtgctgtctgtgctgagtggtggtggaattgtggacgcagaaaagataattgacgacgacagtgtggaaggcaaaaaatgaacacaaaatccgacaccaatcggcatgtactaacgattcaggcgaaaaagaagcgtcataaggcagcgaagaaaaaggccaaacaacaggcggccgcagcggcagcagcagctcagaaccagcagcagagggagcaaagccaggtgtcttccgataatgagatgaatccggttccggtgaatgacaatcaacaacagcagcagcagtattcgagcttaaatagcagtaataagaagaacagcagctcgaatgagagcatcgacgatccggacgagaggctgctggatgacgctgaaggctacagtagtgatgaaagggaaggcgaacaggaaggccgagaggattactgtcggggtggttaccatccggtaaaattaggagatttgttcctgcagcgctatcatgtcatccggaaacttgggtggggtcacttttctacggtgtggctcagttgggatctggaggagaaacgatacgttgctctgaagattgtcaaatctgcacagcatttcaccgatacggcaaaggatgagattcaaattttgaaatcgatacgaaatgccgacccggccgatccgaaacggaacaaaacggttcagctgttgaacgatttccgaataaccggagtgaatggcactcacatttgcatggtgttcgaagtgctggggcacaatctgttaaagttgattctgaagagcaattaccgaggaattccagtgcctaatgtcaagtctatcatccgacaggtgctggaaggattagactatctgcactcgaaatgcaaagtgattcacaccgacatcaagccggagaatgtcctgctctgcgtggacgaaagctacatccgaaagttggcctgcgaagctacggaacttcacacgatgggatgtcgtctgccgtattccttgatttcagctgccccgccacaattccaggagcagccaattagccaaaacatgagcaagaccaagaagaaaaagctcaaaaagaaggccaaaatgcaaacggaactcatccggcagcagatggagcacatccagaagcttgaattcggtagtttagagaacggagatgtggacgccagtttgaaggaaaatcaggttgattgtgaatctccgatagcctcaccggaaagccctcggcttctgaatggggaccgatccggatccgtatcgtccggcgatgaagatgaaccatctcccaaatcggcctccaaaccaaacgccacctccaacacttccgccacgcccagtccggatcagtccgcttccaacaacaatgacgactcgattaccgagaaagcttcctcatcacctctcccgattgcctcatcctcagatcctgcctcatctagcaacaagttggatatcagcgcttcgatgcgtcggatcttgtcccgggtgaaagaacgcaaagacccgaccttcgaagtgtgcgacgtcgaagtcaagattgccgacttgggcaatgcatgttgggtggacaaacacttcaccgaggacatccaaactcggcagtatcgctccctggaagtaatcatcggatcggggtacaacacttcggctgacatctggagcacagcttgcatggcattcgaaatggccaccggagattatctgttcgagccgcactcgggcgataactattgccgcgacgacgatcatattgcccacatcatcgaactgcttggtcccatcccgaagcggattgccctgtccggtcggatgtccaaccatgcgttcaactcgaagggtgagctgcggaacatcaccgggctcaagccgtggggcctcgtcgaagtgctgcgggaaaagtacgactggaagctagaggaagcgatcgagtttagtgatttcctgacgccgatgttggattacgacccgaagaaccgagcgaccgcagctgagtgtctggcgcattcttggctgaagcactaaaatcaatcgaagcggagttttgtgtgtgtttgggaagaaaattgtaaagaatgagcgggaaacgctagaagaaaaaatcggtgatacgtgtggcaagtgaaaacagagaggaagagagccataaatgatattgcacagtgcacggagtgggagggggaggggcgaagaagaatgaagaatgacaaaaggatacgagacaggaaaatagcggaggagcggaagaggaacgagaaaaacgcgcggcggctgaggataataagatacaactaggaaaattcacatcattgcatctgcgggagaaataccacgacacgcgaatgccgctacatgctgctgcggcaagctgatggggtgctctcgctaaatggaatcctgccgcaggaatcaaaatcaccactggacacaaaacagcaagaagaggaatttatgggaagttagtaacaaaaattgtttcaaccctagacacaggctaaagagaaattaaatcataacggaagcatatgaagcaacacccagacattatgaaatgagataataaaaaaagaagtaaataatcacc

SEQ ID NO: 892 - DNA, 2369 bp, Aedes aegypti
agttctcttccatcattcgtgcgcttcggttcgaggttctacaattttaaattcaacttctatcagcagggctagaaaagtttgtaggaaatccctaccccatcaacatcagttggaagtgcagtgcaatcggttctattatcactcataggtatagccagctccgagtatttggtcgcggtcggttttaaagatagaagcgttgttttggtcgcgcgccacacgaagttatataaagactgcctcttacattttgtgtctacggattgtgtcaccagtgctcttggttggccgcagtattccttcggagtttgtcagcggaagttgtgcttttcttttctgtgtctagttcgttcccttcgaatcttcccttcttatcatggctgataaagtgaaagtgtgtatcgttggatcaggaaactggggctcggccatcgccaagatcgtcggcgtcaacgccaagcggctgccgaacttcgaggaccgagtcaccatgtacgtgttcgaagagatgatcgacggcaagaagctcaccgaaatcatcaacaccacacacgagaacgtcaagtacctgcctggacacaagctgccagagaatgtcgtcgccgttccggacgtcgtggaagctgccaaggatgccgacatcctcatcttcgtcgtgccacatcagttcatccggggtctgggagcccagctgcttggcaaaatcaaaacctcagccgtcggtctctcgctgatcaagggcttcgatgttgccgagggcggtggcatggaactgatttcccacatcatcaccaagcacctgaagatcccctgctcagtgctgatgggagccaatctggccggtgaggtcgcagaggaaaagttctgcgaaactacgatcggttgccgggacatgaagatcgcccaaacgctgcgggatctgttccagacgcccaacttccgagtggtggtggtagatgacgtcgatgcggtggaaatttgcggtgccctgaagaacatcgttgcatgcggggccgggttcgtggacggtatgggactgggcgacaacaccaaggcggccgtcatccggttagggctgatggagatgatcaagttcgtggacgtgttctacccgggtagcaagctgtcgacgttcttcgagagctgcggcgtggccgatctgatcaccacttgctacggtggccgtaatcgtaaggtgtcggaagcattcgtgaagaccggaaaatcgatcaagcaactcgaagatgagatgctgaacggtcagaaactacagggcccgatcactgcggaggaggttaactttatgctgaagaacaaaggcatggaagacaaattcccgctgttcaccgcgattcacagaatctgcaccgcgcaaatcaagccccagggcttcctggattgcttacgtaaccacccggagcacatcttcgaagccaaacacttgatgaagttttgaagaccccgtgtgactctctgtgccgtgactgaagaagacttgctttagggctttttcaaaattcctgtatcatccgctgctacctgcatgtgtatttgcatttgtgcgttgcatttacgtagcagcaatctcttcaatccggaacccgccgagaggtttgcttcagcagtgtagcttcctttttcccgcaaatttgtgttgctcacattttcctgtacccagtcgcaatcaaacatctactacatccaccgtttatttgttttatatttgttctttctttctccgtacacttttaggaaacaacgggcaaaactctaaatcaaattcaaaactaaataactaatctagtactacaagataagattcgctccttccggcacacacactcgtatacatgcacggtactatcagaacaagaacgcatcaagcgtgaaagtgcggcgtgtatgcgtaaacgtgcaattccaaaaactcgctctagctctagtactacttttccaataacacgtaactaaagtctgttcgttttgattcattaagtctgtcgaaatatcaagatgctaagtatttctagtgtgttttaaaaccagttgatcgttcctttgttgccataaaaactagctgtagtatgagtgagtaagcgagagagaacgaggccattgtcggatacgtgctagtactgcatttataaatatatgtaccatacctaaacaatcgatcaaagaagccattcgttccacatttactgctacacacatacatacactgaaaacctttccactgaagaacgctgcgctagcagtcagtgtgtgttttttgttaagttaggttaaaactgccttttatcttttataacaaaatataaaaaccaaaacagtaagcgcattgcaaatggtaaataaaatttgtc

SEQ ID NO: 893 - DNA, 5624 bp, Aedes aegypti
caacacacgaaggaaagctgttcgtcgtacatcagctgagtgtacagttagtacaattacaaacgccactgtagagagtgtgtgtgcactccagacctactacgcacactcgtgcacattccatgacgtactagatccatcggaaccccgagctctgcgaaacctcactgggcccgtcattgtagaatctaatatcgaatcgaatagttctttgttactgatattggggtggtgaaacaaaagtgagagccacagtcacggaagcatccgggtactaggccagccctcagtatgtctgtccctgtacgctgctattctgtcgatactatgaacaataccatcgaccagcaacagcacgtcggcatcggctgtggtggcaacgcccgtatggatgacgacgagccgatgatgctgcgcaaggttcatgtatcagaggagatgcaacataatcagcggatgttgttagagggccggcttgggacaccggatgctgctgatgcagttcttatggagtcgcaggagggcgctcaggccaccggcaacggctacggcctgacgaccggagcgaccaccagcaatggcagccacctcgccggaggtggcccacaggacttggccggagccaagtcgctatccccacagaaacagtctcattcgacgtcgcccctgcatcagcagccccaagccccacagcagccagccatgtcgttcgagcagatgatggccaagctgagcgaactgctcgccttggagcccaagtaccagccgaacctctacctgccacagcagtcatgcaatggcgagatcaccatcggaacccgggacggggcagcgcacgtgctgcgttgcctcaaggtctggtacgaactgccgaacgacgtcctgttcgcggccattaacttggtcgaccgcttcctgaccaagatgaaggtccgtccgaagcacatggcctgcatctcggtcagctccttccacctggcggtgcagcagttgaacctgccgcagattgacaccgaagatttggtcgctatttcacagtgccgttgcacgtcacgtgatctagtgcgtatggcggacattgttgccaacaagctcggtgtccagatgaacagcgccccggtgacggccctctcgttcatccgactgttctactacatcttcgagaacgccgcgaacgccctcgggctgacggacatcttcgcgtctgccgtctcgctggccgacctggaaatgcgtctggagattctggcctgcgatgccagctgtgccagcatccgcccctcggagctggccctggtcatgatcttcacccagatggatgcccacgtcagtgcgaacaaggaacacgggctgtacaaccagcagatccacgatctggtggactacgccatccagctgcaaaagttctgtcggatccccgacagcagcttcttctacagtcacagtattgtcgccaagatcctgtcgcagtacaacggccagcacaagatgccgtacaagcagcggctcgtctggaagttgtcgtcccgcacgatgaaggtgctgcgcccgaccgacaagctcacctcctacctgcccaccatcgcggaacatcacgctcacaacagtcacgttaacaatagtaaccttagatttagaaccggcagcgtcagctcggaagatgacggcgaagattggcccacttcacccattgttgcagtttgtgaacagtttgacgagtaaaacgatccccagtctttcgcgtacacatatagacagagacgctctcgcgacgagatcgcgagttattcgtttcggagtgatcgttcgatcgttaattagtgagtgttgtcgtcgtcgtcgaacgaaatctagcaaaaaaacacatagaggaagaaaaccggaattatttggatagctactacaagtttaggaaaattatttttttggttttttcaaacccaacaagtaacacaacacaaatcgtgactagaaaagtgttataaattgagcgttgattaaaggaagcgattccccccgcggacgggtcggtgaaacagaaaacagaaaaaactgtgtgcacggtgtttcttttctgaaagaagacattcttttcgggagaagcgaaataccggcggagaggtggactcttggtggcggataatcggaagtccgatcgagtgagagtgtgaagaagacttaacggagaagaagtggaggcgaattgcgaagcagcggagattcgcacgtttcagtggtctggtgtggtgtggattctactgagagcgtggaaagtcatcactatcagtcggatagtacagtgtggtgtgtcaagtattctgcaatccctatctggtcaacaaacaagaacgtgctgcagaggcggaggcagaataaacggaacttgcaggaaagatccgtgtgtgtatgctggattctcaacggagaatcactaacattacatcaatcaacaacaaaacaaaacatcaaaaaaatctacgtttaactacataaacacgcaccctggtgaagacagagcggaaacgtcggtgacgcagtaggcactggaggtttgacagtgcgagagaggaacgaacggaccaaaaccatcgtgacagcagttcttcggatcacacgtcgaggccttccccggaaaccggccgtcatcgcacgtcgcttgtcgacgcgagagtgttcgctagtaagcattatattatacttttttgattttaactagatctaattaaatacacacatttaattaatctaaggaaaagttaaagcaaaatccacaaagaaaaaaattcaacaaaattcttgaaaaatcccatactaaaaagaacaaaacagaaagaaaaagcataaaagaaaatcaaaaaaagtacaaaatatacaaaaggtaaaaaaatctaggacataggtgtttaaagaaaacgtaaaaatcaacctaagcagaagcaggcgaacatccaggaaaagaacgagaattattcgagaaggtttaacaacaacaaagaaaactagcggacttgacattgaaaacagaaaatctcacacaaagaagttgaaaatcgtgacagcaaaacagcaaaacagtttatcacaaaaaagccagtactgattgtgttattagatattttacgcaataaagcatacaaaacaaaccttataataataaaacagagaacgaacagttgtaaagcttgtgtaatttttgtagtggaatttctctcatttcttcttgcaaagcaaaacgttaattcacttctagattccaaacgtgtaataaatcaagtaaacagataagtttcctctaatcaagcgcaaagaaacaatacaagcacgttgcgaccggagcttcaaatccggaagtaacgaagaaaaatatcaagttatattatctaacacaaaaaaacactgaaaaaaggtaaaaattcaagccaaaaaaagcaagtcatttcaatctgtgtagtagtgaaaattgtctaatcgctttctattaaacgaaacaaaaaagaaatcgaaacacacagctataaacgcagttgaaaaaatacataaacaaaagaaaaaatagtagagaattaaactacaaaaaatagttaatcaagtcagattcaaaccgaaaagggaaaaaaagcagaattcaaagcttaaaaggccacagcgcgcgtttgtgtttttgacgtcgttgttgtagtagtagtagaagcaactgtgagataggagtccagaccccaagtcgtcgcattatcaaaaaaaaaagaacaaaacgaaacaggaaaatctctttttccgcgtcctccacttaatcgcaggggagagaaacccacgaaccgaacaaatggcgatgaacgtcgtactgatcgtggtcttcgcggtagcgacgacttcctccggtggaagtcgcccttcgcgaggaaacagccgaaagaagaaaacttcgtaacgaaggcggggatggggtggttgggtttccgattggaaacgtttcgaaggcgcagctcaccgtggcatcgatggaccgatggaccgctccggaagcaaaacctctgttctatcatttttttatttcactgttgtctgatctcgaatactttcggcgcgcgttcgagtcggttcaagcctcgtgtgagcggttcggatacccaaacatctcatccccaccagttcgtgaaaaattaacataaaatacctttagtaaaatgaagaaacaatgaaacaaatcttgtctctgaaagtataaaaaaagatgaaaaaattaaaaagcaaactgaagaatatagtattttaactattaaatattaatttataaagcaaagttattgtgattcgatttatttaaaacgtaaaacccgtctcataggcaaaacgcgggcggtacggagcaaactttacacaagagaaagcgattgctaaaaaagaaacaaaagaatcagaaaaggatatcttttttgtgtaagtctgttatttttttagaaaaaagcaaaacaaggcaaacactattatacataaacatttgtgtaccttcctttctcccattttttgtaaattattttcctgtttttaaacaaattatttatttatgaaacaaagaaaagaaagtgaaaaaaacaagtgcaaacaaactgagagagacactcactaacttatagagcaaagtgactaccagtcagcgcagagcgaaatctaaaagaaaaaaagagagagatatagaagaaagcaactgagcataaaccgaaaaagagatttttatccacctaattccatcgcgcgtgtgttagttttgttttctaaactaagagaaaactcatccaaaccgagcaagcagattagaagaggtagaagcacttcataattctcgttcgcatagtttttattttttgtcgtaaatcgtgtaatcgtacttccaaaaaatacaaatcttttttatacataatatgtgtacgtatattttccttactcctcccgtactccccttctcattccccctcttgtgttcgttttaacctcgcacttttccacacggcgaaaccaatccgtcttcactggtttggggcggaagttccgtgtgcgcagaatcggtgcgctaatctctattgcgtttttttacgtcgacatcccccaaccacccctcgacatcctcccccaccatcgtaattaatatatacaattgtttagaattagttgataagaagcaacaaactgaacgcagagaagtaggagagtaataagagctatcagatgagacctacgaagagagagcctccgcgtataaatgattattttgaaagagcagaacagcggagagcgcagcagagagagtttcagaagcgtacacgcatacacacacaaaaaagcacggattttaacacgaaatcatgaaccgtaaaaaaaactatttcatgtctgagcagaagcatgcaatgagagagatagagagagtgaagagagaacaaaaacatgaaaatgtgtctctgatgaattataattactgtatgatttatgtatctcgtataaggcaaaatgacgaaaagaaaatggaaaatgtgaaaacaaaagaaagaatgacataaaagatgagaaaaaatacgtggaaaatggcaattacagattcatttgggaacaaatgaatgaaaaaataa

SEQ ID NO: 894 - DNA, 3649 bp, Aedes aegypti
atgtcacaagcgaagaaatcgaaacgatctaaaatcggcgagcgcgtggcggctcatttggctaagcactttcaagtgaacagagagactctagctgtggacggggttggtgtcgcagcagccgtcgaacgcccatcaatcaagtaccagcacacactcgaggtcgtcctgtttcgctacacatgcttccaaccgattcggagacaccatgagtcagtactacttcccgatctttctggtgtttctgctggaactctttcgactctctcaattggtcaacggaaagcacaagtcgaatggcaccagccggacgatgattggaacattcaaaccgtaccacgaagcgtacatccactgcttgaaaatcaacacaacacgcatcggttacctcccaccagctaccacgtgatagattctgaaaaccacgatgataaggttctgaaacgacttatggaaatcaaggagaatgccaccgctcgaacgctgttctcctacaataaagaagaatcgcatctaccgccactcctcactaaaacgatcaagtacttcaacctacaacaggtggccttcgagctggagaccagtgttatgtcccaggtatcttgtacagcttgcaaagctggcgctggactactacagcactacatccgcactggcaagagcaaagaagagatcatcaaaaccatctaccagtactgcgtgaacctcaaaatccagtctcctcgggtatgcgaaggtgttagtcaactgtttggcgtcgaagtcatctacgttctgaagcgtgtcaccattggccctgatgaaatctgtagtttcatcataggagacgcttgtgaagatatctacaatccataccacgaatgggaagtagactttccacctgttcctaaaccagaaattcgtgaagtaccactaccacaagaaggcgctccagtgttcaaagttctgcacctctcggatacccactttgatccgtactacgccgagggctccaacgcagactgcaatgaaccattgtgctgccgactgacaaacggtcgtcctaccactccaaatggggctgctggaaagtggggtgactatcggaagtgcgacacacctcaaaggactgtcgatcacatgttgagtcacattgccgaaacccattcggatatcgatttcatcatctggaccggtgatctaccgccacatgacgtctggaatcagaccaaggaagaaaacttgaaagtgctcaaagaaactgtcaaacagatgtcagagaagttccctggaatcccgattttccccgcactgggtaaccacgaaagtgccccggtcaacagttttcctccgccgtacgttcaacaggtggacagctcgatctcctggctatacgatgaactggatattcagtggcgacggtggctaccggctagcgtttcgcacacggttcgtcggggtgccttctactccgtactagttcgccccggttatcgaatcatctcgatgaacatgaactactgcaacaacaagaactggtggctgttgctcaactcgacagatcccgcgaccgaattatcgtggttcatctacgaactgcagagtgcggagtttgccaacgaaaaggttcacgtgattggacatattccaccgggtcattcggattgtttgaaggtttggagtaggaactactacaagatagtgtcccgatacgagaacacgatcgtagcgcaattcttcggccatacacacttcgacgagttcgaggtgttctacgatccacacgatttgagtcgagccacaagcatagcgtacattgggccatcagtgaccccttactacgatctaaatccaggttaccgaatctattacatcgatggggatcacgatcataccacacggctagtggtagaccacgaatcgtggattatgaacctcaaggaagccaacctgtacgactatcctatttggtacaaactgtattctacgcgggcagcgtacaccatgcgtagtctgcggcccgttgattgggacatattgatcaacaacatgactgataacaaagaactgttcgatctatattacaaacactactggaaaaactcgcccgttcggccggagtgtgacttcgaatgccgcaagcggatattgtgcgacgccaagagcgggcgcagtcacgatcgcaagtacttctgtgaaggtgtcgaggccaagattgatgaaaacaacaaaggttggaaagactggctgctcagttccatctcctcttcgtacgtagcatataaaaagttattctagaaagaattgtgtttcgcaacgaagattttctttttcttacatctcacgcatacactcacgtgcatactaacgcaaatttaaccgctaaatttgtacatgatcaatcgcacatccataccaattcataatttcagcttacaattggtggcggttggaagtttcacttaacgctagacatagtcgcgcctaatcacacgtgtaaatatctcctgtctccatttcaaacgtattttgtgttatcaaattggcttttggttttggaaaacgatctaaattcatggtgatggtttgatatttacagcggaagtcacgaccgcaatgataacaacagggatgatcgcgatcgtcaaggtgataatgggaaggttgatgccgactccacttaccaccagcaactggttgcaaaagcattggaagataacctatccaatccgagcgttcaattggccaaagggtgaacatgaccatcattaactgaaattgaatatgtttaagcttatttgtaatgtaaatatagaaactgctaaatgtcaataaaatatctaacctcaaactgtctcaagcaagcctttagtctgtatctgctaggttatggccaattaagcaagggcgtggtaaatatggcagtttccaagccatcaaaccagacatgtactaacgatcttatattgtagattatcctatgccctttcgggcttgacgaggatcttctggcgtaagcgatgatccaatactacatttcggagaatagcagcacacccacaaaccgattatcgacaactactaaaccgataggaagacgccagcattacctccttattgatattagaccaagaagtgattgtgcacctctcacaatagaatcttgacgcaatcaacattcgaccttgcgatcgaaaatcaacgcgacgagaaaacaatcagagaatcgataataacaacaatacagcatgccattgatagaaaggaaacaaaagtgttcatcgagtctcgaacgtaaacttcggaagggagtcagactacatgtatacaaggattgtgataagcgtaatgaaaaccgaacgacagttactgttgaacaaatcccttggaaccagtgttttaaacgtacgacaatacaagtcaactcaagcaatgcatctatccagtatgattgtacataaatcatctaaattttaccaaaataaattatttatattataaatgtgacgattagtgtaaaatgtatttgcccgaagtccaaccctcgattactgctccagccatgtttcacaaattgattcttgtagacgatctaccggtgacactcttgcgaccagtacaaatgattcgtgtggaagcaacaggatgtcatttgttgcaacagctcccc

SEQ ID NO: 895 - DNA, 1697 bp, Aedes aegypti
atggcgaaagttgcatgtgttttacttgccgtgatactatcagtagaagttgcatttggagcaaatattctctgcttatttggagtagctagtccaagtcatcatatctggaatcgggcaattgcacatgaattaggggccaaaggacacaatgtgaccataatttccgcagatgtggaaaaagacactccacaaaacattcactatgttgaactcgaacaaacgtatccggagttgtacagcggaccgcacaacatcgatttactcgaaatggccaatgaaaacgtgttaacgtcaattgtttcattctacaatgactttgttattacagaatgcaaaggtatcttgaagtccaaaggtttggaattcgtaaagaattacccggacgatttcaagttcgacctagtgatacacgatatgacctgtggaggatgtatgcatggattgctgcacaaatttggatatccacccttggtcagcgtaacagcattcaacaatccgccctatgtgaccgacgtcatcggaggacataaacacgttgcctatattcctttctactctttgagatacggcacagatatgaccttcatgcaacgcgtccataatacactgttgtacataacagattacatatatcgaacatttttctgctaccccaagctggatcacatggttcgagactacttccagtacaaggacatgccatacgtaccaaacatggatcgtctcagcaaaataatcctagtgaatgcacactattccatcgatttccctgagcccgcaccaccgaaccttattcctgtcggtggactgcaaattcagaaacccaaaccgcttcccaaggatatagaagattttatcaatgctggcaagaaaggtgccgtactattttcgcttggaaccaacatcagaagtgatgaactcggaaaggaacgccagcaaatgttcattgatgccatcagacaactaccggactacaacttcctgtggaagtttgaatcagatttggatttgaagctgcccaaaaatctcatcatacggaaatggctcccgcagagcgatatgctggcccacccaaagataaaaggcttcataacgcatgcaggattactcagtatgcatgaagctacttggcatggtgttcccatgattggaataccttttattgctgatcagcatcggaacttggaaaagtgcattcgaatgggtgtggccgaacgtatcgttttccaaacgctctcaacaaaacaaatctatgataccgtccataaagtactggaatcgccttcgtaccagcagaatatgaaaaaagtatccagcctattcagggaccaaccggaaaaaccactagaccgagcaatttggtggatcgaatgggtactccgtcatcctgatttcgagggtttgcagtcaccggtgttaaaactcggattcctgaagagtaacctagtggatgtcatcggatttttccttctagctcctttagtggtgttcatagttctgaagaagtgcctttgtaagggacgtcatattgatagggaaaagaaaactaagtgatcatacttgtattaaatgtaagagatttattttacttttttgttgtcctcagatactgcagactttttaaaggtttttaaatatttgaatagcttcaatagaatgtacaaaatagttatcaaaatacatagaaaacatat

SEQ ID NO: 896 - DNA, 2908 bp, Aedes aegypti
ctccgagctgtcaaaaatatgacaacaaaaacctcgcggcccgctctcgcgcacgacacgacagtcttcatcaggattggttgatttggagggtcacgccgctcgctacatacaaaagttggtgtggttgttctatacctaattaaaagttttctgcctgtgtagtgaatgaaacgagaaaaaatattcaatgtgcgctccagtctcgcagtgaaacatcaataattatttcccattcggttgagttagggccaattcatggcaaaggaataattcgtcctcctgcctacaaagtggcgtgatgttgaaacgggttgtcaaacgattagagtgataagtggctgactgaaatctggatgctttctcgagttcccccttctcttatcacatgaaccagtagtctttacagcccatcgaggggcggtagttatattgatcctgtatagaaagcaataagtgcggtgcgtgttacgaaatcatactcagtgttaacaccctggcggtaactgaacaacacctggaagcgcttgaatctcccgcatccttccctccttcttacgacgacgacggtgctgtgatcgttctaaaacgcaggatgaagaagcggacatctccgccgtcgacgctggagaattctccggcgcaaaccggccaccgcagcagcaatgcgcccaccatcaatgagttcaagtacattaacgagcggccggtggacgatatttcgctggactttttctacaagccccacacgattaccctgctggccgtttccatcatcggggtcatgtactttgccttcgtgcgcgatcaatcggaccctcaggagaacatctgggctggcatggtgtgcgtcacgttcttcttcatgatcgtttccgtgctcgcgttccccaatggacccttcacgcgaccccatccggtggtgtggcgaatgctgttcggcctctccgtgctctatttgctgtttttggttttcctgatgttccagaactacaagtccatcatgggtatattttactggtttgaccccacgttacggaattttaaaatcgacatggacaaggaatatggcgctaattgttcggatctttctttcgaacgcatatggtcgcacgtggacgtgttcgcctggggccattttctggggtgggctttcaaggctgtgctcatcagacacatgggcattttgtgggctatttcggtgatgtgggaaattacggaaatctcttttgcccatctgctgccaaactttgccgagtgttggtgggatgcgcttattttggacgtgctcgtttgcaacggacttggaatttggtgtggcctgaagatctgtaaattgttggaaatgagagaatacagatgggctagcattagggatattacctcgacgaagggtaagttgaagcgtgtggtgcttcaattcactccagaaagttgggctccggtgcgctggttggacccgaaatgtacctacatgaggttcttcgcggtgtgtcagcttgtgttactctggcagttgactgagctgaatacgttcttcctgaagcacatttttgagatgcctccatcacatccagtggttattgggagattgatattcgtagggctcttcactgcgccgtccgtgcgacagtactacatctacgttacagacaccaggtgcaaacgattgggaacgcagtgttgggtgtacatagccattctagtttcggaagctattttgtgtatcaaaaatggacaagagttgttcgagcgtacacaggttaaaaatatagtcttttggttatttgtccaagctgctgtttctatgctattcatattcggttgtatgatatggcataaatacgtagatggtgacgaatcacaagagtcatcgccagccaaacagttgagccgagagttcaaagattctgccattgtgtcgggcgattccaaagggaaatcatcggccaaaaactctcctaaaaccactcctcccaaaaaagtaagatctcagcatagtagtgttaaacaggattaatttgtttttaagcattgtgggaacgacaaactcgtgagaacaattgactgaatatgaaagcgacttttctcagttgatttgtgatttctcgaaaattctacgacgattgctgttttcgcactagaaacgactagttaatgcatagttacttctgttggttgcacatattgaccttttgttaaatttagtactaattagttgcaaaacatccggctgaaaacgtgttgaaggtttatttcaaaaagtcaacatacctattatgcatgatttcgtgcctaattctgcgatcaattgttgaatttgctattcgcttttttctttctagtagaactttgcctagtgtttaaattctttgattacaacttctgggtcaagtttagaaaatctacaaaaaaaaaaaaataaataaaagaagagatatgccttgaaatataaaaaaagaatgtgattttgcgtatggattgctagaaagttgagtctgaaacgtgtaacatttcaatagtgtacacagaatttcccaggctaaacttgaatgaattatcgattatttctaccattgctagcgattttagcaaaatgacatatcagtttagaaatctgtttgatcgtgaagcaattgcaaaggaatgtaatttatttagtttacattgatgtcatacaccagtggagtacaatgtcgacagtaatcgatatgaagaacacccgtcagatgctagtactattatgcatgaacgtagtatgtttgtaaatcatgcttcctataggtttccggaattgtatatatatagttgatttgtgttttcagtggaagtttctagtcaataagattcaaacgaaagacatttgaaacataattgtaagaatttgaataaaaaattaacaataaaa

SEQ ID NO: 897 - DNA, 1510 bp, Aedes aegypti
atgctccgggttcccgggaccaagtggtgcgggaaaggttggagcgcgcggaactacgtcgagatgggcggactatcgaaggcggaccgctgctgccgacagcacgacctgtcctgcccgttttggatcctgggcttcgaaacgaagtacggcgtgttcaactggcgggtgaacacgctgatgcactgcagctgcgacgagagattccgcacctgcctcaaaatgtccgattccagtgatgccaacatggttggcaaactcttcttcaacatcgtacaatcgaagtgtttcgtactgaagccggaaaccgtgtgcaccaaaacgtcatggtggggcaaatgcgagaagaaaatacggaaaaagcgggcgctgattcgtgataataggaagtactaaaatttatcgcgccaaccctgctgccagcccgtgggtagcttcgttcaccgtactgcgtggtatatctctcacttggcatcagtggcgtcagcagcgtgtttgagaaacactgaacgttacaccgggaggtgtgaaaatcgtcagcactctgctcacgggttcatacagtagctcttgcgaaaacacttgagcactaacgcgaatcagagacaggatgcgccgctatttggcgcccaacacgccatcagaactgttttactttctggcaacctacttaccaaatcaaaaagaaaaattaatattgctagcagcaattaggactggaaatcccaaggagcagtataatgatgttatttattgtgtagaccgctaagtttatttattagtagcacaagctggtgcccgtggcatctcaataattgactccttaacacaacgatgattcctattaattataagaacagttgtaggcgacaaatgtttctcttttgtgtcttataaaatcaaaaagaaaatcggatgccaacgcgagtagaaagcattgccattctcaaggaaatctaacatccatcataactaacgagcaaccggtcgagaatctatcaaaaccgtacaaactccatgacaatttatgcatcggaagcgattgcattgttagtatactattgttctcatcatttcatttccatctatttattttcgaagcatcgtggcattctagggcttaaatcatttaaactataagaaagaactgttgagccattttgaaaatttttagacatagagcttaaccatatagacgtttaaataaaagaaccgggaatttccacgtgtatatatgtaaattattgaattaaaaaaaaacaggtatttgtaggtttaaagcgagttacgataggaattaacaaaacaatatctcgaaaaagtgatacaacgtggatgaatgtttgttcgtaaatgagtatgagcatgagtttgagatacgcagctgaaaattattgattataagtaggtgtacttaggaaactttttttaaatattaaagagaattaaaataaggcacttagaaaatatcaataaattcaacactgtaaataaaacttactgattctat

SEQ ID NO: 898 - DNA, 1616 bp, Aedes aegypti
caacgggaacgaccaacacaaccactaccaccaatggcggcagtgtggccggcgtccccggcggcgacaacttccacttcaagacgctggtcccgtcggtcgcggccggagccatcatcggcaagggcggcgaaacgattgcctcgctccagaaggatgccggcgcccgagtgaagatgtccaaggcacatgacttctacccaggaacatccgaacgagtctgtctcattagcggcacagtcgatggtatattgactgtgctcgattttatcattgataagattcgcgagaagcccgacatgaccaaagctctgacggatgcggacgccaaacaggcggccgaccgtgacaagcaggtcaaggtgctagtgcccaactcgacggccggcatgatcatcggcaaggccggtgcctacatcaaacagatcaaggaggaatcgggctcctacgtgcaaatctcgcagaaaccgaaagagctcaccctccaggagcggtgcattaccatcatcggcgagaaggagaacaataagatcgcatgcaagatgatcctgcagaagattgtcgaagatccctcatccggctcatgcttgaacgtatcatatgcagacatcaacggaccggtggccaatttcaaccccactggttcgccatttgccgcctcacagaatcccactttcagctccagtaccgcatcattaaactccgcactgggcggcgcactgcccggggcttccgcggccggtttactggtcaacggcaccggactgaatctgtcattaaatctaggtgcaccttcaccacaaactaatcctacagttaccacacaattgcttgaacatattaagggtgccatgagacagtccggttattccgacacggctaccactgaagtccacgcagcgctggcagttctggccaaatacggtgtgctgggcatcggcgtcgggcttcaaaatggaacccacacgacgccactgagcttcctgggtgtgcccgagctgcagcagacgacggcagcggcggcagcagccacggccgctacaggcgtgtacggcgccgtcggccaactgaatctggattcgtacttgcacggtgccggcaccgcgacgccccgtacctcgatcgaacgctacgacgctacctttgatccgttccggcatccgggcacgcaggcggccactccgatctcgatcaacaacaatgccttcggactgaccagcgctacggcgctgaatgcggcggccgcgcaaacgctgggatcgctcagcaagagccccacgccagccgagatgaccaccagcaaggagaagaacgtcgaaatccccgaagtgatcgtcggcgccattctaggtccggccggccgtagcctagtcgagatccagcacctgtcgggggcgaacatccagatctccaagaagggaatcttcgcgccgggcacccggaatcgcatcgtcaccattaccggtgcgccgaacgccatcaacgttgctcactacctgatcgagcagcgaatccaggaggaggaagcgaaacgggcctgccaaacgaccacggcagcagcggcggccgcagccggaaagcccactgccgccacggtggccgctgtcacgcagtaa

SEQ ID NO: 899 - DNA, 8727 bp, Aedes aegypti
gcagcagcaacaacaacagattatacagcaacaatcgccacaactgccgcaaatgttacaacagcagcaaatgcaaatgccacagcagcaacaacacattcatcaaatgaacccgttgcagcagcaacaacagcaacagggacagcaacaactgaactatgccaagcaaagtccagttcatcaacagcctccatccccgttgctaagtcagggtggcagaactactccttcctcttcaccgatgccgcctagtccaatgttgtactatcagcaacaacaacagcagcagcaacagcaacaacagcaaatgattcgtcgtccaccgagtgcaggatcgcaaggtttgggccctagtcctggacagtacatccaacaggatcccatggaagggaacgtcgtgaccagtgtcgctagcaataatgccagttctggtggtggaggaggaggaggtatcaaccatccatcgaaccccattccaataatgccttgtttcggaaagtatggctacataaaactaggacttcggggaggatctccgatgtggggtaatgcgaggggtaatccgtcaaagggtcccaatcccatggggcatctgcagcaacagctgcaatctggaaataagccccatggacaacacttgccaggaacgactttaagtcaggcgggtccttcgctacagcaacatcagcaacaggtggaagctgcgaaaaaagctgcaatgatgcgcagtagattgaccatagtgcaaaaagcttctcaatcacagcaaggtccctcggaggaaattgttgtgatcgatagcagtccagatgagaaaagaagaatgatagattatgatgacgaaaccgataaacgattggtcactacagaggtgtctttgagttccgttgcccagccagctgttgatggtgaggagataatggaatcgtttgctcacagcagatacgacatcggggcaagtccgttgggtgcgcatattgagggaggagaatacgaactgtttggtcaagatgtggtcacatctgggaacaaagatggggataaaagtttaagcgtggaagtgaacaagattactgttgctaaagagggcgaacattcacatgctggattgatgagtggagagaaatcgggacaaacgaatgaacgcaatatcgctaccacagaggattttgaagcaatgatagatagtcgtccaaaggacgctgacggcaagcaagacgacgaaaccaaggattcaacaagtgatgagtcgttgaagactggcatgaaaactcctacaaaagacgccactgtgatatctgtaggacttcagcaaagccctaagccaattacgtaccccggacgaattgctattcaaaaaaccattcttcaaaatcgacctcaaattgtgacagcggtttcggctgcccataaaaagctcgtcaaggatgcgacagaaagcgcgaagctatccataggaaacacaaccatatctgtaccaatattgaagagcctctccatgtcagcaactcctccgaaaaccccaaccgaaggaacaccaaccagtcaggcgaagcctgttctatcaggtcagcccaaaaagattatcacgtccaccgccatctcactgagcaatatctcgaaaagtacgcctgggacagtcatcgctgtggcgggacaaaaaatcaacaccaccagcatagtgcctctcacttctttgaaccttaatcaatcgtcgccctttatcacgaagacctttgcaagaacaggtccaaacgcacctcagcacacccaagttcagcacccaaacacatcgcagataaaaattcagcaaatccctcaatctatggctcaagggccaagtgcaacgcaaactcacccatccgtacttcagtcagctacaagcgagagcgtcgtcatcaagtcgaaaccaaatgttccatcgccaagtatgggctatgccaaactgtcctcgctaacggtcacccaagatacttcgctgccgactaaaatctttgaagacgattcaatatcgccggacagttccatcggacaggaagattcggatcatctgggaatggacaaaatggaaccgccgatagacgaagcttcacgtgctgatggttcggaagttgataatcatttgttagctgcccatgagggttcgaatgactcccattctggtgagattaagaaacatggcgtcattccagtgcatgttatttcaaaatcgagggaaaactcaaagagccccattcttggaccagcaggacaacgtgtctcgacaatgccacagctttcacctctgtcccaacccaatgagctgaccatgaatgcgatgaatgtgtcccagcaggtgcgctcgattatgtcttctatcaattcgagcaccattcaaccaggatcttctatcaaaacggaagcaagtggaacggtaattaccacaactccagctacttccgccagcgcaatatctaccatatcgtttgatacagtgataccttctcagggtgacaacatgagcaagccagagactattgcaagtattcttaagaccgtatctggaaagacaatcctcccagcagctgctgtagcgaacgcatccagtgcaaacaagtcggaacaaggacaatcggtcactactacgatatcatcaataccgggaaccaagctgctgaaccaacagttgcaaatcgggcgtgtttctccggccgttcctccaagtggaagcaacatcgtggttgtgaagcaagtgcgagctccgctgcaaaaacagattagtcaaactcaagcacagaaacaacaactggtggtaatgcaacagcagcaagcattgaagtttcagcaaaatcaacagcaattacaaatgcaacaccaacagcagcagcaacaattgcaacaacaagcttctcaacaaacaggcgttatcatacagggtcaggggcgaatacagaccatagagattccgaagagcactgtggataacagcagtaccagtagcatagccagcatactgagtagcactctgcaacagtcgcaaactaggattgtaaatttcagcgaaatatctactaacacgagtcaaccgccaggactagtcgtaacgtcccgaccaggagtgatatctacgcctggtagtggtgttctgttgaccagcagcagttctgctcccacatcatcgactacaactagcatcctgagcgccaccttatctcaaccgatgcaatctatgaaaatgagtacaccgacaatttccacattgcttcaaaatcaattgcaagggtcatcgttccggagatctaaatctaccgatgaagtgccagcgggcttcccgcgagaaccagccggtcaaactgtgagcaaacggcttagtctggaagcttcaaacaccgttaaaagcgaacccatggatacaacggatgataataatgtgtcttccacgtcctcagtgggttcaactacgggacagggacaggccagcggttgtaaattctcaaccatgtcaacaccttctggaactaaggctgaatccgatagtcaaaatgttctcttgaagcagcttttgcaaaatacgggctgtacttcggctccttctccgacgccaccttccatggcacggccagttccaagtctgataacgaatcaacgagcaccaagtctcggtgttgtaagctctttggaagcccaacttgctcgtcctgttattccaccatccacgaatcctccagccatacaaattatcagcacacaagctgtaacgatacccacttcaagtcccactccaaacacgtctgaacctcataaggtgactgccacgaaaatagtctcccgggaaacgtcgttcgtgtcgaaacctcccacagtttcaatctcatccagtcatcctactccgcttctgtttgccaatatgcgcgccgcaagcatgaagaaggaagaaatgctccaagctgcagctgcttctgctgctgcagcatctgcagctgcttccggttgcgtcacagcacagcccatcaccgttcaaagcacggtgaaaacagaatccggccaaatgaccgttacgcagatcacccatcccgttatacatgcacaacaaccatcgcaacagatgcttcagcaacaacttcagcagcaatcacagtcgcaaacgaatcaattgccttctgtttcgtctgctgacatggccaatatgacaacctacataaagagagaacccaccccagttcaatcgatgaacatgaaacccccggaacagcagcaaccacagtaccagcagcatatgctacaaaacgcacccaatcaacaacctcaacttcagcccatgtctcgtacgccaacaccgatagaggtgaagaaagaattgcctgacgatgctctttccggtccatcgccggtgttcccttcgccggtcccaacccccacagatacagtcaaacaggaactttctttcacgccaacacccgccaaagaggaacccgttgaacaaccctcgttagaagctgctgccaaaacagccgccgaaatagcccacgagctgaagaaaaagaaacgacgagagtatcagaaaaatcgacgacagcagcagatccaatcgaacaaagaaccccatcagtccaagaagaagccacgtaaatccaccaaacttgaagaggactacgacacctacatcgataacttgatgcttcagctacggcaattgcctccgatgcaaatcctggaaccacttcttccacgaaactacggcatctgtcaactgtttggtactggcgatctcaccaaattcaccaacatgaagaacttctcgattgcaactggagatctcaccggtacttacgggcatgcacaaatccccaacgttgcagatttctataacaccaaaccgtttggcgtgaaagtacccccaccagaaaccgtacctccttcaactcagcggggtttctacgatcaagagttcccgcccatcaagttcgaaaacgaggatcgctgccgatacgatttcgccaaagaccgagatttggattcgccggacacgattgtgagcacgtctagtcccgaatgcgtccgctgggagtccccaatccacttccccggattacgagtcatcaaggaggaaagcaacgaagaagatcaaaccatgatcttcaagcggatgtctccgatcattccgatcgtcgctcccattccgattcggctgaagaagggcatttcactgtcgtctgatcgatcgctgagtttgatcggccccggaagcaataaggaaaatgaaggcatcaaagaaccgctcggcattaaatcgagatttggcccaccgacgccccttaaagattcgagtaatgttacggttaccctaacgttaacatcctccgctgcggaagatatcattggagtactacgagaccttgccaacattctggaaattccgccgccaatgtcgtaccagattgtggagcgaaccactactccgcctagtcaaaagcttggtctgtaccggactaagggacgcgatggaaaagaaggagctcccatcgacatacaaaccatcctgaatggagcagccaagttctgcaggcattgcgacgtagtgatactgaacacgctgataaccgcaaagccttcggaattcccgttgctggcaaacgctgtgaatcaggatttggaatcagaagagctgtacttctgtagtaaggcttgctatcggcagttccagtggcgtccgacgaatattttggaagataaactgctcggcgctgatggaagcaaactgcgcgaaaacctcgcttctagattcgatctagatatggacgaaagtttgagcatgggtgcaatggacatcaagcaagaactgaacgaagacggtgatgtcagcatgacaagcatgcgttcctcggatagcaaagactcgtccatcaatgagcgcaagaagaagctggatgagtccgataaagaaactggaccacccccgaagcaattgaagggagtgaagtacaagctgtttgcctcgaattgtttccaaatccagaggtacaagaagcctaccgagaaggaaatcacggaaatgttgttccgtatgagcatcaccgtaacacccactccaaaaatgccggatgataccagacgttgcattttctgccacacgaccggcgacggagttgcggatggtccttcgcgtctgctgaactacgacgtggacaagtgggttcacttgaactgtgctctctggtccgatggagtctacgaaaccgtaaacggtgcattaatgaacttggaaaatgctcttcagcagagtctgagctcggcctgtacgttctgcaataatctcggagcgacaattaagtgcttcaagactcgttgcgccaacgtttaccatttgagttgtgccatgaaggatagttgcgtgttctacaagaacaagacgaccatgtgtcaatcgcatgcaccaaagaccgaaaaggactccgaactgacgacgctgagcgtccaacgccgggtgtacgtggatcgggatgaaagccggcaggtagcgtccgtgatgcaccactcggagtcgaacaaccttctgcgagtgggtagcttgatcttcttgagcgttggtcagctactgccccatcagctgcagaatttccacactcccaactacatctacccgatcggatacaaaattatacgtttctattggtcgatgcggcgcccgaacaaacgctgtcgctacgtgtgctcgattgcggacgtgtgcggtcggcccgagttccgagtgctggtgcaggagtcagccgaggaagacatcgaactccgtgacatcacaccgaaggccgtttggcagcggatacttgacccgatggccatcttgcggaaggatagccaaatagtgcagctcttccccaagtacgttaccggagaggatcttttcggcttgacggagccggccgtggttcgcattctggaaagtcttcctggcatcgaaacgttgactgactatcgcttcaagtatggtcgcaatccgctgctggaactgcccctggcgatcaatccttccggagcagctcgaacggaaccaaagttgaagcactcgctgacgtggaagaagccccatacgcagcgaacgggttcggtcactcagcggccaacttttgttcctacgagctcgccggctggagaggttgcctgtccgtacagtaaacagtttgtacattccaagagctctcagtacaagaagatgaagctggagtggcgcaacaatgtcttcctggcgcggtccaagattcaagggctgggtctgtatgcggcaagggatctggaaaagcacaccatggtgatcgagtacatcggagaggtcattcgcacggaggtctccgagttgcgcgagaagcagtacgaagcaaggaatcgtggtatctacatgttccgcctggacgaagaccgcgtggtcgatgcaacactgtccggcggtttggcccggtacatcaaccactcgtgtaacccgaactgtgtcacggaaacggtcgaggtcgagcgggacctgcgtatcatcattttcgccaaacggcgaatcaatcgtggcgaagagctctcctacgattacaaattcgacatcgaggacgatgcacacaagatttcttgcatgtgcggcgcccccaattgtaaaaagtggatgaattaagcggaaagtcacagtaaaacgtggaccttttttgctgcattctttgtgtactactattagtttaatcattctttaattgtgtagtttggtcagaacatcagatttagttgtatagttgtttagtactctcaatgttttttttcactaggttacgtgtattaagaaacaaaagtcagtttttacagacatccacagctatgatatgacagaaattaattgacaaattgagctagtcttaagggaaaagttataaaaatagtatgtgtttagtgcaagatgtgttagtagagttggttcaatagtgtttatcatgatgtttagttacattgtagctttttttctattcctttttttctgttagtaagactatagcagaattgtccttcaataagaagaaaaagattgctttagctagaagcaccttcgaattagatatacacacatgagggtaagtccgaacatggatcaaatcaaataggttttgtaggagattaagtagcaaaaggaaagtgtacatcagcactagtaaagtaggtagacagagattatttccgatacgaaataaaaaaaaaacgatacaaatacacacggatgaaatctgggattaaggcaaaacaagttattagagcgtatacctagcgaagtaagacacaaaatgtacttgataaacaataatgagcaacaaaccttagcctgagggaaatcaaagaaacaacaaatctagaatcacctccaacagtggacacacgtggaactcccacatccatatattttcagacgattgttttgcaatatatatattttgtatactagatcataaatgttaacaaatctcttctcagttgattgagaacgaatgacacaccgagtagctgcgctatctttgggtgaaagaagatgtaattattacggattattgcccctgaaccatacggtaggtaccggttaagtatagtgatgcaagtgtgtagcaatagagaaaaagcacttctgtgttgataaaagagcaagaaagaaatcacagctagaaaccttgaagtatacatatttgtaacatataagcttgacagaaggcacggcgaaatagaacagtg

SEQ ID NO: 900 - DNA, 2903 bp, Aedes aegypti
agacctaaacgatggcatccagactacgcagatttggagtaactgcagccggtgtggcaatcggtgctgccctgtctacatatgccctcaaaagcagtgacatctcaccgcaccatgttcaaatggaggaaatgcagaggattcgtcgcaagcgtaccctgccatcgcgatcggaacaggtccagtcactgcaaagtggcgaagagttcgacgtgttgatcatcggaggtggcgcaaccggtgccggatgcgcattggattccgtaacccggggcctcaagacggcactggtcgaggcggacgactttgccagtggaacgtcgtccaagtcgacaaagctgatccacggtggtgtgcggtacctgcagaaggccattttggggctggatattgagcagtaccgaatggtgaaggaagctttgcacgagcgtgcttccatgctgaggtcggctccacatttgactcgtccgctgccaattatgctgccggtttacacctggtggcaaattccgtacttctgggtaggtatcaaagcctacgattttgttgctggtgatcgcaacgtgaagagttcgtattatttgtcacgagaggacgcgttggagttgtttcccatgttgagaggtgataaacttcgaggcgcgatcgtgtattacgacgggcagcaagatgacgctagaatgtgtcttgcgatttcgttgaccgctgcgcgtcacggggcttcgatcaccaaccacgtggaagtgttggaactgttgaagaagaagaacgaagctggtaaggaagtatgctgtggagcgaaggtgcgggacaacatcacgaagaaagaatggtcgatcaaggccaaatgcgtgatcaatgctactggaccgttcaccgattcgattcgtaagatggacaacccaacggtgaagtcaatctgttgccctagctcgggtgtgcacatagtgttgccaggattctacagcccacctcagatgggcttgcttgatccggacacatcggatggtcgtgtaatcttcttcttaccctggttgaatggtacgattgccggcactacggatgctccttgtgacgttactaccaatccgtctcccagtgaagatgaaattcagttcatcctcagtgagatcaagagctacctgaacaaggacgtagatgtccgtcgtggtgatgtactgtctgcttggagtggtataagaccgctggtgtccgatcctaacaaaggagacacacaatcgttggctcgtaatcacattgttcatgtcagtgattcgaatcttgtaactattgccggtggaaagtggactacgtaccgtgccatggcagagcacacgatggatgcagctatcaaagcctgcaatctgcagccggagcgtggatgtgttaccgatggactgtggattgaaggagcgcaaggttggactcccactatgtatattcgcttggtgcaggatttgggtttggaagtcgaagtggcgaagcatttggcaatttcatacggtgatcgtgcgtttgccgtagccaaaatggctgctctcactggcaagagatggccgattattggtaagaagttgcatccggagttcccatacattgatgcggaagttcgctatggtatccgtgaatatgcctgtacctgtattgatatggtggctcgtcgtttgcgtttgtctttcttgaacgtacaggctgccagtgaggcacttccccatattgcagacatcatggcagatgaattgaaatggtccaaggaggaaaaggaaaaacaaatcaaggcttgcgaacacttcttgcacactcagatgggacagcaagtcaaccgtcaactcaaggagaagattccagtcaatctctccaaggaggaagttgatctgtacaagaaacgcttcgatacgatcgataaggacaagaaaggatacgtttccatcccggatatcaagcgtgcaatgcggacatatggtgatgctgaagttagtggagaagaactccacgacattctacgtgagatcgacaccaacatgaacggtcaggttgaattggaggaataccttcagatgatgtctgccatcaagtcgggctttatctcccactcacgattcgctgtcgtcgctgaacaggaggaaattcgcaaggaacaggaacgcctgcggaagcagattaccgttgaccgctccggtggtggtcaacgaaagtaaactaaagcatgcgacttctacgcatggttatgactaaagatccgttcgatcaaaccccacctcaacccatatttattgtgcgctaactttatcgtcattaaaacacttctcgtacataaaatgttcaaacgggcagggagcatggaaggagcatgacttcctcgaatccctgttatcgcacatttttgccgtcgttgtcgatgtacatatttgtcgtattctagcttctccggatgaagatcgttgttatgctacggcggatggcctattgttttcgagccgttcgtggttaggataggaattttacgatcgtgacgatcccgccaatttatttgttaggctacccgatttcacaaaaacacactatttattgaaaacaattttgtgatgattagatttttcaacgaaacgtttaattttatcgattctacattaagtcaaacagcaacgatgcatccatacaggaaggaagagcagaggagcctgcagtttggttgcaataattttaatttattattaacctgaacgaaatgatgacaattgctgaatattgtggtacggagccataatacagtaatacagtttcgaataagtgaataatgacataatatttattattatacatgatagacaaattattaataagtatgattcaaacaaaattaacgattacctacagaaataaaacttgttcgtaaactacat

SEQ ID NO: 901 - DNA, 2503 bp, Aedes aegypti
gtaaaatgcaccaatactccaggtacactaaccctagtgggtgcgaatgcgaagatatagaatttacttcacctttcgggttttaaatactttgctcttgccttcagaagacgtcagtcgccatccgtctcgcgttcggtttaagtcgtttaagttgctttgattcctgcgtaaaactcaacttgctggtactcgtgaaggtacttattcgtgcctttcgccacaagtaattagcgatccgacaaagtgttcttcatcggtcgaatattaatattcaatcaaatacctatttgcaaataaatagatgagtgttaatcgcttctttggagacacattttcgtctgaagccaaaaccagttcggcttttgggaattttccataagctgctgaaacgccggacttgtgcagtgtttgttgctagtggatgtgattatgcccgatatcaagattacgcccttgggggccggccaggatgtgggtcggagctgcattctgctgtcgatgggcggcaaaaatatcatgctggactgcggcatgcatatggggtataacgatgagcgccgctttccggatttctcgttcatcgttccggagggtcccatcacaaaccacatcgactgcgtcataatatcgcacttccatctggaccattgcggagcccttccctatatgacggagatgatcggctatacggggccaatttacatgacccatccgacgaaggccattgccccgattctgctggaagacatgcgaaaagttgcggtggaaagaaaaggtgaaagcaacttcttcaccacgcagatgataaaggattgcatgaagaaggtgattgccgtaacattgcatcagagcgtcatggtggacagtgagctggagatcaaggcgtattacgcgggccatgtgctgggggcggccatgttctggatcagggtcgggtcgcaatcggttgtctacaccggggactacaacatgaccccggatcgccatctgggagcggcctggatcgataagtgcaagccggatctgctgataacggagagtacgtatgcgacgacgattcgggattcaaagcggtgtcgggagcgggactttttgaagaaggtacatgaatgcgtcgctaaaggagggaaagtgttaattccggtcttcgcattggggcgtgcacaagagctatgcattctactcgaaacgtattgggagcgaatgaacctcaaatacccgatttatttcgctgtgggattgacggaaaaggccaacaactactacaaaatgttcattacctggaccaaccagaagatacgcaaaactttcgtacaacgcaacatgttcgacttcaagcatatcaaaccgtttgataagggctacattgataatccgggagcgatggttgtctttgcaacgcctggaatgcttcacgctgggctgtccctgcaaatatttaagaaatgggcgcctaacgaaaataacatggtaattatgcctggttattgtgtccagggaactgttgggcataaaattctcggaggtgctaagaaggtcgagtttgagaaccgccaggtggttgaagtgaaaatgtctgtagagtacatgagtttcagcgcacatgcagatgccaagggtatcatgcagctcattcaatactgtgagcccaaaaatgtaatgttggttcatggcgaagcggtcaaaatggaattcttgaaggagaagatcaaagaagaattccacatcgaatgttacacaccagcaaacggagaaacctgcgtgataaataccccaatcaagatcccagtagaagcatctacgactattttgaaagaagaagctaagaagtacaatgcagaaccaccagatccgaagcgaagacgtgtcatccatgggctgctgataatgaaggacaacaaaatctcactgatgagcatcgatgaaatctttagcgaatgcggaatcaatcgtcacgttatcaggttcatttcgaaagtgaaaattgacgatcccggccctactctgcggactattgaaaagctgtacaatttgctgaacgagcgcttatcgggctggaccgtatcgatgaatgaaaacggctcgatcaatgtggaatcggtcaacatcacaatcgaaggagacgaatcaatcgcaggaccagcgggatcggcttcggttcctcctccaccaccaaacgccccaacactgaacaaaatttgcagcgtgtcgtgggttaaccaggatgaagacctgggtagctatattctcggtttgttgcagagcttatagggcttgctagttgtttaagactcgatttaagtgattgatttttgtttatgcaagtttctagtagtagaaaaaaagcgaataaaatgggaaacatgaccttttcctcaataaaagtacaacagttactgtgttgtttaaaatcctaaataaagttttcgttaaataagcgaccgactgccaatctgatgatacgatcgatcgtgtacacactattatgggtcacctaatc

SEQ ID NO: 902 - DNA, 3339 bp, Aedes aegypti
atgaaaagcccacgcgaggctttactcgtgtcacggtgtcgacctcaataccttgacagcctggaagctccgcgcaatcaatcgctcgaccgtgacttgacgcacacatctcatctaatcctttcgtttcgctccatctctctatctatttcgcagcttcgcaaagagcaggaactccagaagcagaagctgtggcacgccttccaggagaagaacaaggagctggagctgcagcaccgccaacagctggaacacaagtttcaggaactccgcgatcagcgcctggcggaggaagccgcccagcagcgggaacggcgcgagcgcgaagcgatgaagcgcaaggagaagcaggacttcagcgccaacgccagctccgaggtgaaacagaagctgcagacgtttctcatccagaagaagcaagcggccgcctccaacggcatgaactcaccctcgttctatcggaatttgggtgtcgtcaaatcctcctcaggggagtcgatcccggccggtgctgtggtggccagttcgcacccgtacaagattccaccgccgccgccctcgtccatggccaagtacgactcggactttccactgcggaaaacagcctccgagtccaatctgctgaagattcgcatcaagcaacgggtaatcgagaaacgtgccatgaccggacctctcgcagccgctcgccgccaggaacgcctccagcaagccgcccaacgacggatgcagcagaagcaggctcaactgtcgggcagcggcgcagggcaaccgccaacccatccgcacctctcgacgctggccgcccaacatcccgcaaattgcgctgctggaacgcctgactctggcccgaattcaccgcctgccctgggaagccggggttcgccttcgaatgcacccatccaggaagagaacgaagatccacagtacggccctggcggtcgatctagcatcaacgatttatcactgttcagctcaccctcgatgccgaacatttcgctcggtaggccccacctggccgatgcgcactctaccaatcatcttgtgctttccccacagtctatggtaccgctgagacctcatcagatggtggccgccggtcagccacctccaatgtcccatcacccgccaccgttcggacacccgtccatgttggaccaactgacggagcagcaactgcaggcagctgctgcggcggccgcagttgccagtggtctatcgataaaccccacccatctgggagggattcacgctggcgttcctccggtctacggccatcccattaccgatgcccaggtggcacaggcacgactgcacaaacaaggtcatcggccgctcggtcgaacacaatccgcacctcttcccctcggtcatcccatgctgactggcaccggcagtggcgtcgtcaacatcggtcaaactcattacgagaacagtgatgccgaacgccaagcgtacgagcagcacctactcatgaagcagaaaatccgtcaaacggcgctcagtcgagccaactgtgtccgggagccgcaacttaaggaggaggtcgaatccggtgaggtgatcgatctcaccgacaagaagcaacctccgaaaaccacggtcataacctcaaacagtgtcatcaagagcacctcccataccacgttgctgcgagatccggcggaaagcttacagcagcagcagcacgttgagttcctacagtcccaagccctgatgcggcattcgatgcagatcggcatgctggaagatgcctacaatcggtctttgttgcgacctctttcacgaacctcatcgtctccgctggtccacttgggaacgccggcgagtagtaatcacccggtagcgcactccgacaccggtcaagatgacattccaccacccgtgaacctcaccatccagaaccggagccgctcgatgctcagctataccaacgaggggctcgccagctccggtccactccagttaaccacctcttcctcggcgtcggccatccccattcggttagtgcaacagaacgggaagcctaccacaggtcttgcttttgacagcctcatgctgaagcatacctgcgtctgcggggacaatgctgcccatcccgaacacagcgggagactccagagtatttgggctcgattgatggagacgggcttagcggcgaggtgtgataaacttcgctcccgtaaggccactcaggaagagttgcaatccgtacactcagaagcgcattccctcctcttcggtaccaatcaaatcaaccggcaaaaggtggatgccagtggggttagctttgtccgcttgggttgtggtggcgttggagtcgacctggacaccacttggaacgagcaccacacggcagccgctgcgcgaatggccgctggctgtgtcatagacctctgctacaaggctgcgaaaggtgaaattcggaacgggtttgccgtggttcgacctccaggtcaccacgcggaaccgaacgctgccatgggattctgcttcttcaactcgatagccatcgcggccaagctgctccggcagcggctgtcgtcggaaatccaacgggtattggtggtcgattgggacgtccaccacggcaacggaacgcagcaggtattctacgacgatccgagcgtactgtacctgtccatccaccgacatgacgacggaaacttcttccccgggacgggcggtccgaccgagtgcggtgccggtccgggattgggtttcaacgtgaacattgcctggtccggtgggctgaatccgcccctcggggacgcggagtatttggccgccttccgaacgatcgtgatgccaatcgcgcgggacttccagccggatatcgtgctggtgtcggctggatttgacgccgcgttcggacacccagcccccctcggaggctacatggtgtcgccggcgtgcttcgggtacctgacacgggaactgatgaagctggccgatgggaaggtcattttggcactggaaggcggttacgatctggcggcgatttgcgactccgcccaggagtgtgttcgagctttgttgggggatgatttggcgccgattgcggcaacggaactgtcccggccgccgtgtcagacggcggtggagacgctacagaagacgattgccatccagatgacgcactggccgtgtgtgaaacggctagcgcatactgtgagtttttcggcgatgcaggctgtgagtggagcgaccggtccggaccgagaggaatccgacacggtgacggcgatggccgggctgtcgatgcagccgcccaatagaacctcagacatctcccgggaagactcggaggaaccgatggatcaggatgaatcaaagtag

SEQ ID NO: 903 - DNA, 2104 bp, Aedes aegypti
cctattccagttggggtgtcagaaaatgtcagaaaaaacaagaagaagaaaaaagtatttaacaaactttccggcatacgtggagacgatcgggttcagattcaagttggatttttatcaccctcccccacacccaacaaacgtgtttgcaaacgcattatgcgccactttcgtaccgtaaaacgatgtttctttgataatgtgatccagaacttgcgaaataaaatgaaataatttcttggaatgagttctactaagtgaaagtataattggaaaatataagtatgacagtagatggaggtgaaaaaaaattgaggcgtaataattacatgttgaaatgccgctctgaaaccattatttgacaaagttttaaagagttcgtcacttctgtttgacgccttgttgtagaaaaatttgaattgaattttgtcaatcaaatcaataactcgatttgatagtcagaacttcacttctgctcgggactttcacttgatgcaaaaacataaattaaaaatcttgaaagcagaatgcagatgaattaagcttttttttaagaaactatttaagtttcccccgttttacggtactgcgtttgttcctaagcatgggaataatcacagtgattatccgagtagaagtacaacaatgaatcgaatgcatttgaagtgctgctttcggacaattaggtccgattttttctcccgcctcaaagtctgaaacattatgatgttgctgcttttgttggcaatcgttggagcatacgccacggcttggtggctcttggagaacttaattataccagctgcaaccatcacatggagttcgctcagattgtcagcgagtcggaagaaatcactcgctcagcggtatggcaagtgggcagttataaccggtgctaccgatggaatcggcaagggctttgctcaacaattggcaaataaaggtatgaatttggtgttgatttcccgctcggaagcaaagctgaacaaggttagtcaagaaattagaatcgcggcgggagttgaggtcaaaacgatcgtggcggatttttcccatggagaaccgatctacgagaacatccgcaagcagctcgaatctatcgatataggaatgcttgtgaacaacgtgggagtgatgggacgtttagacgcattcgaaaccctttcgcaacaacaccacctccagattgttaacgtcaacgtactgtcggtgctgttgatgacgcacgtagtcctccctaagatgaaaaaagctggccgaggcatcatcatcaatatttcatctggattggcagtctttcctggtccatatgttgcctcatattcggcatcgaaaagtttcggtcacagctttacgttggccttgcaggaagaacttcgaggttcgggcgttgagtgccaacttgtggtgccaggtttcgtcaggaccaatatgataaaaaatttgtcattcaagaacattggcggaaggctgctgccagatgtccatcagttttgcgccagtgccacgtggctgattggaaaaacgaatcaaacggccggacattggtatcagggcctttggaacgtgctcagcaacctcgttcctttctcgattcggaaaagagtgacgggacttatattcaaatacttgctggccggacagacggataaagttaagcgaacaagcctttgacattactggtgacgaagctatcttacattataagatatgtgaaagggttgttcataaaccaattctccgatatctatgagagggaattctctctcattctttccagacgacaatttagaaaattgtgtggactatagatattggaaacaccaaaagaatcgtcttttcaacatattcacatggttcatgaagggtgcttgtaaaaaacgtcaagtattttagttattataatatgtgttaatcgtttgtcaaccttgataaatccgatgatatgtgttgactgttactgctgtttatataaattaaatgaaaaataaaaacttgcttgtgtctcaacaattgctgagtaggttttattcctcaactgaattcgaaattcctttcataaatcgttttatgtcatcgagcaattggtacctattaaataata

SEQ ID NO: 904 - DNA, 1501 bp, Aedes aegypti
tggcagtttaggaaagtgcgtgttgttgatcttccggcgtctcacgccataaaagaattgcaaagagaatattctccattaatatgcatatgattgagctgattagtttaactcgaaggcaattttcattcccgcttttccatatccaacgatttttctcgtcaatccgcattttactaatgtgtttgatatcacgttgagcaaatgctcctagtctaaagctttcggtcagatcattaatttgcgaaaaaaaaaatataaaaaaattatatatcaacgaaaaataagccgaatgtcctagccagccggtagcatcactccttctcacaatcgaacggtgctcagtttggccaagtgtgtcgcgaaataaacatcttctcctcagttgctgtatgaccggacagtcgagcggtcgcaccacagcaacaacagttgagaagtcggggaaaaagacaatatacatcgattcatgcgaaaagacctgccgtaactgccgatgagtttgcaacgaatttgtcgtgtatgtctgttacaacctgtacaaatataaaagtgatagtgaaaatatagttcaaagagtgaaaatttatatttttcatgacaaagtagtcaatacattcaatcagacaaaatggattacaattccacgggtacgtttggtggactagagaattggtatacattcttagtggatgatctggcagacaaacggacagaggaactaccattgctttatagtccaatgtggcccatatcgattctgctgctgtattttggagcaatttatatctgggtaccaaactacatgaaaaatcggaaacctttcgagctgaagaacttcatgatcggctacaacctcttccaagtgatagcatgctacttattaattcgtcacttcttcaaacacggctggacgtttgactatctatattcatgcaaattgccggattactccaccaatgcgagtgctgtagggttcatgtatggatcctacttcaactatgtgatcaaggcaatcgaactgattgagacggttatgttcgcactgaggaagaaacagagccagatcagtgtacttcacgtttatcaccatgcttgcacattttccatcgcgtggatatttgcaaaatatgtcggaggaagtatgttgacatacacgatcattgtcaactcgacggtgcacatgtttatgtattcctattacctggtggcgattttctcgaaacaattgcctttcaagttaactgccgtcaagaaattcatcacggtgttccaaattgttcagctgttgagcattttggtaaacgttggattcgctatgcgcagtagttgctcaatccccatggtattggtgctgatctatttgccttatatggtggtgttgctgtcgatgtttttcaacttttattttagtacctacaggaagggtggaatatgtttaaccagtggtaaacaaactagtcctagcattatgcaaaaacacaaagagttataaactaga

SEQ ID NO: 905 - DNA, 14460 bp, Aedes aegypti
atggccaacggtgctgatgaccaatggctgaaagaggatggctacctgaatgtggacactgaatcggtgcggatcgtgtatcatccgtttctgaacgttatcctggtgtttacccgtgcgggggaagtgaaagtgctggacgtgaattcgggggtgatcctgcagagctaccatgtttccgaaaatctccctgcacagtgccgctaccttcccgaccaggacaaaatcctgttctggaatgggcggaacgtgtcgatgcggggcgactacaatggtgtcctgttgctcgataccatcctgcaagcgccagtttcacaagcggacgacatcatccgaatagagttgctcctatcggaggcggttctcttcgtgcagtgtttgcagaacctcgaacagcatgggctcgagaacacggccgacgtcatcaacgagctgacgctgaaaatcggtgaatcccagcagcatgcgaagcggggcatcaaagcgcagaagtgggaaacgatctgtttggagctgtcccattcgtcgctccggatggtagctggcgaaatggtgatgcagctgaagcgactcgatcgccacatcccagcgctagcgatcgcctccgccatcaatgaacggctgacggatttactggaaggcgcacgtgtcacggaaccatccgccctgaatcgtttctacatgttctcggaagcgacccggtggcaaacgtttgagggttggcctcacatggactacaagtgggttctgccggatcaaatggcccaggccgggttctatcactatccgggggacaatgggaacgacgaccgggcgatgtgttttacgtgcaatgtgtgcttggtttgctgggagaaaaccgacgaaccgtggagcgaacacgaacgccactctccggagtgtcccttcgtgaagggagaattcacccaaaatgtaccgctgtcggtaacgtatgcaacgagtccagcgattgccacggatggattctccatcatatcgtcgggtgatcgaggaaatgtgttctgcacgggaaatccttcagccgatgtgaccgtgtggaatgtggagcgtcagctggtcaaggttcacgacttcaaggtaaaactgcatccggacatcctcacgactacaagcatcagtcgaagcgcagttgtgaacagcatcgaacttacggctctctccacgtattatatgaaacatgcaggacttgttagcaaatcgaaagtggcatcactatctttgaaacctaaaatgctgggatcgaaaattgtttgtggaattcgggttagtagcactgaaacggtggatggtaaggacgaaacgggaaccacactgctgttgattgtctacaatgtggaagagtcaacgtcgtgtgacgaaggtgggaataagcagctgaaccaagcctccaatgtgtctgtcattccaccaacgaagaaatcctcacttagcaccattgacgaaaagtacgaagaagatattatgaagttcttttccggaaacacggagtcccagctgttggaatcgattgataaacttatccatttagaaacgttgaagaaagacgatccttcactgtgccagcagttcggtgcaaagctggatgacacgttgcgaaaactgatcgaaacttccggttccccttcggtgggttctgttgacaaaccggcatcggatgattccccatcttcgcccacgggacacatagaggttgtcaaaggacccacctgcatttcacttccaccaccacccccgtctgccgctggttccaacagtggttcatcaacgcagctgtcctctgtaaagtcctcgcaaccggatagcgtcaccagtatcagcaccatgggcagcagcagcagtccaaacacaaacgtaacatccgccctgtcgacggccaccagcagcgtttcgtccggcaattgtgacatcaactgtattccgctgcagtacatcgagattcccgccgagtggcacgataactatcgcatcgccgaagtgattccctcgagtgacaacaagtacctgctggtggttctgcggctaataccgaaagcggctgttgacgaaaaagaatcgaccaaagacgatgaaaaggaagtggtcgaaaagaaagacgagggagagaaagaggaacatgaagaggaaatcccggaggagattgaagaagcagactggaaaactgttttactgttgtacttcctgactgaagatggcttgataaaagctggcgatccagtggtaaaacagttatccgacgaagaaagtccggttgaaatcgttatgctaccgaaatgtgacagcagtggacgaagcttcggtggcccggacaccgaaaacggcatctttgtaatgacttgcgaggacggaaaattgcgaatattttcgctgaagactttgaacatagtatcggaagctagtgtaaaagacgaccactttgtatcggcgacctactgtaaaagtttggaacgcttgtgtggttgcaccgccaaaggttgtctacatttctactctttctacgacttggacgcggactcaagcgacgaacgagacgacgacgtgacgtgcgtgattggtaatggtagcaaggcagctgctggagcggatcggtcacaatacgctgaagtggatggcgctgcctctagcgcagctgccaatctactgaaatacgacgcaacaccctcgacttcgtcttcgcctccgcagatgccatccgcggtggcaacgggagccagtgtcaccggtgagaaccatctggccgatgcgctcctggcttacaagccagagctgtccctaccgaccctaaaggtgctatattcgctgacactgttcaacgaaatgttgactccatactcggccgaagttcccggctgttggagcgagctggaacaggcgcagaaacagcgacggcatccgcaacatcttcgacccggggacgacacccatctgaccaagacgtggcggctgcataacgatgccaccacctgggacgaacatctcatcgagctgaacttgccaaagtgtacttcgttggggcatatcgatttcaagttttccctttatcaaccctgcacgaacccaccggccattcaagtcacgcttctgaagcaaaagtccatcggactttgctcccgacgcaaaacccagtccatcaatcgcgtggatgaatcaatcaacttcaatatcggatccagcgatggaaaaaatttcatcgaaaatcctgtcctgagcgaagagtacctccaggcgaggaatgcggagattctggttggtccgatcgagctggcagcttgtatggatctcagtgagcaggccggttctgtgacacttaccagtccaaagttgctcaaatccaagggtcgaaactatttgctccacatcaaaacgatgactgacctgtcgaaggatggacaagcgaaaacgaggggctgcgattggttgaacgaaatatccatcaccgttcgctcgacccgccaggtgtacaaaatcgaaaacgaacgcgcccaacggctagccatgctggactccaatctgctgttgcgaaatttgctcaagctgctctacagcgcagacgaagccgtccacatgcaccagagcgtgatcttcgacatactgatttggatcgtgtcgattcgcctggtgcgctatcggtatccgaagaacccatttgcgaagaaggtcgttcccgcgacggagattaaggacgttgcgtccagcgatatcaacgtacagcagtcggagtgcattcagattgtggaacgccatctggaggaaatcattcgccattgtgtggtgaggggcaaccggagcattgcacacaagtgcgtcaagttcgtgagcgtcgctttggaaggagcccagaacatgatcgacaaggatgtgtgcaactcgtttgaaaagtcactgaaacaggcgatcatcacttgcctgccggagatcatccactcgaaccatgcaggagcgctgcgctggttcacgttgttgatttccggaacatccacgtgcgattcccacgggcccatttcggagaagtgcatttcgctgctgaaggatgttgccagtgagatgcgaaagcggagcaatccctacacagcgctgcttcggacgcgctttggactgtacggatcaccgttcgagtcggaaatattcgattcgcaaccgttgacgtccaagaacacgaatgtaacgtacacttgctcgataacgaaaaccaccggaacgggtgcgaacaaccaatcgatcgatttgcgatcggtgtgcatcgcggatgggtccgagttgaagttcctgccgttgcaactgaggcgcaggggaatcggtaatcatttcaagggattgctggaagtagaacctctacactatgtgtgcagttcgacgtcggatgcgacacggctagaaaacgtcgacgccaacaatatgcaggccaccaacatcattgatgatttcctgatggagaacacagctcagaacaacatcgagccggtacagaaccacattaagttggacgagaaggagaatctggacgacgatatgatgaacaacgtcaagaacattctggtggataagatcttctattcagcgttgaagaaacacaagatgaaggatgacttcatcaacgaagcgaaaaagtcggccgaggaaatcgaaatcgatccacaaaatgagagctttagtgaaattggaggctggggcccgtcgaacgaaccaaggatggtctttgtcggtggtaacgtcactgatgcctcctcgatcatagaggaaaagccgcaagcatcgatcaccttgaacaacaaaatccaagaattttttgaagatagcaatgccgacgaaaacgcaaatgggctgccatggcacaagctgctcagcacgcccccgaagcagatgatcgtcgtggaacggatgcactccggagcgatgcgttacataacgctagactttggcgcgcccatcatgttgactgatttgatcattcctgcgtgctcggatctggcttcgctgttcatcgatatctggtgtttcgaggaggaagccgacagtgtgcgattggtggtttcccaagacattggatcgcggacactggttttgagtgatctgcaacctccgccgatatgtcgttacttgaaaatcaccatcaccggacggtacggaatgtccgcaacacggtgtcgcattcccatgggatcattctacggccatatcgtcatcctagatcgagagggatatgccgatcccgtcatgaagtatctgaaaaacaagaaaaacaatctgcccgctcaggtcaaaattctcaaagcactgtacgaagacgttcactgccgatactgtctgtctagcagtaagctcatggatttgctacaaccactgatcaacagcgaatcctccaatattgcccacatgcaagcattcctcaaccgcatcaaagagaacaacggtgaccaaaccgggcctggccactccaacacatctgcgttccaggacaacgccaaagtatacgccgtctacgaggaatgcatggccttccaacaccaactcaatgtcatcaaacgggtcatcgatcggatcaaaatcccagcctccctgtcggatcttccgaagcaactcaaacctggtgccgccgacctgtcaccgatctacaccgacaagctgcgcgttctaagcgaatgccttatcgaaacgcttcttcatctaatcacaacatacggcgtccagaacgtggccaacatttatccgtacttcgatttggaaacttgcaaccttctgttcgacaccctggtcatcaatggggacacccacatccagctggcgacctgctcgatgctggtccggatgtgctgcttccaatcgtggtggggagaattcctcgccgataagttccttaaactgtactcgtcgcaaaacagtcgcattttcccgcaggatcgggtctttttccttctgacgtaccttggccgcaagagcatctcgatgggaagctgccgttcgatagtgatcgacgcgattctaaagagcctggcgaccctccttgcccccttgtcgcaaaacagtgccagcgggctcaacatttggtgcaacacggatctgaatcttctcgggtggatcttgctgttcctctccgtttgcctggacgatgggatggccgatggcaaaaaggaccaaagtaacatacggtgggatttcatgtccggtgaaacggacatggttaaagcgcggctaaacatgggaagtggtggactacgaaccttaaccaggacgttcaagaaacggttcctgcagagcaagcattacagctccggtttgaccgggggcaatggcaatgccgtaaccgagaagatgtacatgatgaactcggatccgctgcaaaccccggccagcaagctggagatggcactgaagcagcacgagaatcagctgaaaaagctgcagaacagtgtcaaacaatcgtttggagattacttcaacgaaatcaccaaagccaagtcggtcagacttccaggtggagagggaggttcgaggagttcccagtccggaagtagcggtagcggatcgaaagataccagctccgacagcagtacaaatgataacgaaacggctttcgataagggtctgaagtcgctcaagatcggtaacataatcgtggtgattcgcggattgattgggttgatcctgagtatggattttacctgcaacatggatcttttcttgatcacctgcaaaattatcgcacgattggtacttgcctgtagacccgttgtccagttgtccaagatcatcaccaccaatcagctgttgcaacttgtgcgaatagctgtgtgggagaaccagcaacagccgtgggctgtccatgcgatcacttgcctgctgcaggacgtgctggaagcggacaaaaactacaaggatgacgagaacgattccggaaattcttccggcgacgaagcaaccacctcttcggaagcaggcgcctccgcacggcctccggtgcccgatacggccttcaaacccgtacagcacaccgttcaagtgtccaaggacatcagctacgcggacgcggtgaaaaatcagctcccgtcgctgatggagtgcgacgacgccgacatggaggacatcctgattctggacgacatactggagcgggagaagcgggtcttcaagaaggacgccagtgcaaccgtcggcagcggacggaatggaatgaccttcctgtacaaaactgtatcatccgcgatggatgcccggctggaaaccggactggataccaatgtggaaataaccctcagaagactggccatgaaagcaacgttcaacttaatcgcgagtctaccccaagtaaccgcggtagatccactcaacccgacccaaatcgaacttaccgcgtggccagaatcgatcgttgaggcttggtccggtgaggaataccaacaaggtctagagaccaacaccatgctgacggaggtgttcgataacattctgtgcgacctgcacttggtagactcctggttgaacctggaaaagatcctacagctttggttgaccctcaatggggaaacgcttgagcaggtccccggtagcaatgcgcccggcttgaatgcgtactcgtttccgaaaataccgttcggggatcgcgccgtgcacggtttactgaaggcactggccacgcatcccaacatcaaactgcgggcgtggtgcctgggattccagtgcttgatcctggcatgtaaaccacacttcgaagcggactacatagactccacttcgaccaccagcgacaatcatttccgcaagatgggcaacctgattgtgggtgacgagaacttcgaaaaaatgctgctacgcttcttttccggcgtggatcaatcgatttcgtcgttggatagtaatcgatatgctggcccaacggtgtgcaagctggtgctggaattgttcatctggctcgagctaaagtgcaatgtgaaggaaaagttgaaagagatcctgttgaaggttatactgcatctggtgcagtttggtggtgcaatttccagtcaacaaggtccaatcgatgcccaaagtcagctgatcaaggagctgttgtcgttttcgtacgataaaagtgacctcggggtggccatgagtataatcgagtgtgtatctcacttggtgtacaacaacatcgtcaacgtagagaaactgtactgctaccgagcttccgaaaacagccattccaacagtatgtatgcgacgcgcttcggcagtttgttcgctaccgtcctgggtccagaaaatgctcgccagtgtaaaaccgttaccgacagcacagtgttgatcgatctcctgaagcttgcctcgatcctcgttaacacgaagaatccacgctctggtgagagcgataatgcagcagcgtacgaaagctcgacctttaatgagctgaacacttccaacgaaagccaaacggacgaaatcaaagccgaacagcagaacattgaacctagaccaaaaactccgtgctttgcagatacggtcctacagcactcgccaacgatgacccgcctgttgagcactctttcgcactgttccacttcttcgtttgcaatgctagtggcgtcgtccatgtactgcgcctctattaacgattcgaaaagtagcagcctaaccgaaccgcaaaccgttgctgatgccgtgtttcaactgctgctatacatttgccgagcagcaacacaaaccgtcctggtggtgaaaccgctgttcgattacattagcaacgcctctagtatgcgacacgcaatgcccaagctgcacctatccgagccgttcctgtggttcatcttgaaggtgctggacaactctgcctccattgccatattcaccgacatgggcggcattaaggtactctgtgagagcctggtacgaagcaatcgggttctcatcaatacccaaccaagcttggtatcgatgatcatgcaacgactgtccaagtcgtccaatctacaaaccaccctgtccagttcgtccaagaaaagttcaatggccgcgacgcggaacgaagacggcctgatcaactttgccccatactgtaccatttcatccgaaaaccaaaccgcccaacctgctgacgtcctcatccaagcaccaatcgcatcgcaccgccgggctcggaatccagcctggagctacctcttctatcccaacgaatcgcacgtggatctgacgatcacactgcctacggctgtgctcctgaaagaagttcaactacaaccccacctgtccactcttgcctcctgtccttcggcggttgcgatagaaatcacgcgcgacagtaatctagggccgattccgatcacccagccgatctccaccgtcggtatgacctgcatccggttgaagttcgcccagccggaaattgccaccagcgtgattatccgcctgtaccgaccccgcgatgccaccaatataggtctgacgcagatatcggttctcggaacgacgacctttagcgatgtgaacggtagctctgtggctggaccatgttgggttactggaacaacgccgccacaacctgcgaaacctgcatcggatggtacgagcgagttcttcaatgatgacgacaaagctgccaaaaccagcctcggttggttgcggatccttgcccagtgttccagcgtggtaatgtacaataccgatcgacagctcgctaaccgggtgatcatggcagcgacagaagttccaggtttcttggaagcatgctgttcgttgttgaacattgctccactttgtccgaacattgccctgaacaatttggagacagtgctgcttaagataggactgtacagtagggagtgtggtttgaatctgatcaacatcctgctgaaggaaagtatcccacaaacgttccaactgtgcaatgattcgatctcggatttgctgtaccatctctgcactacccacaacgagtacacgggtgatcgagtggaagcaatgttgtcgtgggttcagcgattgtacgaacgctaccatcagaaccaagtcaacagatttgtactgcacgctaccaatccgtacagtggattcattcggtgtctgtcgtcgattctgtggcaatcgtacgcaaccgatctcataccggatctgccaaacatgatcaccaaggaattgtttgaaacgctctacgattggaatcaggaattggaacatgacgaaccgttgaagaaagcgatcgatgccatgctgtgttcggtgtgctgcattcgaccggaactgtttacgatgctgttgaagcgcatgggtgtgctagttcctaatttgtctaccgatcttacagcatcgatctccgatgataggaaggatggagaatgtatcacggacgacatcaagcaggaagaatcggacgcggcggaatggtacagccatttggtgattgaagatttgagcaggttgaatttgtccaaagctcacttgtccacaatttcgatggcctgccagtcgccacttgccgtgcaacagctgattgattccggactgcctaatctgttgacatcggtcattttggagttctgccaccgggcgttgaatagcatcaatcaacaccaaaaacagtcggaggtggccagtggcagcgttgagcgcgataaccgcgaagtcttcgaagaggaacaagctgccgcagcagcggttgctgctgccactgccggagatggcgctgaggagtccagctcatgcatgaccgacgccgacaaggagcatcataagtattctggttccggagccaaggaggtcatctatcccatggtcaacgttcaaaaagtaacggaaatccttggattcttctcggaagtctgctcggaaggtcatatgcgcgactggctgggttgtttcgagggctcgatcttctgggaacctctgcttctgctgctgtgcaacaacaaattagcaaatatttctccggaggtgacaccccaagcgtgtctcgatctggaagaatgccttatcaagttcctgtccaaagttacatcgtgtcacccgaaaaatcaagaagttttcaccgttaacctgatttccgtgattcgaaagtctgattccgctaatgttagcagcagtggtgcttccgctgcaaatggcagcagctcgaaccagactggactcaacaatcgaccaaacagcggtagcaaatcatgcatatccggattcacgaggcgattagtgctacaaattttactggagagcgagaaaatcatggtcgctgtccaaagcgaacttccgcttcagaacaaagatcccaatccgtacaatctgagcaaccatccgtcgaaacggccgaacactcacttccggttgttctacctgagcaccaactccaaatgtcaggaaattatggaccattgtgtgacggcgtacaacaggatcatccccaacttgccatccgacagccgggtgagtgaggttctgatcggttcgtccaatgccggtgcggctgcaggcggcagcgacaaccggaaggaactgtgggaaatgggtctcggtatggagttcctcagtgtggcggctggcgtaacggccaaggataagcggctgaaggaggccaagaatcaggccaccaccatgaagcagaaggacatcctgtccatgttcaaaatgaaaattgatgatcccaagctaaccgccccggacggaataatcctccgacatacagccattcccaatggagtgatcacaagtgataccaccatctcgcaagttctagccatgttgaaatcgtcaggaatatctctttccacaccctgtataaatcttaatctgagccttgccaaaaacaaaccggacgtggagctgagctgcgaagccagcagctcttcgtcttcctcgccaatcctgaaggcggccgacttcataccgctgtcttcgccgctgcagatcttctccagccgcggtggcctttcgctgctggcgcactacttgccgatggtatatccggaatcgcccaaatcgcagcaacagctgggcgacaaggacaagagtccccccgggggcgactgggtgaaggtcgagcagaacgaggagatctacgaagatttggacgacattctggcggatgcttcgcccaaagcgcaagccatctcggccgtaccgcagcactcgttggctgcgtttgcattgttcctaaagctgcctgcctactccgaggtcctcctgcgggacaaggttcgagcccagtgtctactgcggttgatcctgggcgttaccggagacggcgaaggcaacgagatctacagtctggccctctcatcttcactgccaactctaccgttcgaagtgttccgacagctgctggatagttcaccattgaccacggacgatggcgtgctgctgcgaaggatggtcatcgaggtcggagccatccatctggtgttgaactgcttgagcatcttcacgcaccataacaatgcgggcgtgagcagcaattctaactcatcggataatatccaggccgctgccagcaataaaggagcgccaggtgccgctgccaacggtaccgacgatcagctaaactcagacgacaaaagccatatgtattgggcgaagggaacgggcttcggtaccggttcgacccaacagtcgtggaatgttgagcaggctctgcttcgtcagaagagcgaagaggaacatgttaccgtgttgcttcaggttctctcgagctacatcaatccaggcgacaagttcccttccaacttggatagcgaggtgctcagctaccgagaatgcagtgagacgttaccggagttgccgccgatcttcctcgatctgttgcagcagtcatgcatgattccagcgctgagttcctacctgaggaacgattccgtattggacatcacgcgtcacattccgctgtaccgggcgatcttacaactgttgagggccatctcgctttcgaatcaacttgtgtcgttgctggtcaacaagaacaatgagggcaagatttcgatcgcggcgctgctggccaacatgaaggcttgcgtggacacctatgcgagtcgtttgaaggttaacaaaaagtccaatctgaagggccaaacgcagaagataacggtcagcttggacgacggagacgacgagggtttggcactgttgattccggacatccaggagacgtcgctgctagtccaaaatgccaccaacgtggaagcgttgaccgtggaggaggaactgaaggaagtcgtaccgcgaccgatggccaaatcggtcgaggagaagtatatggaactgatgaaagcattgcaatttgatacctttgaaatgattgcggaaacggataacggttaccgctttaccatttcgcaccatttcgaaacgaacgtccgtatggccggcgaccgtggccacccggggcgggtgaaacggctggcccaagagacggtcaccctgtccactagtttgccactgtcctacagtagttctgtgtttgtgcgctgtgataccgataggttagatataatgaaagtattaatcaccggaccggctgagacgccgtacgccaacggttgcttcgagttcgatgtgtacttcccgcccgactatccgaactcgccgatgatgatcaacctggagacgaccggcaggaacacggtccgcttcaatccgaatttgtacaacgatggtaaggtgtgcttatcggtgctgaacacatggcatggtcgacccgaagagaagtggaatgcacatacgtcgagtttcctgcaggttctagtctcaattcaaagtctcatcctagttccggagccatactttaacgagccaggatttgagcgaagccgtggcacgccgactggatcgcacagttcgcgggagtacaacagcaacatctatcaggcctgtgtgcgatatgcaatgctggagcagctgaaaaatccttgtccatgcttcaaagaagtcatccacactcacttctggttgaaacggaacgaaatctgtgcacaaatcgaagactggatagcggagctgagtaaaccgctgctaaacgagcgtaccgggcgaacgatttccttcaacgcgatggtactccggcggcagtatcgccagctgcgggaggaatttgccaaattgaagccaccggaggggctagacgagagagactatccgttcatcacgggcatcactccgaccacaccctcagtcccggtttgtgcgggtgtggaaggctcgaacaatggtgccgtagattcgtcggccaccacgtcaccagaaaagcccctaacttcggatgacgacgaaagtgaactgctgctgcaatccagtcagggtgatatcgtgatgggcgaagacgaggacgacgacgacgcaaacgttgtcgacgaagtgatcatcaaggctgatgtagaggatgttgctgctggcagtagcagcagtagcaacgacaaagggaccagcattccggacgatgggcaggacgaaaatccggatctgtcccctgaagagattgtcctctcgatggtgtggtaa

SEQ ID NO: 906 - DNA, 2109 bp, Aedes aegypti; identical to SEQ ID NO: 394

SEQ ID NO: 907 - DNA, 873 bp, Aedes aegypti
tgtaaccgacaagggcaacatctgtgcaaagtgtctgggagatcaacaagttgatcctgagtggcagtcccttacgcgttgagcgttttcaagtgaacgtgattttcgaggaataggctgtgacggcgctttttattattatcggcgtaccgcaaaagatcgaaggacgatccgagttcagcctcaagtcgccgcatttacaggcgcaccgaagaaggtgttcatcgtaccatgttacaaacgagaatgaatccctaccacgtgatgacagcggcgctgctggttgccctgggtgtaatactgcaactgagctcgaccgaagcgtgcagttgtttgccggagcacgcacagacagcctactgcgatgccgagtatgtgattgtggcccaggtgctcagaaagtcgaaccgaaagcataacgacaataacgtttacaagatcgccatcaaaaaagaatacaagatgtcaccccgtgcacaaaaaatgctcaagcaaggaaagctcattacaccgtcaactgattccatgtgcggcatacagcttgaagtgaatcagctttatgcgattgccgccagagacattcacgttggcctgtgcaactttgtgcgcaagtacagcgatcttacgattgtggaaaagcgtggcctggctggtatctaccgtaaaggatgttcgtgtcagatcaagccttgcttcagcggcgagtgtaatatgacgatcggggcctgcaattggacaccgtgggcttcctgtgagacagattacggatcgtgcattccaacgcgaggatatctgattgatggatcaccggccaaatgccactggcgtcgatcaccactctatcaaaagtgtaaagtggacacaagagaatga

SEQ ID NO: 908 - DNA, 1843 bp, Aedes aegypti
gcatttcataccaactagacatatacgtaaccaagcaacttgacgatggcctgctacgatgtcgaacgcaaacagtggcggggcaaaacgcaaccaagtattctcaatccggaggccaatattgggcaaattgtgtggaatctactgtcgagaactccggacaaggttatccaaatcgatgccgatcgcgatagtcacatgacttgcgccgaaatgcgacgccgcattgtgcgagttgcgatgaatttacgacagcaagggtgccgtcgaggtgatatagtttcgctggtttgcaccaatagcgagaatgtggtaccggtttacatgggctgccttacaatcggactggtggtcaatcccttagcgccgatattcaacaaggatgacttggcacacatgatgcgacagactcagtccaaagttgtgttctgcgacgcagaaaatcgagaaactgttgaacaggccgctgaggacgcgatcgctgaaaaaccgatgatctatgtgatgggcgaaagtgctggagaagcgctgtccatcgatgggctcttaaggccggcgaaaggtgaagaacagttcgtccctaaatatctaggcgactccaagaaactgctggctatcattctgtgctcatctggtactaccggacttcccaagggcgtttgtctgtcacacgcccatctgatagagaacgatgtgtttgcagaagaactcaacgctggacccatattcaacttcagtgcactattctgggcaacggggatgtttgctgtgctcacctctctgtacaatcagcggcctcgagtgatcaccagcaaagcgttcaacgaggaaacgctgatcgacgtgatcgagaagtacaaagtggtagatgttttcacccctccgtcctacgttgcagccctggtgaatcatcctcgctttgccaaggccgacttcagtagtgtcaagaggtggacaatgggcggcgccatcgtatccgaggaattgcaaaccaagctggagaatcgtctacccaacgggatcgccaaatctgtctacggaacttcggaaatcggaatcgtaacggcggccgatactcctgtcgtccccggagcggttggaactatcatttcaaacttggaagtgaagatagtggacgagtgcgatcgaagattaggtcccatggaaaaaggggaaattcggttgaaattcaagcacaagattttggtaagtgtctagtcatgctgagtttgcagaagataactgaaattatcttatcgtagggctacctcaataacgagcaagcaactctggaagcattcgacgaggaagatttcttcaaatccggtgatattggatattttgatcagagtggccaactgtacgtggtcgaccggatcaaggacatcatcaagtataaaaattatcaaatttctccgtcggacctcgagtccgtcatcgaaaaaatcgaaggagttagccatgtttgcgtaacgggtgtgccagtggaggataaatcatccgatttggcaacggctgttatcgtacgcaaggaaggctcgacactgaccgaagagcaggtcctgcaagcggtcaacagccaagtgagtgacttcaagcagttgcgaggtggagtatattttgtggaaagattgcccacttcggctgcagggaaagttctcaggcgtgccgtgaaggagatggtgatcaatagactaagcatcaaatgatagttagcgacaataaatgaatgtttatactcaaatgcaaaaatatatcaacgcatttataagataaagtaaataaagatagatagaatagtgtatagatagtacataaattatattattcatggtgatttctt

SEQ ID NO: 909 - DNA, 1743 bp, Aedes aegypti
atgattgaccggaatgtttacatcacctacaatgacacaggatgcgtcgactccatgtcccatgcatattccgtcaatcattgccatgaaacgcgtcacatcaccgcctccaccttagaagatgtcccgatcatcatcggcagcgaggagttccgcaccaacaacgtacggcatcaggtgatgccgcacaaccacagcaaacagatcgccaaattctactgggccgacaagaagctcgtggagaaagccatcaagactgccaccgaaacgcaggtcaaatgggaccggacaccgatcagcgagcggatcaagatctggcagaaggcggccgacctgatggccgggccctatcgggcagaactgaacgccgccaccatgctcggccaggccaagactgtgatccaggcggaaatcgactctgccgcggagttgatagatttcattagaatgaacaccgtctatctgaaggaagccaccaaatatcagccgatcagcgaaaacagtaaggtgacgaagaactcgttacgattccgtggcatcgatggattcatcgcggccgtcagtccgttcaactttaccgccatcggtggaaatttagcttatactcctgctttgatgggcaatggagtcctgtggaaaccgtcggacacggctctcctctcgaactacgtcatcttcaagatcatgcgtgaggccggtgtcccacctggtgtggtcaatttcattccaaccgacggtcccgtctttggtgacaccatcaccgcctccccccatctggctggtatcaactttaccggctccgtacccaccttcaaccggctatggcgtcaggttggagagaacatcaatatctacaacaacttcccacgactgattggcgaatgcggtggcaagaactaccacttcgtgcatccgtcggcggatgtgcaatcggtcgtgaacggaaccatccggtcgtcgttcgaattctgcggccagaagtgctcagcttgctcgcgtatgtatgtcccagaatcgctgtggccgcaggttaaggaaggtctgataaagacccgggatacgctgaagatcggggatgttacggacttctccaccttcacttcggcggtgatcgacgataaggcatttaatcgaatcaagtcgtacatcgaccacgccaagagctcaaagaacctggaaatcattgccggtggtaagtgtgatgacagcaagggatacttcatcgaaccgacgatcgtgcagtcgaacgacccgaaggataaaatcatgactgaggaaatcttcggcccggtgctgagcatctacgtgtacaaagacaaggatctggaccagaccatgaagctggtgggcaactcaacgaggttcgccttgacgggtgccgtgttctccaaggatgaagcattcctgaagcgtgcattggaggaattcaaacttacggccggtaatttctatctcaacgacaagtctactggatccgtggttggacagcagccgtttggcggtggtcgaatgtcagagctggattttgctctcagccgaaagatgtgtggtccacggacgactgttcggagcacgttgtggttggcgggggaagcggtcgatctactggaagagctggattctgctttcagacaaaggatgtgcggtccacggatgaatcagaaggctagattctcctctcggttggcgggaaggcggtcgatgcgcctctggaagagctggattctgctttcagccgaataa

SEQ ID NO: 910 - DNA, 1179 bp, Aedes aegypti; identical to SEQ ID NO: 392

SEQ ID NO: 911 - DNA, 996 bp, Aedes aegypti
atgtccgtgaaagctaagctgatgaaggaaatcgccgagccgatggccacctctggaaacaaggtcaccatcgtcggtatcggccaagtcggtatggcatgtgcctttagtatcttgacccagagcgtgtccagcgaggtggctctgatcgatgtcaacgccgataaactgaagggagagatgttggatctgcagcacggttcggccttcatgaagaacgcccaaatcaatgccagcacagacttcgccgtctcggccggatcacgcctgatcgtcatcactgccggtgttcgccaaaaggaaggcgaaagccgtctgaacctggtccagcgcaactgcgacatcctgaagggcatcattcccaagctcgttgaactgagcccagactgtatcctgttggtcgtttccaacccggtcgatatcctcacctacgtggcctggaagctctccggcctgcccaagaaccgtgtcatcggttccggaaccaacctggattcgtctcggttccgtttcctcatgtctcagcgactgggagttgccccaacctcgtgccacggctggattatcggtgagcatggtgacagttcggttccagtttggtctggcgtcaacgttgctggcgtgcgcctctcagaactcaacccgtccattggcaccgccgatgatgaggaaaagtggggcgaactacactacgaagtcgtcaacagtgcctacgaagtcatccggctgaaggggtacacttcctgggctattggtttgagcgttgcttcgctggcctcggctctgctcagaaatacttacaacgttcatgccgtttccactttggttaacggcgagcaaggaatcaccgacgaggtgtacctatcactgccatgcgtcctcggcaggaacggcgtcacgcacgtcgtcaagcagattttgactgaagctgaaaccaagaagctgcaggaatcggcccgcatcatggccgaagttcaggccggaatcaagttttaa

SEQ ID NO: 912 - DNA, 1258 bp, Aedes aegypti
gatagaaaaccataattgcttacaggatgttttaagtagaatattcttcaattcataactattttacggtaaatattgtggtaactacacaaaagatgtttattctgatagtgttttctgtgcttatttgtacgtttcaaacctgtttctccgaaattggatgtcgcgatgagaacaaccagttagtggattggtactatctatataaattgccagaagcagctgcagatcagcattcgccgaaggacgtaacatcaggattacattacgcgtttattacatcgcacggtcctaatggttggcgagtgtccgagaaaaatgtgaaccaaagcgagagcattcctggaagaactttgaagcccttgctgaatggtgacgaagatttgttgaaaattctttacaacgatgaacctccgagaggcgaaacggacggttccagggggcacaccaaaggagtcgttgctaccgatggtagcactggattttggttgattcattcagttccaaaatttccaccgatgttgaatgagtcgtatcattatcctgatacaggtaaaatctacggccaaagctttctatgcgtgagtgtacgagcagaccagatggaaaccattggacaacagttgatcatgaacgaaccgcacgtttattcgttccatgttccggaagctttgaaggaacgattccccaaattagtccaggcaacggaaatgaaaccaatcaagaagccgccatactggagtgcagtcaatttgaaatccgttggtggaataaacttccattccttcgccaaaagtcgtcagttcaagaaagagctgtactcggactttatagcgccatcgttgcaagtagatttgctggtcgaaacttggcagcatggggccggaaatctgccaagcgactgtacgacctcacagtggaaggtgatgaatgtgaagggagtcaaggtgaccgaaaagtatcaatttaccaccctgaaggatcactcgaagtgggcggtttcagtgccaggagaccgagacttcatctgtgttggggacatcaatcgacaggagcatcagaaagcacgaggtggcggaagtgtctgcagtcagatagatgggattgtccaaacctatcgcgtgatggtggagaacattgaaagttgtccgaagaaatgaataattgaatcaaattatagataccaggtgaactaaaaatttgtatgatctcattttgaaattaaattttgaattataataaaatacttttacatttt

SEQ ID NO: 913 - DNA, 1597 bp, Aedes aegypti
gatttaagttatgaagtatgttgcgttggtctgtttgctgctgaccgtgggctttgccaacggacagaggacttttccggatgatttcatgtttggcgttggaacgtccgcgtatcagattgaaggtgcttgggatgaagacggtaaaggtgagtccatctgggatcatctggtgcacaaccatcccgaaaagattgccgatcgttccaatggcgacgtagcttgtgatagctatcatctgtggcgacgagatgtgcaaatgcttaaagacttgggagttgacatctaccggttttcgattgcatggacacgtatcatgcctaccggtatcagtaaccagattaacatgaaaggtgtggaatactacaacaatctcatcaatgctctactggaaaatgacatcacaccatttgtggtgttataccactgggatctaccgcaaagactacaggagatgggaggctggacgaatcgcgaagtcataggccattttcgagaatacgctcgatttgcattcgaaacattcggcgatcgtgttaaatggtggacaacttttaacgagccattgcaaacctgcagacagtcttatgagtgggatgcaatggctccagggcttgatttccccggcattcctagttatctctgcactcatcatgtactgctttcccatgcagaagctgccgcagtataccgaaaacagtttcaatcaagtcaaggtgggaaaatcggtataaccatcgattcttcctgggcggagcccaatagtaattcgtcagatgatttggaagcctcagacatcaatctgcgattcttccttggatggttcgcaaaccctatcttctctgccgaaggcaactacccacaagtgatgatcgatcgcattggtaacttcagtgcatcacaaggtttcgtcaagtctcgtctaccagtgtttacacaggaggaaatcaacatgctcaaaggatctgcagatttcttcggattcaacacatacactgcgtacaaagtttacaagaatgatgctgcaaatttggcaaactttccagaaccatcatatgatcatgatcgcggtatcgtagaataccaggaccccaattggccagaaaccggttcatcctggttccgattgtatccgaggggaatctacaagctgttgaaatggatcaacaaggagtacaataatccactggtcttcgtaactgaaaatggttacagcgatcttggtggaacccgtgatgaaaagcgtgttaagttcttcaaagatcacttgaactccgtgctggatgctgttgcggaaggatgcaatgttaagggctacgttgcctggagtttgatggacaactttgaatggcgagctgggctgtcagagagatttggtttgtactttgtggactacaatcatccaaatctgactcgagttcagaaatcttcggccaaattctacgcgaatgtaatagaaacacgctcgattaatatgaccttgatgccagaaccggaggagtatactttgtatgaacgcggaactagttcgacgatagttcctacaatttatattattttagctggtgtgatgctgattttgagacagttgtgttag

SEQ ID NO: 914 - DNA, 1946 bp, Aedes aegypti
cgtcttttgtgtgtggtgtcgtttgaaagccgaaatcgtatagtgctgcaagatgtccaacaaggtgctattatccgaagactctgtctaccagcagatccagcaatattataaagagcatggtgcttcgattaacattaagaagattttccaagaggacgatattcgtttcgataagttcagcctaaaactgaacacgcctaaggatggggaaattttgctggattactccaagaaccgtatcaccgacgaggcctggaacatgctgctggagctggccgaatcgcgagatgtggtcaaaacccgtaacgatatgttcaacggcgaacgtatcaatatcaccgagaaccgagcggtgctgcatattgcgctgagaaatcgttcaaataaaccgatcatggttgatggtaaggatgtaatgcctgaagtcaatggcgttctggagcacatgaaggagtttaccgaacaggttctgaatggagtatggcgcggctataccaataagaaaatcagcgatgtggtcaacatcggtatcggtggttcggatttgggtccactgatggtctcggaggctctgaaggcctacaacaccggtattcgttctcatttcgtatccaacgtcgatggtactcatattgcggaaaccttgaagaagctggacccagaaacgactctgttcattattgcttctaagacgtttaccactcaggaaaccatcaccaatgccactgccgccaagcggtggttcttggagcgctgcggtgagcaggagcatgtggccaaacactttgtcgccctgtccaccaataaggagaaggtcgctgccttcggcatcaacaccaagaacatgttcgaattctgggactgggttggtggacgttactcgctctggtccgccatcggactgtccatttcgctggccatcggattcgacaacttcgaaaagctgctggacggtgcccactacatggacaaccatttcctgaatgctcctttgaatgaaaatgctccggtcattttggccctgatgggcatttggtactcgaatttctacggagcggagacacacgccctactgccctacgatcagtatttgcaccgctttgccgcctacttccagcagggcgatatggaaagtaacggcaagggtgtgaccaaggccggaaagcgagtgaacttcaacaccggtccaatcgtgtggggagaacccggtaccaacggacagcatgcgttctaccagctgattcatcagggcacccgtctgattccgtgtgacttcatcgcaccggtcttcacccacaacccggtggagaatggtggcatgcataagattctgctggccaactatctcgcccagacggaagcgttgatgatgggcaaaaccgaagagcaggcccgtgccgagttggaaagtgctggcatgtccggcgaaaagctagaacagctactgccgcacaaggtcttcaccggaaaccgcccgaccaattcgatcctagtgaaaaagatcacgccattcgtgctgggagcgctgattgccatgtacgaacacaagatcttcacccagggtgtcatctgggacgtgaactcgttcgaccagtggggcgtcgagctgggcaaacaactggccaaggccatcgaagtcgatctgaatgattcgaacaagactacctcgcacgattcgtccaccaacggattgatcaacttcatcaaggtccactgggaacaggatggaatctaagcatgttatctcaaacgaagtaagaaaaagtacacatattatggttaatgttatcgaatatataaataaaacttaaattattcttggacgtacgttcgtttaaatatagttgattgaaattactaaacgtagcacagcattgcaactctaattggcggaaacttaaaaacagatgctttctataataaagatgaaacaaacatgtttg

SEQ ID NO: 915 - DNA, 1988 bp, Aedes aegypti
ctaccgttgggtccggtcataacacaaagtaacttgtttccgacccaattttctatctcacttttttcactttctgatacttatacgatttttattaccatgaattaatgtagcacgtcatactgacttcaaattttaaactagtcggggataaatgaaaaaaaaatgccattttagttttgatttttcatacttgttttattttttctttttccttaacaataaacaagatttttaacccaaggctagttcatctcttggtcccgagattaaaagattgggttaaaaatctcgtttattattaagaaaacttcccttccgaagtaagtcgtcattataactcttacgccatattgataggagagaaactaatcaaggaaattatttcccgtcgtatatgatttattgaaaaatacgatttcaaaaccaaaaaacagttttattctatttcaatttattgtttccatcatgcagttcagtgtataagattgaagtatctatttaatttaatttaaaaaataacttgcatatactcaattgagcattcattatgtatacgacacatttgcgtataacgataagttaaaaataggtacacataacaaagtccatactcgttatcattttcctttatgcaagcaacagttttgtcagtctcacaccttgctacactgaaaggctatggtttcatcattattcccattttttataagttattaatgattcaggaacatattttaggaacacaatgaagtatttagggtggcaaaaataaatatttattaggtgatatttagcttttgtttgtgaataaattggcacaatcaagtcatttattaacacatacgaagatagccatcggaacatgttactgctaggtttttcaataatgatgcgatctggactggttagcactcggcgttactgcagttcctcagcgatcgctgccaagaagtggatttacgcaaaagtattcaaaggagaaccaacgcagcacaactttcaattggaggtggacaaattgccggctttgaaagatggagatatccttgcgcaggccgagtacatcagtgtcgatccgtacatgcgaccctatatgatggcttacccagccggatcgctcatgattggtggtcaagtgggaaaggtgatcgacagcaagaacgcttccttccccgtgggatcttcaatattcggccaatttggttggcgtacgcacaccgtctgcaatccagaaacgatgaagaaagatcaaccttacctactgcctagtttcggaaatttgcctaccagtttggctcttggcgtgctgggaatgccgggcaatacggcctattttggattgctggaattgtgctcgccaaagaagggagaaactgtggttgtaagtggtgcagcaggagctgtaggtaaccacgttggtcaaattgctaagaatctaggatgcagagtagttggaatcgccggatccgatgccaaatgccagtggttgaaggacctaggattcgatgaagctatcaattataagacagctaacatatttgctgaattgaagaaggctgccccaaaaggggtagacgtctattttgacaatgtaggcggtcaaatatccgaaacggttatcaaacaaatgaatttatatggaaggattgcagtttgtggaaccatatccaattataacactgcaatcgaaaaggtttcggacccattgagacagatggtctttaagcaactgaaaatggaaggattcgtggtatggcgctggaacgataggtggatggaaggaattgaggccaacttgaagtggataaacgagggtaaactgaaatggcacgaaaccgtaacggaaggcttcgaaaatttaccaatggcatttattgacatgttgaagggaggcaacactggtaaggcggttgtgaaaattatttaacttttttttttgaatgttatattctaaataaaccttcaaaatatattaataagcgact

SEQ ID NO: 916 - DNA, 1639 bp, Aedes aegypti
ttgtattaggacagcactttgaagaggatcggatttatgttatgaagtgttttgcgttggtctgtttgctgctgctgaccgtgggctttgccaacggacagaggacttttccggatgacttcatgtttggcgttggaacgtctgcgtatcagattgaaggcgcatgggatgaagacggtaaaggtgaatctatctgggatcatctggtgcacaaccatcccgaaaagattgccgatcgttccaatggcgacgtcgcttgcgatagctatcatctgtggcgacgagatgtgcaaatgcttaaagatctaggcgttgacatctaccggttttcgattgcatggacacgtatcatgcctaccggtatcagtaaccagattaacatgaaaggtgtggaatactacaacaatctcatcaatgctctactggaaaatgacatcacaccatttgtggtgttataccactgggatctacctcaaagactacaggaaatgggaggctggacgaatcgcgaagtcataggccattttcgagaatacgctcgatttgcattcgaaacattcggcgatcgtgttaaatggtggacaacttttaacgaaccattgcaaacctgcagacagtcttatgagtgggatgcaatggctccagggctcgattttcccggcattcctagttatctctgcactcatcatgtactgctttcccatgcagaagctgccgcagtttaccgacaacagttccaaccaagtcaagggggtaaaatcggtataaccatcgattcttcatgggcagagcccaacagtagttcatcggatgatttggaagcttcggatatcaatttgcgattcttccttgggtggttcgcaaatcctatcttctccgccgaaggcaactacccacaagtgatgatcgatcgcattggtaacttcagtgcctcgcaaggtttcgtcaagtctcgtctaccagcgtttacacaagaggaagtcaacaagctcaaaggctcggcagatttcttcggattcaacacctacactgcgtacaaagtttacaaaaatgatgctgctaatttggcaaactttccagtaccatcatatgatcatgatcgcggtatcgtagaatatcaggatcccaattggccagaaaccggttcaacctggttccgattgtatccaaggggaatctacaagctgttgaaatggattaacaaagagtacaataatccactggtgttcgttaccgaaaatggttacagcgatcttggtggaacccgtgatgaaaaacgtgttaagttcttcaaagatcacttgaactccgtgctggatgctgttgcggaaggatgcaatgttaagggctacgttgcgtggagtttgatggacaactttgaatggcgagctgggctatcagagagatttggtttgtactttgtggactacaatcatccaaatctgactcgagttcagaaatcttcggccaaattctacgctaatgtgatagcaacacgctcgattaatatgaccttgatgccagaaccggaggagtatactttgtatgagcgcggaactagttcgacgatagttcctacaatttatattattttagctggtgtgatgctgattttgagacagttgtgttagaaaagact

SEQ ID NO: 917 - DNA, 1910 bp, Aedes aegypti
cggaacggtaaagtggacagcgcttagtttcctgtattaacaaaatgttcagaacgggagtgcaacttgtatccaaaactggctgcagtttggctcaaaactcaagatgtctttccatcacatcgactaatctgaagcgggcacaatcacccgctaacatgtctttcatggcgaacctgtttcgaggagaaattcagacttcccaagtgttcccttacccggaagcagtcgatcaagagcaaagggagtacattcaatccttgacggatcccgtacatcgattcttcgctgaacgctacgacgcggcagaaagtgaaaagctgaatggcccctcggaaagcgtaacggacgctctgtgggaaatgggatattacggcctgatggctcctgaagagtacggaggactaaacctttccaacaccggttacgcaaccatgggagacgcagttggagcagtagatctaggtttagcggtagttctaggagcgcatcaaagtatcggatggaaagggattctgctgtacggtaccgaagagcagaagcgtaaatatctgccgatggttgtgagcggtaaaacgacagctgctttcgccttaacggaacccagctctggttcggacgccggatccatcagaagcaaagctgttaaaagtccttgcggcaagttctacacgctaaatggatccaagttatggattacgggtggtggaatagccaatgtgttcacggtttttgcacaaactgaggttacagacccccgcacaggacaaaagagggacaaggtaactgggttcatcgttgagcgtgacttcggtggtttgacgagtggacctgcggaggacaagatgggtattcgttgttcgaacaccacagaagttttcttcgacgatgtgaaagttccggttgaaaacgtactcggaggagaaggcaacgggtttaaggttgcaatgaacattctgaacaacggaagatttggaatggctgctaccctagctggaacaatgcgagcttgtatagctaaggcgactgaccatgcaaactctcgggttcaattcggaaagaaaatcaaagaattcggaaacgtccaggaaaaattggctcgaatggcaatgttgcagtatgtgacacaaacaatggcctatatggttgctggaaatatggatacaggttcaaaggattaccacttggaagctgcgatttccaaagtattctcgtcggaagcagcgtggcacgtttgcgatgaagccattcaaattttgggcggaaacggattcatgaaatcggctgggcttgagaaaatattgcgggacattagaatctacaagatcttcgaaggagccaacgatgtgttacgactgtttgtagcgttaaccggaattcagtatgctggatcacatttgaaagaaatccagcgagcgttcaagaacccgacggccaacttgggattgatatttaaggaaggttctcgaagggcagcccgaagcatgggagtaggtggatccgacttgagccaatttgttgctgagccattgaaggattcggcaaaacagtgctctgagagcatagacatgttttcgttggcagttgaatcattgctcattaagtacggcaaacggatcgttgatgaacagtttttgttgactcgtttggctgacagtgccatcgatatctatgctatggcaactgtactgtcacgtgcatcccgggcattgaacaaaaatctaccctccgcagagcacgagatgatgatgacgaaggcttggtgtgttgaggcaaacaacagagtcaataacaatctgaagcgagtgaacaagcatctgcacttggagagttataaaacgctgtctctcatagcaaacaatatctgtgagaacggaggtgtagtgcaaaaactgcccttcgaaatctaa

SEQ ID NO: 918 - DNA, 1177 bp, Aedes aegypti
aggataccaagattatttacagctattatttacccattgacgggtactttcatgttagcgtctgtagttttgagtgaaaatttctcggatttcagtaaagcaaatggacagtgtttttttaacatatgtcacatttgatattgatgctaccgggcttgcattttttttgtttcgattaatcaaaattaacctaatcgctaatcacgagatcaagcagttgcattacatattttaaaatttcgtgtcctagttgaatgaaaagcacaatcgttgaagccctgtaagtaccgaatcgaggcgttttcgctgaataccattaaatttagtcaatgtcggattgtgtccagcttctttattgtgttgaactgtgattctcttacttcgtcacgttaagtagttagcgactatgttacaacttttaaggcaatttagtcgagtccagaaatgttcactcacaaaaatgtcgacatcagcagctgcagggaaaccgatagttccttcacaacacaacttggtttggattgacctggaaatgaccggtttggaggtggaaaaggatcgtatcctggagatagcctgcgtaatcaccaataagaacttggaaatcctggaacgtggtccggatattgttatccacgagccggaagaggtgctgaacgcaatgaatgaatggtgccaaaccaatcatagcaaaacggggctgatccaggcggttcgtgaatcgaaaatcgatctgcagaaagctgagcaaatggtgctggatttcgtcaaaaagtattgcccggaaaaggcttgcccactggcgggaaatacaatttatatggacagaatgttcctgtatcgatatatgccgcagttgaacgaatatctgcactatcgcatcatagatgtgagcacggttaaagaactgtgcaaacgctggaatggggcagtctttagcaactgtccgccgaaaaagttggtgcaccgagcgctggacgacatcgaggaaagcatacaggagttaaaatactacaaagattatatgtttaaaaaatagttttagcttagctagggattacagggtctctaagacagaaagaatattagacttatagcttttgattcgactttcgagtaactaaataattgtaaagctttacatattgaataaattgtgaagaaagattattacttt

SEQ ID NO: 919 - DNA, 1155 bp, Aedes aegypti
gaagaaaccgattgccaacatttctccaaagtagtctcccgagtcggatcagttagataatattaaattacgtcgtgtgcacacgatttttttatatttgtccgtcatttgaaaattaattattcaaagtcatgaattttgaacaacaagtggttttgattactggagcatcttctggaattggagaagcaacagcaaagtatctatccaatttaggagcatcgttagttcttactgggcgtaattcagagcatctcacaagagtcggagaagcatgcgaagcgatttcaaaaaccactccattgttactgattgctgacgtcactaatatagatgataacaagagagttatcgatgaaactatcgctaaatatggaaaactggatgtacttattaataatgctggcatactgtcaaacggatcaattgaaaacaccagtctccaacaatatgatgaaataatgaatacaaacgttagagctgtttatcatttgacaatgctggcagtacctcatttaataaaaagcaaaggaaacatcgtaaatgtaagcagtgtagctggaaacaggtcctttcccggaatattagcttacggaatgtctaaggcagcaatcgatcaattcactcgctgtacggccttagaactagcccccaagcaggttcgcgtgaatgctgtaaatccgggtgtcatagtaactgatattcacaagcgaggaggaatggatgaagaaacgtatgcagagtttttggaaaaatgcaaacagactcatgcgttaggtcgtccaggcgaatcaatggaagttgcttcagtaatagcatttcttgcatctgatgctgctagttttataacaggagtgaatttaaatgtggatggtggacgtcacgctatgtgcccacggtgaacgtttttgaagaaaaacacacatctcaagaatttgttgttttatatttgtttactttgataattaatgtaatgttcttggacaggatcttgagatgttaatggataaaatatatgtataattatcgatcttacattattctaatgaatttcacatcttccattgttatgctgatcattatcagcattaggaaattcttcaaaactgaaaagggcaagttattgataaaagtgaagttagtactacgccgttt

SEQ ID NO: 920 - DNA, 1032 bp, Aedes aegypti
atgagtgtgatagcgttcacatggttggttcttcaaattgcaatagttacgggagtgcgtccatgttcgtataacgagttttgtatcaacatcaggcagtgtccaacctataaacagtatgacaacgaaccgttccagaactggccgtcagatataaaaacgaaggccagggaagcgcactgtaacagcgaagtagttggcaaccagacgatcgtgagcatatgctgcccctcggtcatgaacagtgagacttgtggggctcagggagatgatcgtatttccaagggccaggtggcgcagccattttcgtatcgatggatggccctgctacagagcgataatggccggttcgagtgcggagggacgctcgtgagtagcagatacgtcctcacggctgcccattgccttaagcgggcaaggataatatcggtacggctaggagaaaacgatatcgacaaaatcgaagactgcataactgcggatggcgaaacaatatgtgcacctcctccacaggacatccttgtcgacaggaaagtcatacaccccaatcataccaataggtacaaactgaacgatattgctctgttgcgattggcaagtcccgccattttgggtcatagtgtcgcaacggtttgtctccccgatggaactccggagcagcggaagctaaaaccatggagctacattgtgacaggctggggaaagactgaaaacggaacttcgtcgagtgtgctgcgatttgcagatcttccctcggtgccgttagagacatgttccgtcatgattcgaaacatccattcgaccatcaggctggacgagagtcacgtttgtgctggtggtgtagacctgaaggatcactgcaagggggattccggaggtcctttgcattacgtttcgaacactacggcccgattcgtccagcagggtgtggttgcatttggtatcaggacttgcggagaggagagtaaaccaggcgtttataccaatgtagggcatttcatcagttggctggttcaacacgttgatgagtaa

SEQ ID NO: 921 - DNA, 969 bp, Aedes aegypti
atggatcgttgggttcatcagctcggctcgtgtgtgagattacttgtgaagtatttgagtgcacattcaccctgcgtaaccattgatggattggatgggaaatgcgttccggtggatagctgccaatggatcctgtcaaaggcttccgtcgtgagtggcatctatgagcgaagtgaatgtggcactgcttccgattttacgcccttggtatgttgtcccaggtggcggaatgcagaaaactgtggtcagggcgtaaccgactcgtttccgtgggttgtcagcatagtttaccgtgtgaaatggaagattttttcacagaggtgtacaggatctttgattaatagccaatacgcactgacagtagcgcactgcattgcagacttttcattctattggaaaccttacagcgttcgagtgaatagagataccacctacaaggactacgcaatactccgcagcatagttcacccaagctacaaccgattcaacctcaacaaagatcacgatgtgtcccttctgaagctggttgataaagtcgttttcgacgattatgttcaacccatttgcttgacgcgagaaagagatcagcacagtacactgtatgagggccaaatgttaaccattttttcaaggggtccaacagaagcaggtcaaatatccagccaaaaacatccaattgccatcccattgcgaaatgcatcaatttgcaagaaaatctataaagaaattcgaattgaactgtctcgatcgcagctgtgcgtaggtggtgaacccggaagggattcctgccgtggggattccggcggtccactgatgctacaggcaatagattctatgacccctcgctggtatcaagttggccttgtgagcttgggcccggaaaagtgcggcggaacgattcccggcatctacgtcaaactgctcgactatctcgaatggatcgaagcaaccgtggatgaagttgcctag

SEQ ID NO: 922 - DNA, 1159 bp, Aedes aegypti
aaaacaaaatttgctaaaaagctgtcattctcataaaacgtgcgcgatcaaaacaaaacaaatttaaccggtagattttggtgctcgatttactgttcaaattttaattagattttcccgcaaatcccgacatgagtttcgccggacccaaagccgtgatcgaggagggagacacggtcattctgtacctcaccgtgacgaacgtgtacgccatagaagccgttccgcagatcaaaaacaagaagggagaatttgtggagtacgtgttccagaccaactttggcgccctgaaggtcaaggacattatcggggtccagtatggatcgaaggtagaactatccaaaggctgggcccacgttttgcagccgaatccggaactgtggacacaaaccctcccgcaccgtacccagattctgtacaccccggacatcagtatgatcctgtatcaactggaagtcaaacccggcagcgtggtgattgaatcgggaaccggttccggatcgttgtcacattacttcctacgagccatccgaccaagtggattcctgtacacgttcgacttccacgaggaacgggttcaaaaagcacacgacgagttcaaaagccacggtttgggcgacttcgttaaggtgacccagagggacgtttgcgagaagggtttcggtgaggaggttgacggaaaggcggatgccgtgttcttggatctgccggctcctcagttggcgattccgcatgcagtcaaggcgatgaaggaatcaggtggcagactttgctcgttctcaccgtgcatcgagcaatcgttgcgggtctgcgaggccctggagcagcacgggttcgtagatgtcgtcaatctggaagtgcttcaagtggaagacatcgttcgaacacggaacgtccccgtgatggatttggagtttctgaaacacaagaaaaccgacgtggactcgaaggatgccaaaacgccaaaggaaaccaagaaatatatcacctctagtgcaccgaattccatggccggacatacgggatacctgacggtcgccgagttgccaccgttgtttgcgcggtagttgtaggtttggtaaaggctatcgtttttttttttggttttaatttaaataaaaacgttttcaaacatgaaatctttgcctaataaatctta

SEQ ID NO: 923 - DNA, 576 bp, Aedes aegypti
atggcgatgttttcaagaccatttgtattttttatttgctgtccaatacttcgaaactgtggccattgtggtgaaccagagcaggaaatagtaaaccgaattaccggtggcagtgacgtagagccgggatcccacccatgggcagctttgctagtctacactctaggcagaggagtcaccaaatcgctctgtggaggggcgttgatcaatcttcaaactgttttgaccgccgcgcattgtatcgaaggtcttcccagaaattggagaatgcatagggttcgcctaggcgaatggaatgtcgataaccttcacagttgtaagaacatagaaaatggagaaatatgcaatctagaaccggaagtacgacgtgccatattgcatgaccattataatcgactatcaaacagtcatctaaacgacattgcacttctacaattagcagagaaggtcacaataagcaaatacatcaaacctatttgtcttccactagacaaaactattcagctaatgcctatagaaaatgaaccatttactgtagtcggatggggagagactgagaacgcccaacacttctag

SEQ ID NO: 924 - DNA, 1941 bp, Aedes aegypti
atggagcctcctggtggacttccaccggataaagatggacataagcttctccaacagcagcacagtctcacacagaatcagaaaaatcctcagtcacctccaccgaatacagcaacagcgacatctttgccacaacaatatgcactgcaactacaaactcaacaacaacagcttcaactggtaccccagcaactgcagttaacttcatcattttccgtgaacaatcaacaacaaccaaatgtttcactttcgaccagttcgttatccggatcattagccaataatcaaagcgccggaggaagttccagtgggacccccgcaacaaacgtccaaacaggaatagagcgcctttctcggcctatggcatttgataagatggaaggactggttcgtgaaatgcaagatcctgaatccggagttcctgtgcgtagtcaaaaacttttcctcacttcgattccatctgctttcatgggttacgatctcatcgaatggttgatggaacggttggttatcgaagaatcggaagcgctgaacataagcaatcaactttgtatgcatggctatttctttcccgtgtcagattccaaaacactagtcgttaaagatgattcctcgttgtatcgctttcaaacgccgtactattggccgtggcagcaaaaagcaccggataacatcgaatatgcaatctatttgacgaagcgatccctaagaaataagcaacggcatggactggaggattacgaagccgaagcaatggccagtttgcacaagaatctcaaaggcaagtgggatttcatcacaatgcaagcagaagagcaggtgcgattggctaaagagcggaagaagggcgataaaattgttggagactctcaggaacgagcgtattggagagttcatcgtccgcctccaggtcagtttactcctctggaaccgtgtccaattccatctcgtgatcgtcaaggaaaaccacgaaaacgaacggttgaagactggcagcgtgaagtggagattttgaaggcctctcttggacggaaccgtgtcaagatgtcccaagcgtgcgaaagcttagtgacgtatttcgaaacattcagcgagtacgatccaatgatgcagcctccgctaccttctaatccttgggtcaccgaagatgtgagcttttggcagatgaacaatccgttggttgacgtgccaactgagaagcgagttaagcgttggggtatttcaattgaagaggttgtgtctgatccaacaggactacaagagtttaccgcatatctgaaaaaggaatactcgcatgagaatatccgcttttggatggcggtgaatgacttgcggaggtcgtctcactcgcagatatcaagaaaagttagggatatttacgaggaatttctggaacctggtgccccttgcgaaatcaacatcgatggcaaaacaatggaaaaggtccatcagggtttgaaaaatccatctagatttgcttttgactctgctgccgagcatatctatatgctgttgctgaaaaaggattgctatccgcgttttgttcgctctgaacactacaaaacattaatggcgaacgcaattcaaccatcgcacaaaaagcgtttcttcggattcggaggtggagcaaagaagaaaggctcaacagcaactgctccaaatccttcgcttttgtctcagcccacctctcaagcaactggagctgtcaatagcctttctagaagacggggaagtgaccgaagtttgtctgggtctgctcatgagttagctgtctgtggagttaaggataatactaaagtgccacattctcatagccaaagcaatttgagcgatattccttacagtgtctcgatctacagaggtgatatgccttccggtggctttgtcggacatatgggaacagttgaacgtaacgacgaacagagaatcggacagcagtaa

SEQ ID NO: 925 - DNA, 3024 bp, Aedes aegypti
atgttatcgccattgatgttaacccgtctttccctttttctccaatttctcgtttcagaacgtcccctcaacgaatacatatcccactacgaaaccctcagctacgaccacaaacatctgcatgctagtcacagtagggcgaaacgatcggtcaccaaagatcaccatgtatatcttaggtttaaggcgcacggaagagattttaacattaggctaagacgagatctcagtacatttagcgataagttagaaattcacaccgaaagcggtccaatccaggcggacacctcgcacctctaccagggggagctgctgggcgatccggacagtcacgtgttcggctcgatcatcgatggggtgttcgaagggaaggtgatatcctcgcgggacagctactatgtcgagcgggccaagcactacttccggaacagttccgatccggagacgcacccgttgcaccacggggtggacggccatgcggaaccgttccattcggtcatctacaacgagaagcacgtggatgacccgtaccggcagcggaggacaggccatccctccggatgtggtatcaacgacgaggtgtccctttggatggacagtgttcaaaactccgcgctggaaaatgatgccaccgatgaggaagtggcagatgatgacggtgcagaggaagacaacggtgccagcacggaggcgaccaagcaaagcaggcaaaccgccgccagcagtggagataataatgtgaataatttaaacggaaatttattccaaaaatcatcaactcagccaaactataataatgttaacggtagcagcggcggcagcagccagaactataataataattatcgtagaagtaattctaaagataatgtgaatactaattataacaaagccaacggcggcagcaatcggatcgagaccgggtatgagtttaaatatccgcacgagaagtactcgaaagcggccaactggatggctgccggggaacatccggaggaccgggagtggcaccagcggtcacacgaacgggtccggagggcaacacgacccaaagaggagaacaaaaacacctgctcgctgtacatccagacggatccgctgatttggcgtcacatccgggacagcatagccgatcacgaccgaggtcgcaaatcggaaattgatgagaaaactcgcgaggaaatcctctcgctaattgctcaccacgtaacggccgtcaactacatctaccggaataccaagttcgacgggcggatagaacatcgtaatattcgattcgaggtgcaaagaatcaaaatcgacgacgattcggcctgcaacgaaaattacaacggagagtccaacccgttctgcatggagaacatcgatgtgtcgaacttcctgaatctgcactcgctgggcaaccatgagattttctgcctggcctacgtgttcacctatcgagatttcaccggcggtaccctgggtctggcttgggtcgcatcggcatccggtgcttccggcggtatctgcgaaaagtacaagacctacacggaaacggtggccggtctgtaccaaagcaccaaacgttccttgaacacgggtatcatcacctttgtcaactacaacagccgggtccctccgaaggtgtcccaactgacgctggctcacgagattggccataatttcgggtcaccgcatgactacccggctgagtgccgtccgggaggtatcaacggcaattacatcatgttcgccagtgccacaagtggtgatcgaccgaacaatagcaaattctccacttgctccgtgcggaacatttcaaatgtgttggacgcgatcgaggacagtaagaagcgaaactgcttccaagcttcggagggtgcattctgcggcaataagattgtggaaatcggagaggaatgcgactgtgggttcaacgacgaagaatgcgccgacaagtgttgctatcctcgggtgattagcgaagtagatctgggactgaatgctacggcaaagggctgtacacgacgggccagaacgcaatgtagcccttcacagggaccgtgctgtgatagcaatagttgcaagttcgtctcgagcttctccaacgtgacctgtaaggaagaaaccgagtgttcctggagctcaacttgcaacggtacgactgccgagtgtcccgagccgaaaccacgggacgataagaccaagtgcaataatggaacccaactgtgtatcaagggtgaatgcgctgggtccatttgtctgctgtggaatatgactgagtgcttcctaacgtccaacatcattccgaacatagacaaacggaagctgtgcgagctggcgtgccaaaacgggaacgataccagcacctgtcgcagcaccagtgagtttgctcatctcttcggattacccgacggtgggattagtttacgtccaggatcaccctgtgataacttccaaggatactgtgatgtatttttaaaatgccgtgccgtggacgccgagggcccgctggtgcggctcaaaaatttactgttcaacaagcaaaccctgcaaaccgtggcccagtgggtgacggagaattggtacatggtgtgcctgttcggcatcctgtttgtgatctttatgggtatgttcatcaagtgttgcgccgtgcacacgcccagttcgaacccgaagaaaccaccggcccggcggatcaccgacacgctgcgaaggccgatgaataccctgaggcgaatgcgtcatcctcacggtggtcacgggccccgaagtgttcctgtgccgcacaatgaccgatcccgaagtggaggcggtggcggcggcggtggaggcggtagaagccgaggtgggggtggaggcgatggccacggtgaacgccgcagtgggcacccgacctcctctggcggctctcggccgtctaacagtagtagttccagagtgccagcgcatgggtatggtgaaggcagaggccaacaatactatccaccgaaagccgttcacaaaaaaagacacgccagcaagcatagaaccaaatcgtag

SEQ ID NO: 926 - DNA, 939 bp, Aedes aegypti
atgatcaaatcgttcgttctattcgccttcctggcgaccttgaccctttgccgagttcacggtgtacctatgactgcccttcaaggtgacaccggatggatggaaatgtccaggttctggataaggctgcctaatttggactatcggaaggaggtcgttgtaagcgaggcgagcatcggaggttccaagatcgccggtggtacaattgccgagaagcaacagtttccgtatcaagcagcgattttgatcaactttctggatggttctggtgttctatgtggaggagcgatcatttcttcgacttatgtgttgactgctgcccattgctcagatggagcgatcgatgccacggtcattgtgggaaccaatgtaatcagtattccaagcgatgatcaagccgtggagatcaaagttacctttcacgatatattggtgcatccgttgtacgatccggtagaagttgtgaacgacatcgccattgtacgattgactagagcgcttgcgttttccaataaaattcagccgattcgtctccccaacaaaaaagaagctctactggatctagcgaatactgatgctaccgtttctggatggggagctttgagtggggaagagtatgtcgagatcacaggcagcgtaaaactagaactacgatacactaataatcctgtgatatccaacgacgtttgtggcaaggtgttccaagacatgattcgacatttccacgtttgtgtctccggagataaaggtcgaaatgcttgtcaaggagattcgggaggccctttgagagccaatctgaatggaaagactactctgattggaatcgtctcttatggttccgtagatggttgcgagaagggatcgcctgcagtctatacgcgagttgggtcttatctcgaatggataacacagcacaccaatgttccgatagaaaattga

SEQ ID NO: 927 - DNA, 1218 bp, Aedes aegypti
atgtcggaaggattcgccgctggtttgcagcaggacgacattcttcagcagcaacagcagcagagcggcgagtggtcttcgtacaccatcatggattcgtcccgggtgtccacgtgtctcatctcgatgctactgatcgtgtacggaagcttccggagtctcaacatggaacaggaacagcgcgagaaggagaaaaagcgccaaagcgagagcatgaacaacctgatcaccggcgaaccggtacagcaggagcaaaataaattcgcaacgttggacacgatgcacgctctctgcctaccgttgggagcttcgatatcattgttggtgatgttcttcttcttcgattctatgcaaatgctcttcgccgtctgtacagcaatcattgccaccgtagcgctagcgttcctcttactccccatgtgtcagtacatcattcggccctgctcggacggtaaccggatatcatttggggtgtgtggacgcttcacggccgccgagttgttcagtttttcgttggccgtttcgatcgtttgcatttgggtcctgacgggtcattggctgctgatggacgccatggggatgggactgtgtgttgcatttatagcattcgtacgcttaccaagtctgaaggtgtccaccctgctactcaccggactgctcatctacgacgtgttttgggtgtttttctcgtcgtacatcttcagcaccaacgttatggttaaggtggccacccggccggcagacaatcccgttggaatagttgctcgcaagctgaaccttgggggtattgttaaggagccacccaagttgaacctaccggggaagctggttttccccagtatccacaacagcggccacttctcgatgcttggcctcggcgatatcgtcatgcccgggctgctgctatgcttcgtgctccgttacgacgcgtacaagaagtcccagtgtacgcagacagcggaagccggtgttccaccgccgaggggagtcggctcgaagcttacttatttccattgttccttattaggttatttcctcggtttattaaccgccaccgttagctcggaagtattcaaggcagcacagcccgctctgctgtatctagttccgttcacattgctacctctgctgacgatggcgtatttgaagggtgatttgaggcggatgtggagtgaaccgttcatcatacagcaagcatccaagcagttagaagtttaa

SEQ ID NO: 928 - DNA, 2599 bp, Aedes aegypti
cctttcgttttcctttgtacctccgctgctcgtttcgtgtgtgatttttctacagctcaatacgcggagcggagactctggactgcgaatcaagaagtagttagccaccatcatcagcaaataaaattaaggcaggcgatcaaaaaaaatcattccgcaagcaacggagtataacctggaaatcgaaggaacggaatttcacctgggcaaggaggaggattcgcgattccgacctagttgtgtctagtggaaagtttctggggattgtgtcgtgttactcaagaagaacagcaggaggaggtggcgagaaagatttgctgctcgaattggatattagtatacaaaaatagccgtaactcggttcggcgtggaaaatggattgtccccacataggtgataatgtagccctccggaaggacgcagtccgaaacctgaagatggccgtttgtgtacctccgagtgcggcgacggttccaccagaaacaggaacacctccagcaacttctccagtggcaatttcgaaattgtggaaatgtgcagaatgttccggcaaagacaactggatgtgtctgcagtgtggatcagtgcgatgtgggcgatacgaaagcgggcacgctttaaagcactctgcgaaacagaatcacaacatttgcatcaacacagtcaatttgtcggtttactgctacaaatgcgatgaattcgttgtgaatgacacaccggaaaacacgctagaggagattcgtcaggagctgaaggacggcgatggcgacaccgtatcggagacttcatccacgatggaggagatcagttcgtccaagtcgggccaggaaacggccagcagcacttcgtcgtccagtgattccggttgggaggagccttcgacggtttcgtcagtatcgtcctccaccaccaccagcaacagcagttctgtgtcgtcgtcgagtgtccgaaagttgcgaccccgcaagcgaacgatctccagcgacagtaacaacgaaaacggcacggccggtgctggtggaggcggaacagccaagcgaaagtcgatgcgacgagtcgtgggtctgcggaatctggggaacacatgtttcatgaattcagtattacagtcgctgagtaacatccaggagtttagtggatacttcaacacaatgccctcgctggagacgggcaaacacaaacacaaggcgtaccagtcgcgcagtatgaaagagaacctagacgacgtattcgtggtggaggagctgcggaaggttctattgaatctcagtcagggtggggatggctcgaagggagcaatctcgccagaatgcttattcctggtgatctggaaggtagtgccccagttccggggccatcgtcagcatgatgcacacgagtttctgcgctatatgctggatcgattacataccgagctacagcaggtatcattcccagtagagatatccagcccatcggcgcagaaggctagtgaaacgaaaagtaatccttacaatattccggcactcagtcacttgcagtccaaggggcgaaactctatcgtgaccaatgttttcggtggtatactacagagtgaagtccgatgcctaatctgtggcatggaaagcaaaaagcacgatcctttcctggatttatcgctggacattccagagaagttttacaacaaagatcccccggagagtggggaaaaggacaaggaggggaaccccccggtgtgcaacatttccgactgtttagccagtttcacagaagtggaggaactcacagaaacagagttgtactactgcagttcgtgtaagtgcaagcaaaagtccaccaaacgtttttggatccgccgattgcccaacgtgttatgtttgcacattaaacgcttcagatggaataacttctacagaaccaaaattgatttgcgaatatcgtttccgatcaatgcactggatatgtcgcagttcgtactaaacaatggtccggaaacgagacgctcgaattccagctgtaacatttacgacctggcggccgttattgtgcatcatggaaacggttccagctgcggtcactacacctcgtacgcgatcaacaatggagtgtggatgcacttcaacgatcactcggtgaaagaggtcagcagcagcgcagtggccgagtgcaaaccgtacattctgttctacatcaaacgggatccaaccaacaccagccggctgctgacaacgccttcgacgacgacatgtggggcaccgacggcgaccgcgtcttgagattaagttattcttcttttaagactgattaatatagaaagaaaaagcgcatagcaaaaggaaaaccaacataattgagaagcatgcctggatgccacgataacatctaaacatcaatgagttgggttggcagagaatgttctcaccatgttgcatgtctggtctgcagaattctggttccaattcgaattgtggggttccctgttttctgtccgaaaactgaaacgaataaaaatcgccaaacaaagccgagaaaagtaaagatggtcatattactagcaaaaattttagccaacaaaaccgcaaatgtcaatgcagatgttcaaatctagtagtaaattacc

SEQ ID NO: 929 - DNA, 8362 bp, Aedes aegypti
cgagtcgatgcccccagctctaaccatatccggtccggttttgacgttcgcgtacgacgaaaaatcgtcgtcggctcgattctgatcgaaaattttgtggattttccccgaaaaagttctgcttttgggaagaaaattgccaaacacggttggcggtggatccgttcgatccagatacaattgaaataaactcattggagcggtgtgaattagcgaagattgaatagtgttgaaagaggggcctcagaagaagccctcgggaagattacctttgaaatttgaagcgaaaagttttgcttcctgcctgtgtggtataagaaagaagagttcggaagaagcgaaaaaagtgccagctattattagtgcccgaagcgcgaaggagtgatagagagggctatatagaggagtgcgtgtgtgtgcatttttctatcagggtagtgccgcagggggaagttttccggcaatcgtcagcagtatatcgagaggctcttttcctgcctatatttcgtcgtcgcagttttgcctctccaaggccgtgtcagtggaaaacagaggaagaatatagaaaaaggaagattgtggatggtttcatcttttccctgcgtttctgacgtgtaccaaagaaagttctttttccttcgatcaaggggagcctctggcagagctctccacataacaatccgagaaacggacggaaactaggcagaaagttgccatactttggcagagaaaaatcgacagatcatagacgagaaagggattttataagcagatctacctggccgaatgaatcgtcccgagagcaggcagaagtgttggccaaagtggcactaattatgtcgcagacggactgaacatactgaagatttttctttttagttactcttattttttttcgttccgattacggcagtctgagaagagtgtgtcacccgtgtggaagcacacacatacgcacgtatttaagtaacttcacttaagggcactaccgtgagaaagtggcctccgtcgaaacgtctacggaacccaaaggcagccaggaccatgttgcccgttttgtgtccagcgtgtcatggataattctaagtcgaagccgcaagagtgctacgaattcctcgatcttagtgacgttgatgattgtgtgaaaagcgcgctggcttcaactctgtacacaccggcttcggctggtgccggtggagctggaggctataagggtactgttggccgcaagcagcaccgcaccaaacgaagacagtcgaacgcttcttctgtgatgtcgtcatccgatggatccggcgtgtacgaatttgtcccatacgagtcccggagatatccttcctcccagcatcaccatcatcatccccaaacggtggccacattcccaaatccggtggcacctgaataccattatcaaccccgtcatcactccacatattcccaacagttcccgtatagttcctcaaatgcctctagcgtcgatggttccggaggtttcggtcgtcatccggcggcatcgaaacgaacggctaacatccgcactcaagaccatcaagccaatccgggtagaaactcacaccactacaattaccatcactaccaacaacaacagcagcatcagcagcagcattcttggtcaccggtagctgtcgcagctagcactattgctgctaccactggtattattgccaccactaccactagtacttcctcctacacactgccaaacagttctgtgaacacaaatctggaagcaacatacaccgagtacggagaaagcgagcaacgactgagttgctcggctcacagcagcagtaccaacagtagcagtagttatcgtgtagtcagcgggagaaattactccagccgaacaggcgaaagagtagctgcttcgacgccggacggcacgacaacagcgatctccgaggcgtctacgacgacgactatgccgccacacacaaacaatccccactatccgtcgcaacaacaacagcagacacagcaaggtcaaccacctcaaacacagcaagggaaccctccaccaaatagtcataatgtagcggtgaacgttagtcggggctcgagcgatcaacagagtgttgttgcttccgctcctcaacagatgtatccatcacagcattacatgaccgggggtcctcccggcaatgcgatgtatccgatgccagtcattccccagccaattcctggaaatgtttacgttagcaaccttacagctaacgtgaacgtacatggctttgtgccgcatggtatgccccaatatgtgacaacaggtgcatctccagcgcctacgggagcttacattactggtgaagttccttctggacatgaaatgcaaataatgactcctcggggagaagcccgtggtggaatgcgacgcaatggtagaagtggtagaattggacacaataccagaccacgaggaggatttgttccacattacatcgcacaacagcaaactgtgatgcaatctagccaaccagctggtattcatcatcagcaacaaccaggacaagttcaaggtcagttacctcaacaaggagtgcagcaatcgcaacagcaacaatcacaaagtcaaagtcaaaatcaatcccaaagccaaccatcacaaccacctcaacagcacactccggacatggtgcaacattcgatgtccatggagcatcaaccaatcatgagtccagcgcaaccagttacttatggaggttatggaggttactatttttatcctccattctacccctcggtaacaccaggacatcatccttcggcgcaacatgcagcaggagcgccaatactccaagtccctatgtatcagaccatgtacagctattcgccgagtgttgtgtaccaaccaatgtattcatccgagtatcctctatacgatggtaaaggggaggatcataatccacaacaaccaccagaagatggtgttatgcatcaggatatgtggcaacaaccgaccatgatagaatacaatccggagaacgtagaatatatcccaccagaggaggatatgaacatgatgcaacaggggcctcctaccatgcagccaataactcatgtgcttgatccaaatgttcctaactttacgatgggacctgcaacaccaattcaaactgacgattatggtcaaatcactccggcgccttcggatgactataatgcaattaacaacaatgcagtcatgtctccagctgccaatctcatatcctctccctcttcaaatgcttcatctctacataatctaaatcaatctgacatgtaccttgtgccacaacaacctcaacaagaacctcatcatcagcaacaactacaacaacagccacaacaccaatcgcattcttcactgatggaattgcaacaagaatcagatattcaacacgaacaagaaccatcacaaccggtagatcaagagaataactacatcatcgaacaatcgcctcaatcccaatacaatcaaccaatgtcaccaccaccccaacagaccaatattcatgctcaagtctcagcacctgttgaaaacagcttcacatcggatcaaccacaaggacatattcaggaacctacaccaacaccaatgcacacaactattgtgcaagagacaattcaacaaacaccagcagcagcagtagcaacactcaacgtaccacctccgccgataccggttcaattccggaatttagaaaaacaacaccaacagcaacaaccactacatcatcaaccaatcacaaacgatagtaacaacaatccgaagaaaaagaccaacgaggtcgcgtcggtggcgactcctgccaccgtagccgttgacaagaccagtgaaatgtccacgaatagcagtaaaccagtgccaaatcagcaatcacagcagcatcatcaatcgcaattttttgtaaatagtaacaaaagtcagacttcaactgaggaagtcgcacgattacaaaggacagttcaagaaaagctcgtcttcaaagatgaccgccgtaacggtccgtattggactaatccaggatctcaacccccggctacaacaatctcatcgtttacgtcctccacaaccaccattgtgcagcataacagtagtcagcagcagaaaaagacaacagcatcggtatcggtatcagccattccaaataaggaatacaccagcagtagtagcacctcatcgggtccatctgtcattagttccactaagccttatcagaaaaatacctcgcccgttccgttcactactcttggaacaacgtctgctcctccgtcgatacataaacaaccgttagcaccacagaagtcctacagttcctccgagcatcacacggcgaccccggtcaactcaggtccggttatggagtccaaaaaagtggaagcaattcctcaacgtgacagccagataaatacccctcttccaccgccaggtcttccgccatctctttcggtgccaccgccacaacgtcagtatactcagggacaaatgatcgtccagacgccctacgtaccaccaccaccggcaacgacggcggctgcacctcagaccaagtcctgggccagtttgttcaacccatcctcttcgtctgctacgtctactccaggaccaacaagcagcattgttcaaccgattgctacttcagcccctgttgcaccgtctctattggctgcaggtccagccctcccaacgccatctcccttcgcgccaagtttcgtccctactcaacatcgtagtagtcattcatcttcggcatcgaatcagtctgcggacaaaactacagcagcttcttcatcaacatcgaacaaaccgatcgccaaggtgtcgcctttcgataagtccaataacaacagcaacagcggtactacggccatgtcctactcggctgcctcggcccaaggtcttccatccgcttctgctggtcatacgacctccgcaagtgcctcggcagccagtaccgccagtgctggctccaaaaacaagaacaacgctgccgcccaggcgcaggccgccgccgccgctgccaaacccgaacagatagatgagaacactctcaagttaggagaattcctaagcgcgtaccaaatcgaaaacaacagcattagcatccttcccagaggactgatcaatcgttccaactactgctacatcaatgccatcctacaggctctagtggcatgtccaccgttctatcacctaatgcgggcgatccggtcgctacccgcagccagaaacagtaaacaccagaaaccgttcattgacgctatgtccgctctggtagatgagttttccactctgcagttacgctccaaggtacagcgtgacaagacgaagaaagacgagactccggaaatccagtgcgattccccaatggaaccgctgatgatccacaggatgctaaatcttctgcgatcggatattttccaagtcgaaggccgtcaagaggacgccgaggagttccttggctgtgtactgaatcggttgaacgatgagatgatagagttgatgaaactgagcaaaaacgaatccgatgtcaatggggatgacgcggccaacggagaggtccaccccgacgaccaggatgattggaaggtcattcgcggcaaccggaacaagggtaccgtcacccgcacgactgactttggccgatcaccgatgagtgacattttcggcggtaaattgcgatcacgtgtccaccgcgaaggcgaccacgcaaccgacaatattcagcctttcttcacgctgcagcttgacatcgagaaagccacctcagtgaaggatgctctggacctactagttggcaaggaccaactagaaggcgtgacctgttcaaagaccaagcaggaaattgctgcctggcagcaggttaccctggaagagctacctatcgtgatgatcctacatctgaagtgttttgactacaaaatggatggatgcaccaaaatcctaaaggcgctggagttcccgatcgaattgaaaatcgattcaaaactgatgtcctcgaagggcaaatcgtacactgccaaacagaagcagtataagttgttcgcggtggtatatcacgatggaaaggaagcatccaagggtcattatatcaccgacgttttccacgctggctacggtagctggattagatacgacgatagtacggttaagcccgtatccgaaaacaatgtgctgcacccaaaatccccaagggtaccttatttgttgtactatagacgacttgatacgcattaccatggttcggccggaggcgccggagctacaacgagtggcagtactggaactggaggatccggttatggtagcggaagcagtagcagcaacacaaccagtagtagtaacaatagcagcaccggtggcaatagcaattatagttctagtgtaaatgctggcggacactacggtggctccaaataagagaataagcaacgtgaaacggttatacagttttatcggttgaaaaattctatggttctgtcgaagttcgagtgtaagcgatagaacattgtacagtagatcgcaatgaaaaggacgtttttatatagtttatagtgttaacaataagctcgtgagtgacaacgattgtgttgggattttgtgttggaacgtttgtgattttttggatcctcggatatttttggatacggtacatgtggacgttgaaagcagcccgataaaatcgtatgtgatcaacgaaaaaaaaaaacatcaaacataagggattaaccattggtgtaaagaaaaaagggaggggtcgagtgttgttgaaaaattttgtttataattcttaatattctcacgaaaaactttttagtttgttaatctattattattattatcattatagtagtgatatcctattgtttgcttttttatgggattgagcgatactctcatttaagttcctcctggtaaatagtccttctatagtatagcaataacgaaacatgtttcatactgatccgtaccagaagatacgagcacgaaaaggaaaggcataatggtgaaactgtacctatttttcaacgtgaatgttggtttgactacaggaagcttcgcagcatcattattttgctttgaaactaatttgatcggtcaaagactattggttgcgcctctaagcgttatgttagactgttctgcaactgctaaatgtcgttggacgcaataagcgagatgatcagcctatgaaacgatcggtcaactctcttatggcgttagaaaaaatgttgatatgagtaacgtgtttgttttttccttgttatgcttttcaagcactaatttgtaataaaatattagattcgtacacttaacaagaaccaattcatacatttaaaaaccctagagcgcatataaagaaagagaatgtacccttcttacggattagataggtagactatagaaagtggatgaaatcccagttaaaaagctagccaaattcgctcctgcagttggatgataacttccaccaagtgtattgaaaacgagccgaacgagtgagttctgcgatcatccaatttttgcaacaggaacagaacagtagttgcggtcgaggtataggatttatccgcagtcaagcgaaaacgaccggaagcgtgtgtaatttactttcattgagaagattccgcggagtgttcgcagaatcttaagctgtgtaaataggtgattcagtaactaacaaagtaatgcaacaaaaagtctgtatatagaagatagtaatagagtctgaggtaaaacattgagtgtagatttatgttgataatgcttatgaacggtgttaaaatgcagcggtcagatgtttcgtatatattaatgttttgaatgattcgaggtaattctggacgatcgcggtagttgaaaactgattttgactaatccagggaaagatttagtcgcactgaataggagagaagacagcgatagatagtatttgtctagtttttttggatcgcaatttaaattacgcactaaggcgcactgctaatatataaccacttaaacattctgggaatatctctagagtttttcgaatacattttgaaagaagcatgctaaatgtggcaaaaaggaaaccaatatgtgtagtctaccagataagcaaatgtctggttaggcatatcgtgtttttttttgtatagtcattctagaacttacagaacgtaatctttatttgaaggtggaataggtggagtaataaagtagttgataaaataaatctacatacctaccccgttacgatatggtacactggatcaaacatttgttttcttttcaaattagcttgggtaggttgctgaataaaggaccatagctgagtccgggaattattgtatttttgatgagtactgttcactgaat

SEQ ID NO: 930 - DNA, 4886 bp, Aedes aegypti
cccacttccattcaaaacacgaccgcagctagcgggtgaagtaaattactaaggtctttttctagtgtgtagcagtagttcctgctttgattttactcacacatcgtgccagttttaagtaaatcctcctccagttcgtcccattttctttcagtgtcggtgtcgagtcgaatcgagagtgttcgtttcgcgtttatgtgctatccattcctagtaatgtcggggtaattatactttcgaaagtttgattatttttgaaggagttgcgtcttcgcgttcgactcgacgcgtttattgtgcaaaattacgtgagtgcgattctgggaagtaggaagcgtcgaatcaaagcagcctcgaatggaagaagaaggccgtcgatgagcgtcgtcgtcgtctgtcaaaaagtcatcgtcgtcgtgtttcttttctttctgttttcttgttttgggtgtgcaaaattacgtgtcctctcgtggcctctgtccctggccagaggggcgcgccataattggtggtgtgaaaaagtagtgcttcaccagtgaagaaatatggagaacacgaaaaacaaccccaacatcagcagcagcagtggtggcagaagtgagaaagttaccagcaattcctccgcccccactgtcaataatggccaacaacaaccacaagggaaggggtccaaattgaagcgggccttctcgatgcctcggaatccgttccagtcggtttcgcgtcagacgatgggcaggaaaacggtcgtggaaaagtccggaactggaacgatgacgaatgcaagcgtcgtgacctcggaacaaaattccatcaacagtggtggaggaggggtattgggagcaggtggaggaggaggagggagagttggcaccgatgcaaccaaagtgcaaggccccgaggccatcaatcggggggagaagaagatatttcggcgcctctcggtgaagaagttcatcaatcgcattgcacaacagatgacatacgtcagtcttgcgggcaaccaaaagggcgctgatcgtgttccaccgccaccgccggccaatgggttcgtttggccaccggacacggtaccgggtgtgatcggcctgcggaaccacggcaacacctgtttcatgaatgccgtcctccagtgcctcagccataccgacatcctggctgagtacttcgttctagatcaatacaaggcggatctaaaacgacgtaacaagatcaatgcgaaaaagtttggaaccaagggtgagctgacggaacagttggcgctggtgctaaaatctctctggacgtgcaaggatgcccccgaatatagttctagttttaaggccgtggttgaccgatacggaagtcaatttcggagctcgacgcaacatgatgcgcaggagttcctcttctggttgctagacaaggtgcacgaggatctaaacaccgccaccaagcggaaatacaaagcgatcaagaacaactacggccgctcggacgaagtgatcgccgccgaaacgctagccaaccacatccggtgcaacagctcgttcgtgcaggccgtctttcaagcccagttccggtcttcgctaacctgcccccggtgccataagcagagcaataccttcgacccgttccactgcatttcggttcagttgccgcagctgactctgcagccggtgtttgtgcgagtgatctacgcctcgcagcaaccgaaacaggttcagctggggctgggggttccgcatgggtccccagtgatggtgctgagggaacaactgcacgccgacacggggatcgccgtcgaccggatgatactggccgaggtgtgcgaggggggcttcagtcgggtgtactgtgattcgcatttggtgtcatcgattggggacgatggctcggtgtactgtatcgaaagtccaccggtggcagagggcatgacgcaaatagtgctgtgtattaccaatgggcgaagggacgtcggaagtggcgaagttcgacggtttggaactccattctgtatagtggttaatagggatgtttcgtatgtggagttgcagaagttgctgttgaaggagatgtcgagtattctcaaatcggaagtgtttgcgttcagtactcctatgcaggagatgttcaaaatgcggttgcaggatccgtcatgtgacgcggacacttacttggaatcgaatgtagagcacccgttgtttacggagatgatagatttggcgttgtcggtgctaccaaccgatgccggtccagcacatgtgaaactgctgattgagtggactaatccagagcgattcttcagtgatatgacggatccttttgtggaacatgaaagcgtcagtcagatgaaagagaagattccgggcagttcgtcgctgacgctggaacagtgcctagagcattacactaaagcggaaacgcttagcgcagaagatgcctggaggtgtcctcattgtcagaaatatctgcctgtggtgaaaacgctagggttatggtcactgccggacataatggtgatccatttcaaacgattccgacagcaacaattgcgcggacctcaggctgccaaattgaccacattggtaaagtttccactaaccggcttcgatatgtcaccccatttggcgagagattcgaatgctgaagcgtcctccgtcagcaacggaacggaagacaattggagtccttggcgaaaaactatcaatcgatatacaaaacattcctcaaaccactacaatcaaaactcgctaccgatggacaatcgttatgacctttatgcggtgtgttaccaccagggcgacactttggaaactggccactacactgctgcatgcaagaatccctacgaccatcagtggtacaaatttgatgaccaacgcgtggcacaagttcccaatgaacgcatccaagaagaaatcgttaacaatgaggcttacatactgttctaccaaagacgaaaaatcgatggatcggaatgctcgggaacgagttcgagttctggaaacgatcattgggtgtcgagaatatccgcagctccgctgggtattactcatgaaccgaagccaaaggtagatccgccgaaaccggctcctgccgctactcttactgcaactacaacgtctattactgctaaatcggaagtgcaggcgattccgataaaagccgaaatcgaagaaaccgccaccatacattccgagagtgaaagtgaaacgagtgataacaagatgcctaaagagaccagtgttgagtttgaaaaagttcaaacaaccgttgtgcaagctgaagtagaaactcagaacaccgacagtcatgagattgaggagccttcggaaaagccgccctccgtcaccgaggaatcggttaaatctctcattgaggaggaaacgtctgaaggagacacctcaaaagaaggctccattaaaactcttaccgatgagccttcatcgccagaactgcgaaaatccacagagccaacgacctcggagcattcggacgatacaagcgacagtacgaccaaatcgcccgattcgagcagtcgcttctcgttgccaacgtcgcactcgcattttccggagattctctggggtcaccaccatcatcgaccgtcatcatttacggcgtacaaatccagctacgagccggatgcggtttcgatgatgaggggggccaacacgtgcagcaaggatacgttgctgtttatcgatcagcaatcgcatgcggcagggctggaccgagtcatgatggacgacgaggacgattcggacgacatgatgagtaacagtcgggcgctatggatatcgccagtcacgccgcataagctgataacggtctcgccgaagaactaaccgaggtttgccgtgtgaacgagtcgcaacaagtcgaaaacagatttcaaaaatctaccaccaacctcccaaccaccaaataacgaacattgcagtgcagtcctaagtagctgaaaccgtacgagacagagcatcagtattcgcagcgtgaaagtaccttcaccgacacgtgcaatgcgagtcacgcagctctatttatatatgatcatgttgaaagttttaaatcgtttttatgttataatttttgtttgcctgtgagtaatatgtagtaggtaaaaaagtcactcatttattattatttattaaaaaggagggaacgagggttcgtaaaaagtaacgctatagaccgtttattgtatattaggtggtgcgcggacgttccgattgcgggcgtatccgtgttcgggtgagtatttatttgagctaggaactagtagactaagatagcagaaacgaaaagaaaaaaaaactttactgtatagagtcccattcctctttaaccagacacaagatttactacctaaatatacaatcctatttcgcgttagacacattcttcaagactttccaaattaagaagagagaaaaactttagactaaatcaaactgttcggtacccacttgcaagttcagatcacaagaccgaagttagagagcaattatctagagaatgtaaatttacactacgtgaacctttttttcgagaaaaaatttaacgcgtttgcattacctttggggtccgagcagagataagcagcaggttgcagcaaagccatagaccagcccgtccccgccccaaaaatctataggctagcatattggcattgacgactgagtttagtagcgagtgatacaaacggggtctgtaatcaaccaaattaacgagagatttttgcgtagatattcgccgtgcggagtgaagcggaatggatagcgtttgcagtcaggcaggaaccgaataaaaacaacattaagcatacagaaacaagtacaatttaatgttagttatttgattgtaaaaagaggagtaaaattataaattattagaataga

SEQ ID NO: 931 - DNA, 2554 bp, Aedes aegypti
atgccggatccaacgcgaatcgattccttggtgaaggaattcaacgatagtcctcatgggccgaaaaagttgcaccagtccaggacccggtttatgcccatcgtttttggccgagatgggaaggctcaaccaaaacccggacctcgcagtgccgaagcacaggacttctatgccttgcgaaagcgatgcctccgcagcggaaccctattcgaggatccagaatttccagccaacaattcatcgctgacattcagcggggaatcccggtcaaacctcaaatggcttcggcccagtcaaatttcaccagatccgagattcttcgaggcaagctattcgcggttcgatgtcaaccaaggagagctcggagactgctggctgctggcagcggcagcaaatctaacccaagatccacaactgttcaccagggttgtcccggaggacaacagcttcaaacaggactatgctgggatttttcacttccggttttggaggttcggccagtggtgtgatgtagtgatcgacgatcggttaccgacggtgaatggcaagttggtctacatgcgatcaacggaagataatgagttctggagtgctctgctggagaaggcctatgcgaaactgtttgggtcgtacgaggctctgcggggaggatcggctagtgaagcgatggtagatttcaccggaggtatagcagaatcatacgaaatgaaggatgttccaaaggacttgtttcaaattattgaaaaggggttcaggagtcacgcaatgtttgcgtgtagtttggaacccgatccgtacaagccggaggcggaaactcctcaaggtttgattcgaggccatgcatattcgttgacaatggccaagatggtggatatccaaacgccgaatgttaaagggaaaattcctttgttgaggctcaggaatccctggggaaatgctaatgagtggaacggagcgtggagcgataaatctccggagtggaaatatattcccgaagaaacgaagcgagagattggtttgatctttgagctggatggggagttttggatgtcttatcaggacttcgtgaagtacttcgatcgtatcgaaatgtgcaacatgagtccagattgcccaataatccgacaaagtggaaactatccctggaagcaatcgtctttcgaaggtgaatgggttattggaagcactgctggtggatgcagaaactatccagacacattctggcataatccacagtatgtagtgcatctgaaagaacccgacaaagatgatgccgagggaaaggcaacagccataatagcattactgcagaaaaatcgaagatctaagcgcaacaaaggcatggactgcctaaccgtaggtctaatcatctaccgagtaacagaacgtgatctcatccgaaagcctctgcccaaagaattcttcctacggaatgcttccatagcccgatcgaccttcgtgaacttacgagaagtgacctgtcgtttccggatggatcccggaacttacgtggtggtcccttccacctttgagccgaacgttgaaggcgagttcatgattagggtgttctccgaatgtccggactgcatgaccgagaacgaagactgcgttggtgaatgcgacttggatcctcggataaaaatgaaagtgcccgatcccacgaagcctgatccgcagcggcaggctatggagaaactgttcctggatgtcgctggagtcgacggcgaggttgactggatggagctgaagttggtactggatcactgcttccgggacgacatagcgattgcggccaaaggagtctcccggagttaccacgtggccccggtggaatccaagaaatccctgacacctcaaggtgaggtcgtgtgttgcggcctgttggccatgctgcaggattggtacgtcaacatggccggtggagacaatcgtccagagcgcagtacttccggcgatttcgtggtcgccaaggagagggctcctctcatgaccgccgaaagcagtgccgtcgggttctccaaggatgcttgccgttcgatggtggccatgctcgatgaggatcaatccggcaagctcgggttcctggagttccagaagttgctgaccgaaattgcccgctggaaggcagtgttcaagctgtacgacacggaccgttccgggcatctgaacccatttgagttgcgggcagctttgcagtcggccggctaccacctgaacagcaagatcctgaacagtttgatgcatcggtacggttcacgcgagggggagatatggttcgatgattttataacctgtgcggtgaagatcaaaaccatgatcgatatcttccgcgcaaaggacgtgaatggaatcgcttcgttcaacatggacgaatggatacagaaaactatttattgttaatgccagacgtgtgttactgtgacctgtgctcgactaacgctcctctaatgcagtttgcctatttctatctccgaagaggccggtactttgaaacaaagtttatcttttattgttgattgtgaaactgaataaagttgtttgaatttatctgtcg

SEQ ID NO: 932 - DNA, 1481 bp, Aedes aegypti
atggaaaagatgtcgtccaaccggtgctatgcactgctcttgacctttgctttgttctccgtagtcagtgcctcgttcatcaacccctatgcacagttcatgaaacgtggagtgtattcttcagagcctcgcatcaaggggaacaacggggaacctttgttcatcacaccgtacttggaagctggaaagattaaggaagcccaaaccgcagctcgagttagccatagtcgtatcgtaggctttgaaagctacactggattcttcaccgttgacaaacgatacaactcaaatctgttcttctggtacttccctgcgaagaacaattccgccaatgcaccggtattactctggcttcaaggtggaccaggggcctcttctctctttgggctatttgaagaaaacggaccgttcttcatctccaaaaatctgaaagccgttccacgacaatactcctggcacatcgatcacaacctgatctacattgataaccccgttggtactgggttcagcttcactgataacgaagacggatatgcacggaatcaaacccaagtaggagagaatttgtacgaggcattgattcaattcttccagctgttccccgagctgcagaagaatccattttatgcgagtggggagtcttatgctggaaaatatgtaccagccattggttatactatccataagaagaatccaacagcaaagatcaagatcaatttgcagggcatggcaattggtaacgggtacagtgaccccgtgaatcaactcgactacggaaattacctgtatcagctgggcctgattgatgtcaatgctaagcaaagatttgatcacgatgaagctgctgcggcagaatgtgtcaagaaaaacgattatcagtgtgctttccatttcatggatgagttgttgaatggcgacgatgaaggagcatccttctttaagaacatctccgggttcaacacctactataattatctgcacacagcggaggatccaaaggacgagttctatctcataggatttttaaagctatcggaaactagaaaagcaattcatgtgggcgaccttccgttccacgatctggacggtgaaaataaggttttcaaatacttgaagcatgacattctggactcggttgctccgtggatcgtagagcttctgtcgaactaccgaatgatgatctacaacggtcagctggatatcatctgcgcctacccgatgatggtgaactatttgaaaaacttgccttttgatggtgcggatcagtatcggaatgctcaacgtaacatattttacgtggacgacgaaatcgccgggtactacaaattggtgaacaacttgttagaggtgttgattcgggatgcaggccatatggttccacgggatcaacccaagtgggcgtacgttatgatcaacacgtttacgacaagatcaagctttgtaccagatgattaaaataaaagttgtataaaagagagctt

SEQ ID NO: 933 - DNA, 441 bp, Aedes aegypti
atgagacaaatcgatttcgcagccgtactagtgctggcactcgtgttatcgatcagcgtatccgaagcccgacgcatcaagcgacagcagtcgaatcgaaatcccttcaccacctattttccaccgagccagaaatttgtccgaaaccgaccgtcacaaatcagcagcacaatccagccggtacggaccaccttcctaacgtccgactttttcaacgacctgaccacgacggtccgggtaacgcgtccaccactggaacccaaaaagccgtccaggtcacgggaattttatatttgcatgaccaactgcctgacgctgagccactacaatccggtctgcggaacggaccacaccacctatcacaacgtgtacaagctggaatgctcgaatcgatgcggcgcaagacctagagttcaagtcagaaagccgggcatttgttga

SEQ ID NO: 934 - DNA, 1396 bp, Aedes aegypti
acacacaagctgagaaaattattccacccatacctggcaacacttttctaggtcatagactgcactgtaaggcgtctaacttagctcagatcagtcaagaacttcctgttcgtacatcctcgtcgcgtggctaaaccattggcttcatgtaaatgtctggcccgagttggatggttaatctaagctcgtaatccatgccatctagaagccgaaggcgcgtgtgcggtatcggcggcaacagcagcggctcagaacagccccaaccgttggtgaagcgtggtggtattgaaagaggcgagtagctcggtaactcggctgggctgtgctagcattattggaagatctcactcgaactttacaagatcaattaaccagttcagcagtattcagcaccgttgcccggctatagttcgtcatcatcattgctcaatccttcggtctggccagtcatcagcacgctactggttgtcggattgatacgcatacgtcataacgcgatcattaggaaggaaggaagctaagcttcttggccacgtacggaacggattaagattagtttacgttggtccttcgctagcggtggacgcgattcggtgatttcgaaacctttattaccatctccaagtggtgtttgggagagtcgacacggtcgtcggtggtgaaaaagtgcgagcacggaacacccttaggcggtggctgtagtttagaaacgatcccacgcgctgcaagttttcacccagttgtcggatatagcaccaagcacgtaaaaagtgcagagcccggaaagagcatttcttcgcgccttttttgagttggataagagcagatcaaacaagatgagacaaatcgatttcgcagccgtactagtgctggcactcgtgttatcgaccagcgtatccgaagcccgacgagtcaagcgacagcagtcgaaccgaaatcccttcaccacctattttctaccgagccagaagtttgtccgaaaccgaccgtcgcaaatcagcagcacaatccagccggtacggaccaccttcctaacgtccgactttttcaacgacctgaccacgacggtccgggtaacgcgtccaccactggaacccaaaaagccgtccaggtcacgggaattttatgtctgcatgaccaactgcctgacgctgagccactacaatccggtctgcggaacggaccacaccacctatcacaacgtgtacaagctggaatgctcgaatcgatgcggcgcaagacctagagttcaagtcagaaagccgggcatttgttgataaaacacttacggtccgttccgagagccttcgatccagtttgaagtggctcttacttagaggtagttgaaatgatgttggattgttcagtagagtgttaataaattattattgaagca

SEQ ID NO: 935 - DNA, 1340 bp, Aedes aegypti
atgggaataattttaatcgtttttcattcaacaataatcgcatttccggttgctaatgaaacagagaaccgcgcccgctatgaccactacaggttgtatcgcgtccaactggagacagatcaacacgtgcaggtctttcaggatctggaggccaagagcgatagttgcacgttctacggccatgctcggcaaccgggacaacagctgaccatcatggtcgcgccaacaaggttgccgattttgaggactcctggatcggttcttggtgaaaggacgggttctggtaagtgtgaatgcaacgttcagagcagaatcgatgcagaagctaaaaccgttaaaccagctactgccgcgccatctgagttcgactggaatcattatttccatctggagacgatttacgcatggatggacgaactcgcccagaagcactccttcattaccgttacttccttaggaatctcctacgaaggacgcccgatcaaaggcatcaaactttcccgcaaacccgacaacaaagccattttcgtcgagggaggtatccacgctcgggaatggatctcacctgcgacggccaccttcatcctaaaccaactgatcacctcccaggatcctaagatcgtcgatctttccaccaactacgactggttcttcttcccaactgtgaacccggatgggtacaagttctccttcgagagcgatcgcctgtggcgcaagaaccgtcaaccgtacggtatctgccgtggggtggacttgaatcggaacttcgatagcaactggggcggcatcggttccagcgatgatccgtgcagttacgatttctccggaggaagtgtattctccgaaccggaagctaaggcactggccgatttcatccgaaagaacgccgagaaggaacggatccggacgtatattgcgttgcattcgtactcgcagctgttgatgttcccgttgggtcacacgccagaaaaggttgccaactacgagcacctgcagtcgataacggataaggccattgcggcgttgacggccgttcatgggacggagttccagggagggagcaaacacgagacgatctatccttcgagcgggggaagcatcgattgggcctatcaggaggccaagattccggtttcgctgacgttcgagctgcggggaccaccggattcgaccgatatgttcatacttccggcggaacagattacgccggtgggagaggagaccatggcggcgttttttgcgattgtggaagaagcccagcggctggggtactacgattgagggattttttagattattcgttttgtaaatggtcaattaggataataaattgttcaaaa

SEQ ID NO: 936 - DNA, 2348 bp, Aedes aegypti
gccatggttatcatatcagttgttctcattctttcggtggcattagccgccacgggtttcccatcggacaaaatcgtcggtggtcatttcgcggaggacaatcagttcccgcaccagattggacttttctatacgggcaacttccgctgcggtggctcaataatcgatcagcaatgggtgctcactgccgcacactgcgttttggacggaattaataaaattcctccgagccagctcgcggtgtacgctggatcgtcaaacctagccggagatggacactttttcgaagttgaggacacttttgctcatgaattgtatggtgaattccaaaatgatatcgcgctgatcaagctgaaggagaaaatcgagtttgacgaaagcatgcaaaagattgaattgaacactgaagagttgcaggaatcggatgcagttaccatttctggcttcggacgcatcggtacgggcatggacatttcggaacagttgaaatatgccacaatgtacgtgttgcgagaaaaggattgctaccaagccgcaggtttcgtgagcaaggggttgatctgtttcaacaacgccgttgacaatggagcctgcaatggcgattccggcggtcccgctgtttatgacgggaaactggttggtgtagccaactttgtaatctccgcatgtggaactcaatatccggatgggtacgcgaaggttgcttactatgtcgactggatcaagcaaaccattgaaagccattgattctacagtttctatcgatatccatacaaaactcaatgatatgttcattacatgaaacaggtgcacatggtttattcgggttttggaagatgataaaatggaatcaaatacataaatgtcgagtgtaatgctgttcgcttgaatttttccgaacttgcgcctaatctatcagcctatgttcacagcatagccttaaactagtaattaactttttttcctcaacgaggaaaacatatatttaaagtcttttgaatcctatgctgcgtgatacctaaacttaaccaataactaaggaattgatcgataatcagggaatggggaaaaacatactgtcttctcaggactaaaagtaatacataaatagttcgtatattcataactaaatcctactgagttcagctcttgttcatgttaaacaccaattagctattattttttcagtataccagagtacaatttgttgctatcaaaagaggtttcttaggtactaaaactacgcatcgagatcgatcacttcgtccttgatgctcacatagggatgcagcatgtggggcggaatttcatgttcctcgtcatcctcgtcctcgagcctcgctcgtttgatgctgaactcttcgtacggatagttgctgctgtcggagttttccccgccgaaaaatccagaattctccaaactagaccgactgctttcgtttaactgttgctgggattgcgagagctgttgctgctgctgctgagagaagtgcatcttgatgacgtgtttggagaagtttgagatcacgaaacgatcgccctttttggtgggaagcttggacactttgatttgtaccgcacacatggggcatttaatgaaggcattgtagccattgagttcataggtgacattgatcatttcttcggtaagagtgagcttgatcggttgcttgtcgctccacatttcgatcagtttgatgatgatattctgaatcttcttgactcgggcttcgtcgctcagcggaggatagacggtggcttgctcgaaggcgaacggtggatttttggtggaagcgatcttgatgtctggtatgtgttcttggagcatttcgctggcttgattgaccagttcttgttgctgttggtgctgttgcaattgaagttgttgcatcatggcgcgttgctcccgtatttcccgcaccagattgatgtctgcaattcgttccggcttcactggccgctcaacgacacgctcagctcgttccattctctcttggacaggtacgggtcgttccgatcggtggttcaccattggatccgcgcgctgcagttcgttggcggcgtttgtgtaattcagataggcactcatctgcaacagtagcttgcgatgccctgggaccagtcggaactcccgtgcgggatcagtgcaaaatatgtggaagtagaactgcgtctgcgggaccaagtgaatcaactcttcgcgggcaaaacgttccatatcaacgaagtcgtcatcgttgagatttcgcaagctactctcctgctcatagccacacattttcagcaggttcttgaggtaggttggtactgagccacacactcgctcgattcgactccagttgatgttg

SEQ ID NO: 937 - DNA, 2390 bp, Aedes aegypti
cggcagtacaagataagtattagtttatcaaacagattgaaaaaggattttgcgggaaaacccaacaaatatgcaatcatcaacccgctcgagagccgatatgactaccaactttgttgctaaagtcgcacgtgtcagattggatgcaacaagaaaggccgtttgcgtacgaaaataagcctctccgtgttcaactacttctcgcgctccaaccgatcaattgacttataagagagagaagtatacgtagcacgatataacaaatttatttatccgacagcagaattgaggggattcaccattgagtttcgacgactgaccaccactggaatgactcgggtatggctcagtagagcaacattctgcattctatgttcaaccggcaacgctaaaggatttattagtgcttctatggattggctgtgcataaaaaagcatttaaactgtgcattttcctgtcccaaaagtccattcatggtggtagaattcaccaaagatgatattgcttacaactgcccgcgagttcgacagaaccctaatgctcaaaagttttactatctgaaagagcactgtctggcgaacaaccttctcttcgaagatcccgacttcaaggtggagaagcaaccccttctagggtaccaactatctacgcaaaccaaactgaaatggttacgtccgccagagttcgtcgacgacccgcagttcctcgtcaaccagccatccggttttgatgtccatccgggataccttcccagcagaagtctaagcgctgccctactgaacctctacgccaacaaacgaacatttcgacgaaccgtcccgcatgataattcattcttcgggtcggaatacgccgggatattccacttccgcttctgggactacgggcgctggctagacgttgttattgacgatcgtctgccgacgatagacggaaggcttctgttcaccctgtccacccgtcccaacgaactgtggtgttcactgttggagaaagcctatgccaagtttcttgggtcgtacaacgccctgaaggatgtaacgatcagcgaaaccatgcaagacttttccggtggcgttacgcagtgttactggttcaatgagtgcaacttgcctccggaatatttctatgaattgatcgaaagagggctggataaagggtcgatgattgctggaattcgtttgcatagaaaccaaagtttggaagaccgttcttgccatgttcatccgattactcaaacgatggcttcaggttcccgccttgtttgcttgggttacttctgtaaccaacaaacaaacccagaagagccgaagcctagccaagaccttccaaggagattctggttatgcatcgaagagttcatggacagattcgatggagtggaaatttgtagcataacgccagatccgctgggtgaccccgaaggcagtcaacggatttggaacacctcgttctacgaaggcatttgggtgtcgggactgacggccggaggttccaaagatcacaaagtttcctacggtatgaatccaaggatcagaattgaattgtccgatccggataatggaaccgaactgtgttctctagtgatatccctcatgcagaagcaacgtacgggcatggtgctctgcttggtgattggattcgaagtgttgtccagtaacaacataactgtggcccggacaatctattccaactcgcgagaagtaagctgccgattacaactgcctcctgggagttatactatcattccttcaactaaacaaccagacgaaaacggtacgttccttctacgaatctttaccggaccccaagtccaacaagaatcggaaaatggtttcgaagtcatccatcctgcccaatcgttggtaaaatctggcacctgggagtccatgattcgtatgtttttcgatctagcaaaccactttggattagtaagctctgccgatatggctctgataataaacgcctacttcctggattctccacctaaacgcaaacggaaacgctggcctgtattcgccattccactcaacaaaccggttatactgccggttaacaagaatataatccgaacgatgtacaagaaccacgctgtccaaacggcactaacggaacatatcacttgcatgcaaagggaacgctcaagaagtttaaattttgaacattttctggaaatcctggccgaacactgtcacaactggcagcagatgtacaatctagttcaataggaaattccgtagtttgaaaaatcaatgaaaataaaatcaatgataaaaaaataaatttttaagtatttgctcaatggaaatcttaatttacatttagtctcacaaagggctttgttcgggatgattgttagtctgatgttcaccaacgagctctaccaggt

SEQ ID NO: 938 - DNA, 357 bp, Aedes aegypti
atgtatgttagtaaaaattcatacatctcaaaatattcagacgttatacatgagaagagcatttcgtcaacacatcacgttggcgttgcacgtgcccgaccaatacacgcaacatacggaatctacgtgcacgccctagaacgaagaatctcctgcctcatcgggattattgcacgcaggctggtacctgagcagacaactattatcatcgggagttctcggctaacatccagcaaggaggcagataaccagcggaccacgacgaccaagtgtttcagtattcgacacttccgagcggagaatgagtcgcgagttgatcgcgacgacgttgacggaaatcgtggtgtgatcgcttaa

SEQ ID NO: 939 - DNA, 3247 bp, Aedes aegypti
ctgaactgcatacttagctttaaaataaagatcaagtcccaaaaaacatgcctcagaaatctctaaaaagtgactaactaccagccctgcgtatagcatcgcactttcgctagtcgaactcccttgtaccaataccaccgccggtagctggctgtgtcgtttgtaccataatattatttaagctccggacggatcgtgccccactagtcgtcagcaacaactcaaacggtgaacacacaaaataacgaaacgctaacatttttatttcgctcaatctgtaatcaagcgatatagacacaaagactttgtgatatttttttttcgaatttcaaccaagaagaaagcttttataacgaaactgcattataaaaaatcgtcgttaattttaaggtttggcgcacaaaggaggcggacgtcgtgaacaggaagtgcttgtgctcatcgcagcaaccggagaaagaatcgtattttggttgaaaatccagattcaagtaattcaagtgaggtgcgcgacatacgcctactatataccacactagagggtatagattggggtgtaaagcccgaattttcgcggggctccaaaagtgcgttgaagagcgaagaagaatcagtggtgtttgacgcgacacatcggaccacttttatttttggcctcggcgcggtcgtgtgactcgattcggagcagccatgccaccttcacgcctagacgggctgtatcgatcgctgctgttgaccaaattcttctgcaaaggatggggcaaaccggaaaatctcgagcgactattcgccttccggaagatcatctctaaccgggcggcctgctccaagctcgtgccccaggactacccgatcgagatcaccaaagaggaggtggcctccgactgcaagatcatcgagggcaagttcataaccccgctggagatctacctgccggggctggtgccggatgtcgtccagaatgcacacttccaggtgctgctcccgctcaagtggaacgacgaacggttcaagccgatgtgcatccacctggccggaacgggcgatcactacttctggaagcgacggaatctgatcgccaaaccactgctgaaggaagctaacctcggtgccatcatcttggagaacccattctacggtgcacggaagcccaaggaccagagagcctccagcttgcacaacgtgtcggatatcttcgttatgggcggttgcttggttctggaatcgctcgttctgctcaactggtgtgaacggaacggatatggtcctctcggcattaccggtctatcaatgggtggtcacatggcttccctagcggctaccaattggcccaaaccattggtgctggttccttgtttgagctggtccacggcttcttccgtattcaccgaaggcgtcatgagtcactcgatcaactgggacgttctggagacgcagtacttctccgatggaaattaccgcgagcggctctccaaaatggttaccgtcgtggatgacgctttcgtagccggtcagagcttcatcaagaacttcaaccaatccgtcgaggagctcaagcaggacatctgccaaacggacgatctgatcaacgatgatcctaagcccgacgtcaatctgaccgtaatccgtgaaaccacgccggaacgagaacagaagcggatccacatcaaccgacggaatgtcctcaatctttcggaaccgcttttgaacaaattgctctcggacgtcaagtgcgaactgaatcaagcggaaatcgacgagcttaatctcaaaatccagctggcactcaaaaactacaaggaggagaacaagactgacagcgacaagctgattctggaagtcaaggccgaggaaccgcaggaagctcttccctcgaaatcgctgggagccaaaatcatagagttcatcagctggagcagttctagcaatgcaaatgcgactgcgaactccacagaagtggttcccccatcgccctcatctgaggtcgctccgttggagaaacggcaaccgatcgacaccaccaaaacccgctggtgggaacgggaagcgctgcagtttatgcgcggcatgatggacgagtgcactcatctgaagaatttctccgtcccatacgacacctcgctgatcattgccgtttgcgccaaggacgacgcgtacattccacgggacggctgcgccagcttggaggagatttggcccggagcggaagttcgctatctggatgccggacacgtgagtgcctacgtgctccaccagaagctgttccggtcgtgcattgtggaagcattcgaacgggcgcgcaaaaagttgatcccggaagaggagcccatccaagacgtctccacgaccacaaacctcgaacccaataaataagaaggtgctataattgacaatggaaaccggaagtcgtccgacttacggggaaaggctgtgaccattaagagggattataccaaaatcaaacgagaaaaaaatcgaaaaatataaaatccattccggactaggcgcaacccagcctattagtggaccgggaagacggcacttccggtcgcaagcacaagcagattccggaacaaatggaatgcaaataaacactgtcgaaagcaggcaaataacgcagaaagactaaaactaaggaacggttgtatagtagttagaaacgatgcgcttcgaggcattgtgggaacttccggccaagaccccggaagccgagaagggatatgtggaatcgaagcgttcgcagtattttttcgagtcaatgtcgataccagagaaatttattatgaataacagttagataacctattcacgttacgcgtatttttagaaaccaatcagttcaaaacgctttgtaaactcacattttatgctggaaataaaataacgtatgcttttaggtagcgctagtgctactgaaaaattcaagttttgtttcgtttggaattgtgaaatacatataatgattcggtacaaaccttgatagagtccaactgcttaaactggaaaaaactacaagtcaccaactcaaaacaaatttaaaaaattctttcgatcactattctcaaattttgaaacaacacggaccggaaacatcaatgcaaaacaaccatatcaaatggaaatgccttcacagcaacacatcgaccctcgaggcgaggtgtcaagcttaaggtcgaatcttattcgagtcgaaaaggatgtattgcgctctatgcaaggaaaatcgacggatcgagattttactaaa

SEQ ID NO: 940 - DNA, 2089 bp, Aedes aegypti
gtttgatttggtctgtggaagaagcaacaacggaaaagcatgtgctacgcaagcaaagtaataaagccgcacatgaaattaatgagcagcgtggcaagtggaaaggctcgaccttttcaagatcttccgggtcctagacgattcccatttcttggaacaattaatgatatcattcatttaggaaaccctaaaacgctacatttaacgatatccaagcatcatataaaatatggaccattgtttaaaattcaaattgggaatgttaatgccgttttcataaaggatcctgacatgatgagaagtgtgtttgcatacgagggtaaatttccaaaacaccctctgccggaagcgtggacttattttaatgaaaaacgaaaatgcaaacggggcttattttttatggatgatgaagagtggttgcattatcgtaaactgcttaatcaaccattgttgcgcaatacaagctggatgattggaccaattaaacgagtgagcgacaatacaatcaagagcttaccacataacgcaaaacatagtgattgtaaagaaaagcgatttgaactgcacaatgtagagtctgtattgtacaaatggtcaattgaagttctgctcagtgtgatgctcggaagctcatataatgaaattaatgcaatcaaattaaacgaattagtcgaacagttctctcgaactgtgtaccaaatcttcatgtacagttcgaagctgatggccgttcctcctgaaatagccgatcgtctgcagctagatgcatggaaacaatttgaaaggatagtgccagaatccctcgccattgctaataaaataatcgacatatctatagatgacattgaacgtggtgatggacttctatcaaaattggaagactgcatcccctctcgagatagtataaaacgaattttctcagactttatcatcgctgcaggagatacgactgcatttgccacattgtggtgcttgtatcttctagccaaaaatcaagctgttcaaacaatggtacgagacgaaaccaagcatgattttctagaatcaccgcttattcgtgcaacagtgaaggaatctctccgtctgttccctattgctccattcattggacgctttttggctactgatgctattattggtgactactgcattgcaaaaaatactcttgcattgctatcgttatactctgctggcagagacgaggtaaacttttacttgccgaacgaatttcttccgcaaaggtggttacgaagggacgataaaaaccaatcgattataccgttcaatgccaatgctagtttaccattcgctattggaagtaggagttgcatagggcgcaaagttgcattgattcaaatgcaatatttactgtcaaagatactgaatgaataccgtttgacagtattgaatgatgaagaagtcgatgctgaacttaaattggtaacagttcctaataaaaaggttaagctcgcatttcataaacttcaatagtgatagtgataattactgacacatagtaaacagatttgcaaatgtatgtaaaataaacgaaggattgtagttttttttgtttgtgcctttgtcatactacatgcgaatgcggaaatggcaactttggcaaagaaggctcacaggtggactgtgaaagagctcatcgaacactaagctgagacgcaggctctgtcccagtgagggcgttatgtcaagaagaagaagaagaagtgtaagtgtgttaccatttactttgttttccttacatcattttgaaattggacgtctgttctctacggcgtaaaatttccaaaaacgcacatttgcccaaaattccacgcggtggtcatggctcatataagaatgaagtaaaattcttcgggaaacgccgcatgcaattttgagcaaacgcgttaatatggtcaatgattctaaaaactgcgcgatagtttgtatctagttaagcaaatgttttgtaagtttttagttttcagtataagcttgatattgccaaaacattagcaaaactgtcttaggaaaatcttagttgtatgtaagtataaattatataaagtaaatacatcgttacattggttgc

SEQ ID NO: 941 - DNA, 1253 bp, Aedes aegypti
taagagaatttcgagtaaagttatttgcttaatttggccgagtttagtcgtaaatatataagttataacaaataagagccatgagtatcagcaacaaaatgtttgccgttagtaggaagatgttatcggtgagcatgcaacaaaattcaagtaagtctcctctcccatcgaaccacgactagtatcgacagcatgttttcctacttcaggatttttctccgttgcttcgaggcttcagagcactgccagccaattattcacccaggaacagcttcgccagaaggaaatggttggccgcatagagaagatagagattcgatacattggaacccccaaagatacgaccctagtgatgaatcgaggactgtccacaccgcacgactgtgccaagcacattggcgagaagtactgtcgattctccgcactggccctcctggacaacaatacagcatgggatatgcgaagacctttggaagaatcctgtacacttcaactcctgaactttacttcggcggatccgcatttagttaacaaagcatgttggagaacttgttcgttccttctgggatcggtgctacacaaaagcttcaaggatgaagctggtctcttcctgcacagttttccgaagccaaatgttaaaacgggcagcttcgttcacgacatcgccctatctaaaaacggttggaagccaacgagccaagagctgcgtgctctgtcgatagagatgatcaaactgtcccagcaagatcttcccattgaacgtctagacgtgaccagcgaagtagctcagcaaatgttcagcgataatccatataagcgtgagcagattccaagcatatctagtcagaacaatggattgataacggtctatcgagtgggagatcacgtggacatcagtaaaggacccatggtcagttcaaccggcttggttggaaaatgtacaattgctgcaatacacgaagtacccaagtcgagtgcggacaaactttcgctctatcgagtacagggtgtggcacttcctattggattgaacttgaatcactttgcctatggtattttggaggatcgcgctaaaaaactgaatcccgcaaagctgccaaatgaaccatatgaagaagtcgcagctgaacaagtagcatagaaggcaatattggggagcattactatccttgaataaagatcaattttgtcattcacaaactgtaactattacatctttataattcagtgataaatcctatatttctgcacgg

SEQ ID NO: 942 - DNA, 2322 bp, Aedes aegypti
atgcgatcatacacgccggaggaatatactcacgaaagcccggtgtccgggggacagaggtacacatcacccaaggcgggtggcggactgtaccaaccagatgcgtactatgacgcgccgggtggttcctggtatccctcatcgtccagcggtgcttacgcgcctcattcggcaggttccgcatatcacaacgtaggccacggagcgcacctcggtggaccccagcatagccatgaacagtacgcaatgtcgccggtcggcgttccccacatggatggacatctaagccaaaatcaaacacaagcacttccaccgatgagcacgttccggggaaacaccgcccagataccgccaattggaccccagggacagaactcacccgcaatctacaacgcaatcgcaggacatcacaatcagcatgcacagcatagtccaattgtacaaaatgacaccctcgtcggcaatgcactgaaaacgatgtaccccactgatcagagtattagcagttacggttcaaacccaacgacaccagtgaactcacctcctccactaacatcacagcagcaagcggcagcagccgccgccgcagccgcagccctcgcccaacagcagtcttctgcggccgcgagtatacacggctccggagcgacggccggttcgtccagcggcggtgcaggttcctcagccacgacgtcctccgcggcagctgcggcagcggcagcagcagcaggcacccgcatggaggaacgcttggacgacgccatcaacatcctgcggaatcactgcgaaccgcaggtcggtgtgtcgctctcttcgatcgatgccggttcgccgtacggtccggccggggcctcgatcattccacctggcacttccggcggtggttcctcctcatcacagctgcacggccaagactcgaccagtgatctaccagtgacggcggcggcggccgtggcagccggcctagtaccagtgaaaaccgaaagattacccagcacaccggtcgcgatgaacagtattgagttgaagtttactgacgtgtctcactcttgtattgcagagaaacgcaaagaaccgccagattcagataccaaacccagcagttccgtaccaggttccaccaagggtgccaagcggcagcgtaaatataaaaattcacgtagttgttccagtgctgacgatgacgacgacgacgatgatatcgatcccctgacgaaggatcgaaaggagaaggaacgaagacaggccaacaatgcccgcgaaagaatacgtatccgggatatcaacgaagcactgaaagaactgggccgcatgtgcatgtcgcatctaaagtccgacaaaccacaaaccaaactcggcatactgaacatggccgtggaggtgatcatgacgctcgaacagcaagttcgggaacgcaatctgaacccaaaagccgcctgcttaaagcggcgagaggaggaaaaagccgaagacggccccaaactgccccctcacatactacaccaaacgccgtacccctcactacccgtaagtaacctcaagcaagaacgagagtgagagcactgagaacgcgcgtgtcgtgccgtggcatctataactagcaaaaaataatgaacaaaatcgcaatcggtacttcaaaattcaaacccatacccgcttaattcggctgatgtatgtgagcgaaacaatcgaaagttatcgtacgccaaatgatcgagcgtggcccgccgccaaatcttccccacaaccccgggccaccacaatagcataataactttaataaccttattcgaagataacactgcaagcagcatacatgtacatatactagagcagcgggaaccgttgcaacagccgcagccaccgcagcttcttcagcagtagaagaagcaacagcagcagcagtgacaaaatcaacagtagtgggtgaatcgtgtgagtgctggacgggtgccgattggtggatgtggttgtaagcgggaagagtgattgaatgggtgatcagaatgtgaggaaggtttgtgacactgatctggaaatgggaacgaaatattgcgctatccttttaagtagctgtctgtattgtcaatcggaacgagtaacggattttagaggagaggtagatcgaacgattcgggaggttaaggaattgatcggggagatcgggaacagactagaattggagaaacatacgccgcgaacccttcctcgtcatgagttcagtaaaacaactagagagtgctaggtattgaaagttagagaagcttatttttattgttaatgaaggaattataacatcacatcgatcagactgtgtttcac

SEQ ID NO: 943 - DNA, 2040 bp, Aedes aegypti; identical to SEQ ID NO: 417

SEQ ID NO: 944 - DNA, 1693 bp, Aedes aegypti
gataactcaacgttacacacgtcatgttggaccctttcctgctggcagccttcgctgccgttatcttcctggtataccacctcctcaaccgcaagtaccaattcttcgccgaacgtggaataccgtacgtgaaaccgacgctcctcctgggaaatggggcctctgtgttgctcaaaaaagaagacctactgcagaacatccagcgaacgtacgatacattcccaaatgccaaaatcatgggcatattcgacttcgtcaaacctataatgatgatccgcgatccggacgcgatcaagcaaatcggtgtcaaggactttgatcacttcgtcgatcacacgccactgttcacgccggccgattgtgaagacgtgggaacgaacagcctgttcggaaactcgctgtttgccctccggggacagaagtggcgagatatgcgagcaactctgagtccggccttcaccggaagcaagatgcggcacatgttcgagttggtgctggattgtgctcgatctacggcggagtacttccgcgaggaggccaaatccggtcgaacgaccgagtacgaaatgaaaaacgtattctcccggttcagcacggacgtgatcggatcggtggcgttcggtatcaaggtcgattcgctgcgcgaacaggacaatgacttcttcgttaaggggaaggcgatgttgaacttccagaatttgaagagcttgttgaaggtgatcatgctccgatcggcaccgggtttgatgaatcggctcaatgtggatattacaagtcctcagatgaacgcgtacttcaaggatatgatcatggacaacatgaagcaacgggagattaacggaatagttcgaaacgacatgattaacattttgatgcaggtccagaagggtgctttgctgcatcagaaggacgaacaggacacaaaggatgccggctttgccactgttgaggagtccagcgttggcaaagcgctccataatcgagtttggtccgagaacgaactcgtcgctcagtgtttcctgtttttcctggctggcttcgacacggtttctacctgtttgaccttcgtaagctacgagctgctggccaatcctgatgttcaacaaaaactgtttgaagagattatggccgtcgaggcctctctggacggcaaaccgctgtcctatgaagttctccagaagatgcaatatctggatcagatcatctcggaaacgttacgcctctggcctccggctccgttcgtggaccgatactgcgtcaaagattacctcttcgacgacggccaggggactcgggttccgattgaaaagggtcaaattgtttggttcccgatcacggctctccaccacgatgccaagtacttccccgagccgaaccgctttgatccggagcgattcagcgaacagaaccgtcccaagattaatccgggtgcgtatctaccgttcggagtcggtccacggaactgtatcgggtcgcggtttgcgctgatggaggtcaaggctatcgtgtaccacctggtgaagaactttacgctggagcggagtgggaagtctcgggttccgttgaagctggagaagagctacattgcgatgatcgtggagggtggcatgtggttggagttcagacctcgggcgtgatgggaagggggttcaatagtaataaagagtaacaaaatgtgtcattgttttagtat

SEQ ID NO: 945 - DNA, 2801 bp, Aedes aegypti
gtcagtagtattgcggctcgccgtccaatttcaaaaagtgctccgcgtggcacgctttgcaatcccccgcactaatctatcgagacgttcgtccgacggacgaagggaactgcccggctgcattgagactaaatcaagattagtttcgaacgcgattagaatcgatgaacaagtaaaggtgcaagctcaaccgcggcaagatttttgtggtgcgtgcgtttcggggactgttgcgttgctaagggctgctggatcgctctgcatttctagtaacaagctgtgcttatccggggattaggttgctgtacgatgcaaacagtgaaaagctccgagaaacccgatccggaagttgtcggcagcagcagtagcagtacaccggccgccgccacgatgcagcaatccacgcgaaccgagatgcgcccggtcaagtaccactacgcggactcgttctggtgcacctatttgatctcggtgttcgcagccagtattgccgaaacggtcacgtacccgctggacctcaccaagacccggctgcagatccagggcgaagccacagccgtaaccggtgcaatcaagaagctcaaatatcgcggaatgctagcaaccgctagtggtattattcgcgaagaaggagctctcaagctatggcaaggcgtaacaccggctctctatcgtcacattgtttacagtggagtccgcatcgtcacgtacgataatctacggaagaaacttcgcaacggcaacaacgactttgcactgtggcaatcggccctggctggggttggagccggtggtttggcccagtggctagcctctccggccgatttggtcaaggtgcacatccaaatggagggcaaacgtcgcttgttgggtttggaaccgcgcgttcatggagcggcccatgcattccgggaaattgtaagccgcggaggaatcgccggcctgtggaagggtagcgttccgaacgttcaacgggcagctttggtcaacctgggtgatttgaccacgtacgatacggttaagcggttcgtgatgaagaaatccggactgcccgattgccatttggtgcacattatttcttcgatttgcgcagggctggtcgcggccacgatgggcacccctgccgatgtagtcaagactcgtgtgatgaatcaaccaacggatataaatggaaagggactgctctacaaaggatcgctggattgtctacagcaaaccattggaaaggaagggttctttgcgctgtacaaaggatttctcccagtttggatccgcatggcgccttggtcacttactttttggctttctttcgagcagatccgcactagtctgggtgctggtggttactaggccgtgtcagtatcagacaggcgtttgataggttctacaactgttagtaagtataattttatcaacatttgaagcgcaatctgctctttcattgtccgattgggacgcaattcatagttcagtcgcacacgtaattcactcgatttgagatagaaggcacaaatgtacagttctatttagcacaatgcagtttttcaattacgagcccaatttgaacgaattaaacaaaaatatacgaaaaagcagaacaaaattatatctactgaagagtgccatcgaaattaaagagcttcggattatcctttttgagcatacaaagttcttctttgttctctaacactggattagttgtatactgaaaccactaggctaaaacatatcctttgcgtgagactatttactctatcggaatcatacgttggttgagggaggactataattttgatctgtgatttagtcgatagtagccactaggtttaagcgtacattcaaccaactaagttagattgattttggtaccggaggtagttcacgctcggaagctgcagcggcggcttatgcttctcatcagaaattcacacattctctcaaagcaaccatctcggatttagtcacgcgtcatcacagtcagtcaaataacaccaatgaaacatttgacaagacgcaaacaacgcctcagggaagcctttttcaactaaccaacctgtcgccctttggtgcaactttaattgtgccctgggtcccatcttgaattctcccacgacagaagttcatccattatccaaccattttcgaatatagggtaccacctttgcgaagagacttaaaaaacgataccttcaattgtaacatttgtttgactacttatcgtttctaattaagtaacagacactatggacaagtgatcattctctgcgtgtaacaagccacgaaagagaaaacttctcatctagaccgccttgttctacacataatgatgcttaatactatacatccgtaggataacctgctacctataatcgacacgtgacaataccaaattttatcatgttcccatttccgaaagaatcgtagttcatcctcaaaagcgaataaaatagaaaaaaaaagattccattctggtacaacgataagaagcactgacgaaacagacgaattatgcatcatgaccacagactggccaagtagaaggtgcagtcgctctgttacgtccctaaacttaaaataatttctagtgttatacaacctactaactgcaaaccacatacccaatcccccaataatgatcaaaagacacgatctggcaggaagctcgctaaactgtatttgtctttgggaaaggttcgtcccgctgttaggaagttgtgtatttgtcgttttgcaggttcagaaaccaatgctcatgtgtaggcgaaaagtgtgtttgaatgaataaacattttcgataagca

SEQ ID NO: 946 - DNA, 779 bp, Aedes aegypti; identical to SEQ ID NO: 427

SEQ ID NO: 947 - DNA, 1399 bp, Aedes aegypti
aaaaaaggacaaaaaaaagtgcgatcgtcgtcctgaactggtcgtccctcagttctgaacgtcgtttattcctgcattagcattccacgaaccaaggcaaaagtgtgtgtcgagtgaaaactgggaggagtcgcatcacaaattcatagatcatcctttagtggctcgaaatccagtagtgctgtgttgacacaactctaacagcattgttaacttccattccttgagtgagaagcgtttccatattccgaacaaagcaatggcagagataaagccggaactcggggaaatcgacagcgatgctgaacagaactattccctcggcagtaacgttgatccgaagaacatgcaagagttgaccatctacgttcagaatctcctccagaatgtgcaggataagttccagaccatgtcggaccagattatctcccgcatcgacgacatgggcactaggatagacgacctcgagaagagcattgccgatctgatgcaacaagccggcgttgaaggtgccgagaagtgaggactgccaggattcggatgggaacaaaagatttatcgcaagcatgatttagtttcgggataagtttccctctcgtcccgtatcagaacgtgtgacagtgtcatatttgcgaaaaaaccaagtttttctgctggttagggtatcacggtgtgtcttgaaccgttgttaacgaataaaatggccatcaatcagtatcgaccattcgaaagatatggtatccagtgatttaaagatagagggccattttcaaaataaatatttctatgttggataaaatatatttactgcatcatttattttttcagaattaatcaaaccatcaagttcacattcaaaagttgtggtatcttagcatcttccttgtaaattgaagacatttcgttgacggaatcaaaataaccatgataatttaatgattccacaaacggaatgtcttcaaaaacacaagggagatgtttagataccacatttttattgttgaatgtgacctgatgataaattaataaataatatttatgatagcgtgtgggattttttttttatcaaacatgtaaatatcccttgaaaatggttttgaaatcttcaaatcgctgtaacttgtgaaaatgttagaatctacgaagagtatgcttggataccatatctttcgaatggtgagtgcagaattgatggttattttatttcgtcagtaaagcttttagacacaccgcgggtatgattgggagtcatggcattatcgacaaaattcatccattagttttattgaatccaccttatacaaaaaacgaagggaggaagagatcacacaatcaaacaatcggtacgaagtaagccaaaaagcaaggatacaaatttaaatatagagcacgcagtaat

SEQ ID NO: 948 - DNA, 3211 bp, Aedes aegypti
atgtttcgtcggacgtttacggtgtcgtattccccctttcggaacaactacgtaacacttccggacaactaccatcggatgctgtccagctacaaaaacggctgtttgagcatcacgcacggtatcgatagcttcttcatgtcgtggtcgccattcggaggcggcgggtatcaggataatcgcatcggaatcaatgcacaggtggccaccgccatgggactgaaggagggcgacgccgttatggtggccatgatcatagaggcgcgatcgctgaagacagtggaggtgacggcggccagcgaaaaggattgggatatgttgcaagtgagcagcagtcgcattcaatcgattctgttggatcagacgaggatagtgaccaaaggacaaaatttgatcgtgtgggtaaacgattcaattagcatcaagatcaaaatcaaatttaccatacctcctcttccatacggtcgactggaaaacgataccgaactagttgtagagccgtacaaaaaacccatgctcaaaaaagatgcacaaaccgtgccgagtgccttaacgcgcagcaatacaaacttgaacatagcagaactcgtacgaatgcgaaatcagcagcgaagcaaaccgaacggcatcgagaatggagacacactgataagttccgtcgcatcagcccagttcaaaaacaaatcgcagtatctggatgacctggttgccaccctcacccgagaagtcccaaaaagctacgaattccgcgtgatccgaggtgtatggaactgccggcgaaacaattcgcaaatatgcgacatttacatcaccaaggagaacatccccgccggaatggacattcatctgccgtttctcttgtccacaaatgacgatcgggagtactttgtcaacgtgcggcttacttccgacgcggagcgtttcccgagtaacgcctatcccaccgttgaagtcaacgacaagctgatggaacagttggaaatccaccacggggaaaagatcactttacgggcgaaacaaaacgccctaaacattgtggacatgatcgagttgattccggccaccaaggtggcgtccaagatcgagagcgatatcgtggaaaagttcaaggagttcattttgttcaactcgaaagtgcatccggtgttgttgaatcagggtcaggtattccgacttccggagtactatctgacggtgaagttgcaaccgggcaatttgaaatactgcctggtgaatgcggtgattttgaggcagagtaagattctgtgctcgggagaagtgaaaaatttgaatggcgtggttccaagtgaggaagatgagaagaaaaggtgtctcgtggtgggagtagaagatcagaaagtggtgaagatcggaaaattccagaagatcgtggatgattgtgtggatcagttgaagttgaagctgtgccttgatgagaggagcgctgtgaggaagagctacaatgtgatcgtggctggatccaaccagagtggtaaaagaaccatcgtccaaacggtactacgtcgcctagccgaagcaccttatcactgtttcacgaccacgttccaatgctcgaaacacaaagggcgcaaaccggactccatacagaaggatcttcgccacgcattctacatgtgcatgtttcacagcccagcggtgctgtacttggaagggctggacgtcctgacgcacaatcccggtgatcagaacacccaggatgccgagtatcacaataaagtttcggacgtgatacgcaagcagatcgaggagttcaccagcaccaacccgatctcggtgatcgcctccatcagcagtgttgccaatcttaaccggaggctttactcctcgcggggatctcacctgttccatgacctccagaaggtaccaaacctcgacaagactgatagagaaattgtgatcaaaagtttgttcgttaacaaacgctgcaaactagagaagaagatcaactggaagaagctggccaactcaaccgaaggctactcggttgggagcctggtgcagatggttgatcgagcggtattttacgcgttcaagaaaaattccaaatccccactggtgacggatgagatgatcggtagtgccttggatgttaccaacgaatattgcctgcaaggaatcgaaagtcacaagcgctctgatgagccggatgatgaagacgacgttccgggggataaagttccaggcttggaaaacgccatcgatgtcttccaggaggttttgatgtggccgactaaattcccgaagatcttcgagtgttcaccgctgcgcaatcaggcaggcattttgttgttcggacctccgggaacgggcaagacttatttagtttctaagctggcaaaaacgtggaacctccggatgatatcggtaaagggtccggagttgttggcaaagtacatcggtcagagtgaggaaaacgtgcggaatttgtttgatcgagcacgcagtgccaaaccttgtgttctcttcttcgatgaattcgacagtttagcgccccgaagaggacatgactccaccggggttacggatcgtgtggtgaatcaattactcacggaactggatggcgttgaaggtcttcagggggtgactgtgatcggagctacgtccaggcctgaacttctagatccagcactgttgcgatcgggcagaattgatcgattggtggagtgtagtctaccggatgagaaatcgcgtctggcgatcttcaagaaccaaagtagctcattggatctggctgctgatgtgcaactaccacaatttgctaagaaagctaacagctataccggggcagatatccaatccattctgacgaccgccaacatgctagccgttcaggagtgtctcaccagtgccgaggatgatgagcatgttccggagaagataacgattaaccagcgacacctactggaggcattcgcaagcacccgtccctcgctaagcccgcaggatgtgcaaaagtacaaggacacatatgcacgattcacaaacaaagagccgccttcgagggatttcgttgcgaaacgggccaccttggcttaggaaaggcttcgatgtaatttgctcagcgggtctggggtgaattcaaacgatcctttgttgggtttaaggtgtgttaacgcattcgtcttgaattttaggggtttcgggaactaagtggtggtttttataaaagacatgaaactatttctagaac

SEQ ID NO: 949 - DNA, 1639 bp, Aedes aegypti
atggccgtggtccgggccggaacaacggaactagacgatgggcggcgggacaattccggggtgatgtgttggcgggaattcgcttgcggatggggagcagcctttgtcaacatcaccgttacctatcccatctacaagatgatattccgacagatgctgcacggagtgcaactgaatcaagctttcggtcagatacgtagcgagggcattacctatctgtatcgggggatcttcccgccgttggcgcagaaaacgatttccctgtcgcttatgttcggagtgtacgatgggaccaagcgcccgttggttaactgtttcggaattaatgaatatgcggccaaatcgatcgctgctgtggcggcaggttccgtggaagcggtgctaatgccattcgaaagggtgcagactctgctggccgatgcgacgtaccatcagaagtacaggaatactcaccacgcgtttagactgatcatccttgagcagggcttcaaggagctgtatcgtggcttagtcccgatcctgtggcgaaacggaccctccaatgccatgttcttcataatgcgagaggaagcggacgtacggctgcccaaaaggaacacagtggtcgcacagcgaacccaggaattcttgtccggagcctgcataggagggtttatcagctccgtgttctaccccatcaacgtgctcaaagtgacgatgcagagtcgaatagggggtccatacgatagcatgtgggttgctctgcgacaagtatacaacgaacgggatcgtaagctacgcaacgtctacaagggcgtaagtatgaactgtaccagggcatttttcagttggggcatcgtgaacagtgcgtacgagcagctaaaaaaggtcttctactgatcagtgatcagcagggaacccgatgaatgtcggcggccgacagcgacgacaataaagaaaactcctaaggtttatatttttcgatgggaaagtcgattgtgatgtaaataggtgtacctagtagcatgatctttggacgatttttagacaaaacgaaaaaaaaagtgttattagttcgattgaggtagcaaaattgtagtatttctagtctagggcaaacactaaaaaatacgatttgaacaaaagttctatctcatatggaccacgaacacactcacattacagacaaacacacgcacgctggagaatggaacttttattctcgtcatgtactcttagggatgaacactagttagctcaaatctcccattttatcggagctaatatatccagattctcgttcttgttcgtttgttgaaacccagaatgagccagttgcatttaaatgtgcttgaactcacattgtcgtcccactagagccaatttagtccttcactcagtgatcgttcccaaggtaaagtttttctctccctgtaaatatatgtccctaccattcgatatagtgtaaatataaatctaggctacaaacaatcaaatcgagctaatcacaatgaatgcggcggttttggccgcaaggaaaattgtattgtgggaagtacccgtaaggtgctaaaatcaaatcgttagatctatctgttttacctagccgaaagagaaaaaaagaaagcacatacgattacgatgaatatttctcgcaatg

SEQ ID NO: 950 - DNA, 2430 bp, Aedes aegypti
agctgagaagcagactttgtcgcagtgaggacgtaactccaataataagaaataaggtgcagaattgatggtaatttttcccgttcataacggtgccaaacacaccgcggttgcattttcccggagctggtggggaaccataagggagcaaacatgaacgcttagcttattcagcaccacagcttggtaacttagttcagcgcgaaccaccgtcgacttgagaccataaagctacaatcgggtgtttgtactgcactgtactgtacggcctcctcctcccagtgcagttcggataaactgtttttcattgcggtgctagtttgtagcaacgcacggtagcattctagtttgcgcaaaatggaacgcatcagtgatattggcgctacgccttacgaaccggccccacgtggagagtccctgaggaagctacgcaacggaggccgaagcagtggtctggaatcgttgaagtttgctctgtcgattgtgctggactgtttgacgtttgtggtgctggtgattcccattttggtccgatatgcggtcggtctgttcgtgtcaccgcagaagaaaaagattgccggacagttggcactggtgaccggtggtgccaacggactggggcgggaaatttgcctgcagctggccaaggagggctgccacattgcggttaacgatctggatgccaccaacggggccaagacggttgacgatctgaagaagatgggtgtcaaggcgaagtttttcaaggcggacatttccaactatgatgccgtgcagggactccgcaaagaaatcgagagcagtttgggacccgtcgacatactggtcaacaatgccggggtgctaccgttgatgtcgcttcgtgaaggaaagcctgaagacattcagaaggtgctggaaattaatctgctgtcgcatttctggacgctgcgtgcatttatcgaaggtatgattactcgacgctcgggccatatcgtggctatagcttccgccacttcctatctgccagttggacgtctggtgtcgtatgttgcttccaagtacggagtccgcggcctcatggaagcgctcaacgatgagatgtactttgacgggcttcagaacgagattcacaccaccaccgtgttcccgtgcttcatgaatacacgcaaagaagttattaataccttgcagaaattggatattctatcgaggatgccaattttttcgaccaagagaacagcccgtgctattgtcagtggcatgcttcggaaccaacgccacgtgttcatgcccaaatatgtaggaccgttcctgacacactatgaaactattccagtggaaatcagaagagtagctacaaagttgttgctgcaaaacaaaggggttcctaagttgatggactaagaaatttttatcgatatatatttgctttagtttgactgaatctatagttaggtgcaagttttacaaactagaatatgattttctgaacatcactgtgattgtacctcaaaatatattctcacaaataaaaaaaaaacatagttaaatattgtaaagaaaactgtttcttggattgcattgttttgactagttcttagaagatttgtaaaactttagtttttttcacattctagaccatccgtacattcatcgatgggatgattgaacgccgtatgggtcacattgttgcagttgcttctgtagcatgtaagtatagacaatgaaaaaatgtaattttcttgctctcaatgttcattggcatttttattgaagcttacctcccgcaaggccgaatgatatcctacgttgcctcgaaatatggacttcgtggcatgatggaagcctttagtgacgagctttactatgaaggactatcggatcagataaaaacgacaatcactttcccatttttcatgcccactcgaaaggaattgattgatatgctttgtaaattgaaaattatcgctagagtgccaatttttgcaccggagaaaatggcacgtcgaaccgtcaatggaattctctgcaacagtcgacaagtatttttgccgaaaattttcggcttcggattgaaggagtacgaattcattccaaacgacgtgaaacgattgggacggaagctggtgttccaaagtgacattccacgattgatgccgttgccttcacagttcaatatggggtgattctcatgtaacgggcataattggacctccgacgatgggcataatttgatctccgattggtctaaattcgtatcggtcaattgctactttgaatcagtaaaaagaaggaaatttgttttataactttttatacagtaaaacaaatactcactgtgttccacaaaagctacatttttgtggtttagcattaccaattgtaaaataagcagtacctggaaagagaagaataattatgttactagaaataattgttattaaaaat

SEQ ID NO: 951 - DNA, 588 bp, Aedes aegypti
atggttctcctaccgaccattctgttcagtgatttgtgggatggctgcctggacagtcccatccgatcatcccaaatcagatgccaacacctcgacagacaaccgtttcctggaggttttctggtaacgttcgacgacgcgcccaaaaagtgtgatcgaaagccatgctgtcgaactccaagccagcgcaaaaacgaaggaaacaagcaagaaacagcggataaagcacccgtgaacttccaggtcagtttgaatgtccaggaattccagccggaagatatatcggtgaaggcaaccagtcagttcgttattgtggaagcaaagcacgaggagaaggatgctgaaaatggttacgtgttgagacagtttgttcgtcgataccgacttccggaagggcacgatagcgacaggatagaatcgactctatcgtccgatggagtgctaacgatttctgcgccagttttggcactccccgcaccggagaaggaacattcagtgatggttaaccgtgtaaaaatatctacagcagacgagaaacaatgcactaaggagaataaaaattttactctcgaggatctggatgaatag

SEQ ID NO: 952 - DNA, 2192 bp, Aedes aegypti
gcgacgccggtaaagcgctcgctctccagcttgaccaatacggttagcgacgtttcgcgccttcagcggtacgcgcctataggtagctagagaggatcgcgctcggtctggtcgagccttaaaatggttcgattcgccggtttcgagcttcagtacacggttcagttcctgctgcgttgtgctgtccggtcaattagaatagtgtaagagccaggcgaggaagcaatactagcaagctacataagcagagtacaacacgctgctgagtcctgccttggacaaagtcgtcgcttgatcattgtcacgatcagtcacaaagcgcaaagcaggaaaataccctctgcctccgagagatcaggaaaaattttacgcgagtgaaggcgggtaaggtgatcgagcaacggagaaacactgttttttgtcgggtcaagaagggtgctgttgctgaatcgtgttgtgtagaagacagtcgtgaaggaagtgtcgaccggtgaacgtcgttgaagtgttccttagaggggcaagtgtttgagaaataaattaaaaatattacgacaagcgagtggcggaaccgcagactgaagatcgtgtgggtgcgttaccgaaagttagtgaggcggggaaaatagtgatctgtctgttgttatggttgatgcgccaattgaaagtgacgacgttgagtaagagaattcggccatccagctcttctacgcggcggaggcctgtcctcattcgtcgagcagcgatcgtttaggcaggacctacaacgaccttctggcaattgcgtcttatccgtgtggccaatataatagtcagtgtctgaaaaacagtgccaactttttgttttctgtttgtgtgtttcgtcttgtgaagaagcccgggccaattactagccaaaacactttcgttcgacttggttcaaaaagaagcgttgcatccaacgtagaccagaggcaaccgatcatcagccatcgtcgtcagaacacgccatcatgaacaagcagtttccaaaacgccaagaaccgccccaggcctcggtggcggtcaagctgctgacagccggaacggccgcgtgctgggccgatttcatcacattcccgcttgacaccgccaaagtgcgattgcaagtccagggcgaacaaccggctcgcacagcccccctgacgcagacggccaccgccagaggcgccacagcctaccaggcattcaaattgaacccatcggccatccaggccattcccggagcgcagcatgtccagtaccgtggtctagtgggaaccatcacaaccatcacccggcaggagggcttccgcacactgtacaatggcttgtcggcgggactgcagcgacagatgtgcttctcgtcgatcagactgggcttgtatgatacggttaaggaattctacggaactatcttcaaagaaaacgaagcgggtcttcaaatcatcactcgaatctgtgccggcctgacgaccggtggcctagcggtagcgctagcccatccgaccgacgtggtcaaggtgcgcttccaggcggcctcccgctcgaacagcaaccgtcggtatacttccacgctgcaagcataccggacgatacaccgcgaggaaggtgttcgagggctgtggaagggcgcgataccgaacattggacgcaatgccatcgttaatgtgtcggagatcgtgtgctacgacgtggtcaaggattgcctccagcggtacgcaaacatcccgaacgacattcggttacactttagttcggcggtggtggccggatttgccgccactgtggttgcctcccctgtcgatgtggtcaagactcggtacatgaactcgcccaagggtcagtaccggggagcgctcgactgtgccatcaagatgggccgccaggagggagcggccgcgttctacaaaggttttgtgccatcgtttgctcggcttgtctcgtggaacgttgtcatgtggataacgtacgagcagttgaagatgattgtgtttaaatcttaatggggtggaacgctgctttaaggatattataagttatttttacacttttttaacatagactggacacttagagagtcgtatattttttatattttatgactatgaagaatattgtgatgtatcaaaagagaaaaaaaacgaatattgtaaacgtgaataatttctataaagagtatattttgacaaacg

SEQ ID NO: 953 - DNA, 3922 bp, Aedes aegypti
atggcgcgggccacaagtcccctggaagaaataacgttcaccatcaatggaaaggcacacactgttaatgcaaaaactgtcccggttgacacctcgctgaataccttcattcgtaaccatgcccatctcagcgggactaagttcatgtgcctggaaggaggatgcggtgcttgtgtggtcaacgtgaatggcgtccatcccgtaaccaaagagaaagcttcttgggctgtcaactcgtgcctattcccggttttctcctgtcatgggatggatattctaacgatcgaaggaattggcgggaaaaaagatggttaccatccagcacagcagcgattggctcactttaatggaacccagtgcgggtattgctccccgggaatggtcatgaacatgtacagtttgctcgaggcgaagaagggtcaagtttcgatgaaggagatcgagaactcctttggcggaaacatttgtcggtgcaccggatatcgcccaattcttgatgctttcaagtcactggcggtagatgcggacgagaagttggtgaaggcttgtcaggatatagaagatctgcagaaggtttgccccaaaacgggtactgcatgcgcgggaaaatgttcaccgggtgaacctaaagtagtcagcaagcaaccggttcgaatggtgtttgataataaaagcgagtggcataaggtttacaatatgaacgatatatttgccatttttgatcaaattggagagaagccatgcatgcttgttgctggaaatactgctcacggagtttaccgacgtaacgacaatcttcaagttttcatcgatgtcaacgcagtcgatgagctgcatgctcatactctgggaaacgaattggttgtcggtggaagcgtatctctaaccgaattcatggatatacttacggatgctgccaacaaaaataacaaattcagctactgcaaggaactagtgaaacacatcgacctgattgcgaacgttccagtgcgtaactcgggaacgattgcgggaaatctcagtatcaaaaatcaacaccacgagtttccatcggatatctacttgattttggaagctgcttgtgcaatgctgacaattgctgaaaacggtagtaaaacgagtactgtcagtccaatggatttcgtacacatggacatgaaaaagaaggtgattaaaaacgtgattctcccggcgatggatcctgctgtgcacttcttccgatcattcaaaatcatgcctcgggcgcaaaatgcccacgcctacgtaaatggtgcattcctcataaaaactagtgccaacttggatagcgtcgaactggctcgaatttgttttggcggaatcaatcctgacttcacccatgccgtgaatacagaaaagttgttggtaggcaaaaatctgttcatcaatgatacaatccaagctgccatcaacaccttaactaccgaactggacccggattggattttaccagatgcttctgtagaatatcggaagaatctagctatttccttgttttacaaattcacactcgcaatcatacctgaaggtcaatacagtcttaaaccggagtacaaatctggtggaactctcatggagcgcccactttcatcgggaaaacagaccttcgataccatcgaaaaaaattggccgttaaccaagaacattcccaagattgaggctttggctcaaactgctggagaagcgaagtatgccaatgaccttacaccgcaacctggtgagctctacgctgcgttcgttttggctacacaagctcattctagaatcgctaaaatggatgcatctgatgctctgaaaatgcccggcgttgtagctttctttgctgcaaaggatattcctgggatcaataattatatgccagctggactaggcaatcaagatgttgaagaaatcctgtgcagtggagatgttcaattccacagtcaaccatcaggtatcatagtagcagaaacgttcaaccaagcccagaaggcagccaaggccgttgttataacatacgagaagaaaagtaatcggccactgtatccgactctgaagtcggtcatggacgttgacgctcgggatcgtttctatgacatgtctttcgacaagaaaggaaaaggatatagagtagctcaggcagcaacggctaccaaaaatatcaagggacgtttcgaactagccggacaataccactacacaatggaaacgcaaacatgtgtttgtgttccgattgaggatggtatggatgtttacagttccacacaatggatggatttgacgcaagtggcgatcgctgaatcaattaaagttcctcaaaacagtctcaatatgtacgttcgtcgcttaggtggaggatatggtgccaaaatttccagagcaacgcatatcgcttgtgcttgtgctctggctgctcattcattgcagagacccgtacggtttgttcttccaatcgaaaccaatatgtccgctattggcaaacgctatggttgtatcagtgattatgacgtagatgtagagaaaaacggtaaaattacaaagatgaacaaccactatgtacaggactatggagtatcgttgaacgaatcggtacaaagtgccactaccgagttcttcaaaaactgctacgatgcaaagacatggaaaattgttggcaaagctgtgaagacagatgcccccagcaacacgtggtgtcgagcaccaggaacaactgaaggagtcgcaatgatcgaaaacattatggagcatatcgcgcacgaaaccggacaggatcccttggaagttcgtatagcaaacatggctgctgataataagatgaaaacattgatgccacagtttagaagtgacgtaaagtacgatgaccgtaaacgtgctattgacgagttcaacgctaacaaccgttggaagaaacgtggaatcgccgtagtaccaatgcagtattggttggactattttgggcaattgaacgctattgtatcagtttatgctggagatggcacagtgtcggtcactcatggtggtatcgaaatgggacagggtatgaatacaaaggtagcacaagttacagcgtatgtcttgggaattccactggaaaaggtttgtgtaaaaccgtctacgagtatgacatcgccaaacgcaatagttacgggtggcagcatgaccagtgaggctgtttgcttcgcggtcaaaaaagcttgtgagacgctgttgcaacgtatgaaaccggttcgcgatgaaaatcctggtgctccatgggagatgatcgctaagctatcttacgtaaagaacatcgatttatgctcggaagctcaatacaaagcccaggatattaaagcttattacatctggggtctcagttgtgctgaagtggaggctgacatcctcactggaaacgtacaagttacgcgggtagatattctggaggacacgggagaaagtatcagccccggtatcgacgtgggccaaatcgaaggtgcttttgtgatgggcataggatattatttgaccgaggcgctcgtctacgataacgaatccggtgctctcctaacgaatcgcacgtggacttacaagccaccaggtgctaaagatattcccattgattttcgcgtcaacttcctacgcagtagtgctaatccggctggagttctgcggtccaaagcaaccggtgaaccagctctgaatatgacaatcgtggttctatttgctttgcggtacgccttacgctctgcacggaaagacgctggattaccagataactggattccgatgggaactcctacaactccagatcaggtttatatgttggcgggtaatactaccgagcagtacatgttaaattaggcaatcatgtgatgttttatacaatgtttcaaatattggtgctggaatataagtatttatggtcaataaatataaaatactgtta

SEQ ID NO: 954 - DNA, 1227 bp, Aedes aegypti
cgtcagtgtagttatcaacaaaccgcatcgcagtgtttgcgagagtgattataaatttggttcatctccgctcgagattgttttgtaaaagaaattcctgtgtctagatagtcatgtccattccgaacgattccctggacgacgacgatctgttggccaatttggatctcccgtcgccaccgaaaaaggcatcgctagtgagtgaaacctccgacgctaccggcagtacatccaccgcaaccgtcgtccgttccgtcaacaaaggcaactgcgtcctggtgaacccgaaacagcgcgggaatcccctactcaaatccatccagaacatcccgtgggagtacgacgacatcgtgccggactatgtggtcggggcaacgtcctgcattctgtacatctcgctgcggtatcacaatctcaacccggactacatccatggccggttgaagcagctgggcaagatgtacgagttgcgggtgctactggtccaggtggacatccaggagccgcacaacgccctgaagcacctgacgcgcatctgtctgctggccgatttgacgctgatgttggcgtggaacgcggaggaagccgggaagatcgtcgagacgtacaagatgttcgagaacaagccgccggatttgatcatggaacgggccgagcagtatccgtatcagaagctcgtgagtgccctgaccaacatcaaaccggtcaacaagacggatgcgatgacgttgatacagaactacggcaccctggccaatatgatcaacagtagcgaggagaaactgtcgctttgttcggggctgggccctcgtaaggcgaaaaaactgcacaagacgttcaatgagaacttcctgaagtcgtgatttacgaaagaatggttatggttaggattattgtataagttgtttataatattgtttcgataaatacatcgctgttctaatcaaatttgcccaccgatatgttcttcgtgttttcacctttgatcattgtaaaaaaatcgccgtttaaaattatcggtaatttcccttcaactcgtatatcatttcgcaaaacgaacacggttcgcggattcttgctactgataggtccatcatgtccgctgattcccaacgttcggaaaagtggagttatttcgtttgcatgttggtcgttcagtatttccttggtggttggaaaatgacctaagggcaccactttttctttatttatttattgtcgtcaatc

SEQ ID NO: 955 - DNA, 633 bp, Aedes aegypti
atgcgggtagataacaatcccctggaagaaataacgttcaccatcaatggaaaggcacacactgttaatgcaaaaactgtcccggttgacacctcgctgaataccttcattcgtaaccatgcccatctcagcgggactaagttcatgtgcctggaaggaggatgcggtgcttgtgtggtcaacgtgaatggcgtccatcccataaccaaagagaaagcttcttgggctgtcaactcttgcctgttcccggttttctcctgtcatgggatggatattctaacgatcgaaggaattggcgggaaaaaagatggttaccatccagcacagcagcgattggctcactttaatggaacccagtgcgggtattgctccccgggaatggtcatgaacatgtacagtttgctcgaggcgaagaagggtcaagtttcgatgaaggagatcgagaactcctttggcggaaacatttgtcggtgcaccggatatcgcccaattcttgatgctttcaagtcactggcggtagatgcggacgagaagttggtgaaggcttgtcaggatatagaagatctgcagaagtttgccccaaaacgggtactgcatgcgcgggaaaatgttcaccgggtgaacctaaagtag

SEQ ID NO: 956 - DNA, 1973 bp, Aedes aegypti
ggattgttgaatacaacaatcgtatttgcccacttatcacattacttttcattaacccaaatctaccttatacatttgttttaaatattgaacaaatgacatttgcaaaatttatcttatcaaaatagatttaatcttcatatgccttctctagtccataaaacccgctgcgtttaagaaataccattcataacaatgttgaaactaatagctctaatatctctagctgtttccttttcttggtgtcaagatgtgactcgacccatcattaccacaactggaggacaggtacagggcataacggccagctgtggcctgttctgtagctacttccaattcaatggcataccatacgcggagcctccagtttccgatttgagattccggaatccagtgccacatcgtggatggtcaggagtgcgagatgctagtgaacatggagaaaattgcccatcgctaagtatactcagtgactactcaggcagtgaagattgcttacatatcaatgtgtacacgcagaatttgatcggatctcgaccagttatggtgtggattcatggaggtgccttcgttctaagttctggtgattctaacagatatggaccagaccatttagttcaagagaatgtggtggttgtctctttcaattatcgtctaggcattttaggattcttcagcactggtgacacacatgcacagggcaattggggtgcgaaagactgtgtggaggctctgagatgggttcgcgataatattgcggcttttggtggagatcccaataatgtgacgatctttggtgaaagtgcgggtggtgtgctggtacattatttagttttttctccaatggccactggattattccataaagcaatcggccaatctggtaccgctttggttccctggggattccagtacaacgcacgggaaatggcacgaaacatcgcagatgcattcggttatccgcatgacagtgcagagcttacacgacttctgcgatatactcctattgcagattttattgatcttcaaagatccatcacggacatcccgattcctcgtggatttaaacccttcgagtatgttcccagtgctgaaccagtcaactctccagaacccacatttcttacgcaacgtccaattgaagtactcctttccggtgcatacaatcatgttccaatgatcattggctacacaagtgcagagagcctgtttatggttcgtgagcatcttctggattctactgtatggaacgaattcactcgtaaccctcaattcttcgtccctcacttttggaatattcccgtcaacactccagaatcaaacgcagtcagccaagcattccgcagcttctactggcaggatcgctctcttgggcctgatattatgttggaatggactcaattccacactgatcaacaattcctatatgccgtcgacaaaacagtcgttttgactgccgaacggaacacacaacctacattctactaccagttcagttttgatggtgacctcaatctaatgaaacgaagactcttgctaaccgactttccaggagcagtccatgctgatgaactagcttacctgtggtcgatgacagatctacccatttcacccattctaccaagcaatcctgcaaacatcgttcgacagcgaatggttcgcctttggaccaactttgccatcactggacatccaactccaaattcagacagcaccctgcaaaatattcactgggctccttttgaaggaaataaaatggcgtatctagacatcggagataacctaatagtaactcaaaaccccaaccaagcacgtatcagcctctggcgagatttggaagaacgctatgctaatgatccattcttttatccttattcgtaaaaggtggtaaaagtataataaaaaatagctcataacttatgtaattgttagttttattatttcaattgtgttccattgaaaacataactatt

SEQ ID NO: 957 - DNA, 1041 bp, Aedes aegypti
gagtgctctcgattgagacagacatcccaaacgtatcaggattgtagcaaatatggaacgttgggctggtaaggtggccgttataaccggagctagttctggcattggtgcagctattgcaaaacagttggccaatgccggtatggtagtaatcggtttggctcgccgagttgaacgcgttgaagaacttaagaagcatctaccggttgaggctgcttcgagattgcatgcgctgaaatgcgacgtatcgaaagaagaatcagtttctagtgcctttgaagagatccaacggaaattttccggagtagacgtgttggttaacaatgcaggaatagttaagcatactttgctactatgcgatgatgatttccaacaattaagagatcttatggatactaatgtgatgggactagctctatgtagtcgtaaagcattcaaatcgatgaaagaacgatgcgttgccggacatataatacatattaatagcgtcgctggacatacggtttccaaatttcctcatatgaatatgtatgcggcgagcaaacatgcagtaacagccatcactgaaacgatgcgaaatgaaatacgagagcttggctccaaagtcaaagtgaccagtatcagtcccggagtggtaaaaactgagatagtgagagggctgcatagttctgaagagttccctatgttggaaagcgaagacattgcccaagctgttttatatgtcctgggaactccccctcacgtgcaggttcacgagcttaccataaaaccagtgggagaaaatttttaaattttaatgattcgatggatggcacatactagtacacttcgttgttatttcctcaatacatcttatagaaggaggttaaagctttccataaagtgtcattaaatacttcacataattttgagaaagaatatctgaaaaaatcctcacctcatctagttttttcttctttctttgaatctagatatcatgatatgcatgcatactcttaaacttcaataaatgtaaattaataaccatgccaaatttcagct

SEQ ID NO: 958 - DNA, 3865 bp, Aedes aegypti
atggcggtcagctttacgatcaacggtcaactgtaccacgtaaccccaaacgatgtcccgatcgagaccagcctaaactcatttattcgaaatcatttgcacctgaccggaaccaagtttatgtgtctcgaagggagctgtggtgcctgtacggttcatgtggccgggattcatcccgtcaatagggaaccaacgtcatttgctgttaattcgtgtctgatgccggtttactcatgccatggaatggatattacgacaatcgagggaattgaatctaaatctaagtttaactccattcctagacgtttggcacgatttagtggaactcaatgcggagtttgctcacctggaatggtaatgaacatgtacggtttgttggattctacgaagggacaaataacgatggatgaaatagaaaaatccttcgctggcaacatatgtcgttgtaccgggtatcgccctataatggatgctatgaagtcatttgcagtcgatgcgtgtagtgcgttgcttgaaaagtgcaaagatattgaggatttgggagataagtgcaattcggataaaaagtgcggagtgatatgtccgaaaactacagacaaaaaatctattcatttattttttgaaaatgataaagaatggcacaagatttatagtgtacttgaggtgtttgaaattctcacaaatattggttgtaagccttactgcttcgtagcaggttccactgcgcgagaagtgtattctgataaagagggttcgaaagtattcattgatataaaatcaattaaggagctgcgctcttactggatgggaagtgaattgattattggaggaaatgtatcattaactgaactcattaatatcctcaatgaagcagctggaagtgaaaagaaattcaaatactgcgaacaggtaggcaatcatacggccatgatcggtcacaagttaatgaggaacgttggaacagtggctggaaatttgagtatgaaaaacacccaacgaggatttacttcggatttgcatgttattttggaaacagtacgtgctttgataacaataactgattgccacggtcgaattgattctgtttgtcccgcacagttttctcggatgaacatggataaaaaactaatcctaaatgtgtcattaccaccgatgcatgcggataattatgccttccgttcatatcgcatagagtcacgagcacaaaatgggcgcaccttcgttgtaggagcctttttcatacgatggtgtgctagacaacgaaccatcgagtctgctgctgtttgttttggtggcatcagcccaacctttactcacgcgattgagactgagaaaaccctctgtggtaaaaatccctttagcaataatgttcttcagcaagttttacatgcacttgagttggatctgaaaccttttagggatccatctcagattgacccggagtaccgaaaacaggcagcaattggaattttctacaaatttatgcttgacatagctcctaagaaactcgtagatccaaggttcttatcgggatcaaccaacatggagagaccgctttcaaatggtacacaatcttataaaactttccctcagaattggccggtgaccaaaagtatcacgaagattgatgcggttttacaaacttctggtagagcgtcttacatcaacgatacacctacaatggcacacgagctatttgcggctttcgtcgttgccacaaagcccaggaccgttattaaggaggtcgatgtgactgaagcgacaaaactacctggagttgttcagttcttatctgctggaaatatcccgggtaataataactttatgccatatgcaggcaattcaaaacactttttttcgtatggaaaagaagaggaggagattttctgtactggaaaagtgctttatcatggtcagccggtaggtttaatattagccgaatctttcgagttggcaaatcgagcatcgaaattagttcgcatagagtactccgagcctgatggacctgtacttccaactttcaaacatgtacttcgaaacagttcagcaaatcgtatccaaccagcaggcgtaccccaatcgggccgcaactacgaatctatcagcggtggctattacagagtctctggtcaggtttcattcgaaggacaataccactatacgcttgaaactcaatcttgcatttgcgtaccgaaagaagacgggatggatgtatattgtgcaacgcaagatgcagatcatacgctcgctacaattgctggagtcttgaaattgccacaaatcaagatcaacgtaatctgtcgacgagtgggaggttcttttggctcaaaaattacacgcagctcccatgttgctggtgcctgtgccctggccgcttatatgactcaacgacccgtccggttcaggctatctttagagtctaacatgacatgctttggaaagcgtaaaggtagtgtaagcagctacgaagtatcagtacgaggtgatggtaaaatagcaaggcttaccaacactctaatctacgactgtggtgctcatataagtgaaccaagtgtaccattatatatcaaatgtttttccaatggctatgatgattcagcatggaaaataattcccaacaaagcacgcacagatgcccctacaaacatttggggtcactcttctggtacagccgaagcagtggctacaatcgagacaatcatggaacacattgcattcgaaagaggtttggacgtacttgatgtccgaatgataaactttgctaaagatagcaaattgcgtttactgttgccacagttcagaaaagatatagagtttgataagcgcaaaaaagaaattgagctcttcaacgaatccaaccgttggaaaaagcgaggattatccatagtacctgtagcatttccagtcgaatacataggcggaacgaaggcttggatttctgttcaccatcttgatggatcagtttctattactcatggtggcatggatataggtcaaggattggacactaaagttgctcaaattgctgcccatactttaggtgtaccgctaggaaagatatcgataaaaccttgcaatacattagtttcagcgaacagctttatggcaactggcaattcttccagtgatcaagtggggttagcagttatgaaggcctgtgagattttgatcaacagaatgagaccaataagagatgcaaaccctaccgcttcatgggaagttttggtgagcacctgcttcatctctaatgtgaatctaaccgcttcctattggtctacagagagcgacgttgaagcccataaaatatgggctttagggtgtagtgaagttgaactggatgtgctgacgggaaatgtcagagtagttcgagcagatatcgtcgaagatgtcggagaaagtcaaaatccgagcatggatatcggacaaattgaaggcgcattcgtcatgggacttggctactatctcaatgagtctttacagtatgatccacaaacgggagcactgttgaccaataatacgttcacttacaaacctccgggaccaaaggacattcctacagattttcgggtaagactgtaccaaaacagtaaacataatccagcggaagctttgcgttcaaaacctacaggagagccggctttttcggttgctgtttcggttttatttgctttacggcaggctctcacgtcggcacgtaaagatgctaacctacgaactgagtggatacagcttggtcaaccatccaatgcagagaatattttacatttggcaggaaattcaaccgaccagtatacttactataaatgttcagtagataataagcccaatacaattctatgattaattaatataccttggagcaaac

SEQ ID NO: 959 - DNA, 534 bp, Aedes aegypti
aatcgcaaaacgtcaaagcaacaaaattacagcagcaggattatcgttttaggtccagcgagcgattcgattctgtaaaatacgaattaaataacagaaaatctacgactaaacaggttaaccacctccagaaccatggccgcacaagtgaccattgatcagcttgataaggatcagatcaagtcgttctccgatttcctgctgtcgtacaataaactgtcggaactgtgctttatcgattgcgtgaatgaatttaccggccgaagcgtttccgacaaggaggacaaatgctcgctgaactgtatggaaaagttcctgaagatgaaccagcgggtgtcgcaacgattccaggagttccaaatgttggccaacgagaatgctttggccgcagctcagaagctgggcggtggtaaatgagaatactagctttttaacagtgaattagttgtgtacaaatggaacagttttgttttaagcattaaatttattttatttcagccaatggtaataaacatgatttataatggttaataa

SEQ ID NO: 960 - DNA, 633 bp, Aedes aegypti
gaataactcgcaaactttttccgaaattatagtgaaaattctcgtcaagtgatggattttgaactaagaaatctgaaagacttcctcaccctctacaaccaagtgacggaactgtgcttcaagtcctgcgtggacaacctgttcgggcgggaactgagcggagacgagatccgatgcaccgacaactgcgtcggcaagttctccagcgtcaaccaacggctgatgcaggtctacgtgggcgttcagagcgacatcaaccagcggagaatggtggaattcgatgcccagcaagcgaaattgttggaagcgcagaaacagtcggaaacggcgccaattgaaccagtcaagacggattccggtgcgacgacgatatcgactggtggaaccgagtctgccaacaccacggtggacagtgggaaagttgagacggtagcaaattaagggggtgtggttctgaattaaaatttaagcgttaggttgattgtatagtggttcgattagtagcaatgaataaagtttgtttcgtcgtactgataggaattccgggtgccggaaagactaccttttgcgaaagattccagcaaataatgttagaaaaatattctatggttaaagtggttcacgtttgtttcg

SEQ ID NO: 961 - DNA, 1472 bp, Aedes aegypti
atgtcgactgtcttcaacattatattcaaatgtcattctttcagtgagcgaacgattttcacctggcatcgtttcaatcgaacagaaatttggcgtgaagctatgtctggtgctatcaagaaggctaccggtttgaccgggctcaatgtggccaagaacccacaccacactctgaccgccctgtacaacaaaatcctccgggccgtggcgaagatgccccaggatgcggcctatcggcgttacaccgagcaaattgtttcggagcgtgccaagatcgtagcttcgacaccaacggttcgtgaagtggaggacaagatcaactgcggacaggtggaggaactgatcatccaagcggaaaacgaactgacactggcccgtaagatgctcggttggaagccatgggaacctctggtgaagcaggccccggcaacccaatggtcctggccaccggcgaaaattcacgaactcaagtaaggtcggagaaagaattacattttattgattgtttagaacggttccctgtaaatatagtcctgcgtaattgaacaggcaatcgaaagcgagttcacgttccctcagagaaatccttgactaggtgaacactattttcagtttgagacgatagtcgtgacctataagacgataaaaaaatcaacgttttattgctgaacaacttctatagagttagtgctttagctgttttttttttttcaagtggctttatttgctcactttatctacatctacatcttgccccgtcttcctctacttagataaatagctcctggcattcatgtcaaaaaatattttgaaacgattcatagcaaaacggccgtaataagccactagtgggactacattttttttaccacttgactgaaaaaaaaactttctgtttgttgatgtttctacatcagtatctacaagtcactaataaaataattcaaaaaaatttagatagaacagttttcccatatatttgattgaatttctcaattcaaacttcaagctcgcttagttgatggatttcgttgaaattgttactgtagcttctctgggtccaaataaaaaaaaaatgaggggcgtagatcggcttctcaatatgtagtccactgctctatgaaacaaatcgtaatgtaacgcgaaaagttctatcgctttgctctcatttgctttgctcttttaatcattcgcagataatgattgcttgcatatactcttaaaaccatatcaaccactagtagttgtgtgtaagtgtaagcattccactgatcttagctttaccgtctccctgaaatccaccaaaatgttgattgtagctagctgatccctgcacttcggtggttccgcttttacttcgccataatcgggcaatcgcctcagccgtaacgtccgttccttcgtcctgttgatgggtagctccaaagttcatcgaaaactgacgtctcactcggatggacactgctggttcc

SEQ ID NO: 962 - DNA, 696 bp, Aedes aegypti
atgaaaatctatgccgtatcggatggacctccctcgttggcggtccgtatggccctcaaagcgctagacattgctcacgaacatgtccccgtcgactacggcaagggagagcacatgacggaggactatgccaagatgaatccacaaaaggaaatcccggtcttagatgacgatgggttcttcttgagtgaaagcaatgccattctacagtatctatgcgacaagtacgctccggacagtcccctgtatcctaaggatcccaaggagcgtgccctggtcaatcatcgcctttgcttcaatttgtcgtttctgtacccgcagatatcggcttatgtgatggcaccgattttcttcgattacgagcggactccgatggggctgaagaagctgcacattgctttggccgcttttgagacctacatgagccgcttgggaagtaagtttgccgctggagatcatctcacgattgcggatttcccattggtcacatctgtgatgtgcttggaaggaatcaatttcaacatcgatcaatacccgctggtgaaggcatggtatgccaactttaagcaacaatatcccgagctatgggccatttccgctgtgggaatggcggaaattactgaattcgagaagaatcctccagatctatcaggcatggagcacccaattcatcccatcaaaaaagttaagaaatga

SEQ ID NO: 963 - DNA, 1509 bp, Aedes aegypti
atgtggctgatcgtgatttcgattctggtaactatcgtttctttggtttaccattacttaacatggaatttcaactactggaaatatcgtggtgttcctggaccgctgcctaaaccttttctgggcacattttcgagtacgttcacgcaaaaagagcatcccatagaagagaataatcgtatttatagtttgttcagagaatacagaaaagatgtgccattcattggaggattttcattccgcagtccacaactcttcgccttatcaccaacgctagtcaaagatatattggtcaagtatcataaacacttcagagctaacgaagtcggaggaacgttcgactcaaaagcggatcccctgttggcaagaaaccccttctttcttgatggcgaagaatggcgctcaaaacgtgcgcagatcacgccggcttttacaaattctaggttgaaagcacttctccccatcatggacaatatatgcaacaatatggtaagctacatagaccgacacattccaaatgggccaatcgagtctaaagaattgtcagccaaatatacaaccgatgtcgtatcaagctgcatctttggtgccgagggcggatctttgacttcggacagatcggagattcgagaaatgggaaacgctcttttccagcaaaccttcatgtttatagtgctggccgtcatttcgtccattgccccgattttgaaacggttcgtaaaactgagtttgattccaaaatccatcgagaattatttcgttggcttgatgacagaagcagtgcgaaaacggaaggcaagtggcactaaacaagttgattatctggatcacctgatcaacctacaggagcagaaggaaatttcgatactggatatggctgctcatggagtgacatttttcatcgacggattcgaaactaccagtgaagttttgggattttctctattggagctatctattgataaagaaattcaaaatagattacgtcaagagatacattccgcagaagatggtcaattaacatttgaaactattatggagttaccatatctggatcaaatcgtaaacgaaactcttcgtaagtggcctccagcgtacgccctatcgaaaagatgcacagaagagatcactttccgcttgaaagacaaccatgaagtccttattgaaaagggaatcacagcaatacttccgatctgggctatccacctagataaagaattttatccggacccaaatcggttcaatcccgatcgattttcagaagaagacggaggtcatagcgtaaggtactatcaagagaaaggagtatttttaccatttggagatggaccgagggcttgcatcgggcggcgaattggcttgcttcaagttaagcgagcactggttgaaatagttaagaactatgactttacagtgaactcaaaaacggtgcttccgatcaaaattgatccaaaaaatatagcagtaacccctctgggtgggatatggatcgattacagaaagctgtga

SEQ ID NO: 964 - DNA, 572 bp, Aedes aegypti
ctgtcgtgtgcgctgtcaaaatattctcgtgtaaaatggctcttgcgagtgctttaaaatccggaattttgcgaataaacacggctctactcaacaatgtgagaccattcagtatcacatctgtgaagcaacttaaagaaataaaggaaactacccaaaaggatgcgctggtcatcagtgcggaatacgttgcctctccgcgatcaaatcagatgctgcagcaggtgacggaggccaaatgtggaagtggacaacaattctgtccccagtgcagcctggggttggatatcaagcatacggatgtgctgatcttgagccagtatctgcgcagcgacggatgcatgcttccacgccggattactggattatgtaagcgtcagcagcgacgaatcggctcactggttattatggcccagaaagcgggactgatgccgaacattggtccttcgtggagcaagagagatcccaagaaacgataccagtggaagaagtataacaaatatttcgacgagagcaccattaaatgttagaatgttgattgttggaataatatagcgatttgataagcagga

SEQ ID NO: 965 - DNA, 1638 bp, Aedes aegypti
tcataacatccgacctggtgcaggattttttaggatattattatgtgatacaagtgtatttccataacgataggaatgtcatcgaaaacgggcctcttgacagcggttcacctggccaatatcaccagcactttggacgccactcgcaagtatgcactgggaactctctacctacagttacatccccggttccaggatgtggcaaaaccaactgctttcagcaaatttattgccactgtgtatcaaagttcaccaaaggtgctcggtccaggggtggacctacgaatactgattagttctctcaaatcgaaggagattgttccggtgaatcgccgaattgattacctcttttccgattactgccttgatccgcacttggatggattggatgtggcgaggttctaccctggcgccagtgtgatcgaacttggaacgcagcccttctcgatcgacgccaatggattgaccgattctagtgaaacttataaaaatgtcgttcttggtgggacgttcgatcgaatccatgccgggcacaaggttctactctcgcaagcggcccttctggcagaggaacggttggtcgttggcgtgaccgacgagaatatgatcaagagcaaaaagctgtgggagctgattcagccaaccgaacggagaatcgaagatgttcgggcgtttctcgaggacgtggatcgaaccttgcggtacgaagtcgttcccattagcgacccgttcggaccgacggctacggatccgaatatggacctcatcgtcgtcagcacggaaacggctcgtggtggcgccaaggtgaacgaacttcgcgccaaaaatggactcaatcagctgcgggtacgcacgatcgatctactggacgatgaacttacggaggaagataaggaagacaagatcagttccagcaacatgcggatggatctgttgggaactcgtctcaaaccgcgtgacttgaaaccacacctcagtccgaaaccgtacattatcggacttgttggaggtgttgccgctgggaagagcaagatggcggagcgttttgcaaaacttggcgctggagtgatcgattgcgacaagatcgcccacgagctgtacgaaccgggcgaggattgctaccaaacggtgatcaacaatttcggcgtgggcattttgaacgaggacaaaacgatccaccggaaggctttgggcgcgattgttttctccgatccggacaagttggatctactgaacacgattctgtgggacgccattttggagcggaccaagctgcgcatcaaggaaatatacgagaagcagaacaaacagattattatcatggaagcggccgttttgctgcgagccgggtggcaaaacgcatgccacgagatttggtcctgcattattccccgcgaagaagcaattcagcggctgatggataggaacgggttaacggaagaggaagcggacaaaaggatcaaggcacaagttagcaataccgaactggtgcagaattcggatatcgtgttttgcacggcttggagttatgaatattcgcagaaacaagccgaaaaagtttggacagatttggtagaagagctgaaattgaagctgtgaattttattgttgacggaataaatgttataaggttttggg

SEQ ID NO: 966 - DNA, 1544 bp, Aedes aegypti
ccttttttagtcacttaaccttttcaatctaactgactttgctcctcacccacgggaggatgatttttgttacgaacaagcggcaaaagcagaaccaagagaactgtcaaaaactcgtgtcttcgcaccaaagcgttattcaatcgcaaacaaaatctgatttttcggtttttctccgcgagtgtaaaataatcgggacatttttaatcgtaaatcccctccgaaatgcgtttctcggccgtcctgttccgacagcacatcgggttccacttcaagaagcactggatcatccagggtaagcgagttccctcggaaaccggagcgcaggctgaactggccgctcgtggcattccggtggtcttggatccaaccgaactgatccgggaacgacgggaagtggaccataatcttaaagtggtgggccagttgccgccggaggtgcaactggacgagaatcatccgctgtacaagcaagaacagtgttatctttacggggatcggaatgtcctgctggagggaacccggcaggcgcaggttctgctcaacacggccatctacgatgagttgccgctgaaggtggaggagcggctggacaggaccaagattccgacgcagctcgaccggtccatgcagcagtctgtgctggcggcgctcgttttcgatacggaacaggtcaaggttggcattgtgaaggatccggaacggccagcgtacaaatttccccgagtttacgggatttccaacgaaaggaggaatcgcctgatcctctccaaactggtgacccattgcgagcgcttcgtcggccaggaagtggcctgcaatcgcaagatcatcgccaacacccacttcatcgtgcccatcaccaaggaactcgaccgcatccagttctcgcttaaagtcgacagcttcatcacctcatcggctcccctcaaaccgttggacaactccgtctaccgaccacaggaccaaaccctgccgggcattttccccgtcaagcaaacggtcaccattccgaccacgcatttctacgagtggcaaaccgagtaccccatcagccgccagtacaggttctcccatccgcacaccgttctgctgcactgcgctccggaatccgtggagaacatgttcgagacgccggtcacggacgaccagaaggaggcccgggccatgatcaaggcgtttacggtggcggcagcccgcgcccggcaactttacgggaacgacgtccaagccttggcggcccccatccaggtgcaggtggtgcaaaccgacagccagtggttccactttggcatcttccagctgaacacgttggacctgaacgcgtccggggagagtgccggcagtcgcaatctgtggttccgcaagccgcggatggacctctactcgcagtgtggctatctggtgggaaagccgagcctggtcgactacaaccgggacgtgttgcggcatatggccgtgttctatggtagtagttaggacagatttgtgagatgaaacaatgaagatgaattagtgaattgtgattcgtattctgcttgaag

SEQ ID NO: 967 - DNA, 670 bp, Aedes aegypti
cagtttcgattattcagcgctcgcaacaggtgtgtggtcttcttccggatagactcaactctacatcaaacttccatcgttgtgactgccatttcgtgcacgatttaacgcaaattcgttttagtgcacgcaacaagtttagatccagaatctccggaaatggctgcattgaagcaatactcgtacgccgaagtggcaaagcacaacacccccgcagacctgtggatggtcatcgacgacaaagtctacgacgtcaccaaattccaaaacgagcatcccggaggggaggaagttctgattgagatggctggaaaggatgccaccaacgagttcaacgatgttggccacagtaccgatgcaaaagcacaaatgaagcaattcgtcgtgggagagatcattgaagccgagcggaaaaagaatgtttcgaaacaagattccgattctccgtcctcgtcatccggatcctggtttggagccttgaaggctaagctttttggataggatttaacgcattagttgctgttattaatacttgtatcgaatacaatagctaaggcattctgcttaactatcttaaagtaactttattcaaactacctgtggtgctatgtttaaaacattctatccgagataataaaagtttactattatacactttactatcaagcaa

SEQ ID NO: 968 - DNA, 1128 bp, Aedes aegypti
cgtcagatatcaaaacgtcaaaagtttagcagcaacattttcagcattttcaacacgagtgattattttctttgatatttcgcggaaaacctgcataatataacaactttaaaggatttaacatcgtctaagaactattctcaatggcatccgccacacctcagggagccagtctgctctacggactccgcaagtcgaaaaagttcaccaagggctggggagcgcagctgcccgcggcctacaagaaattctgggacgaatggaagctccagcagccagctgctgttcactatgttccgaaggatggaatgtttcaacgggaagacgtgacaggattggtaacgccaatccaaaacgtaccactgccactgatcgatccgccagagtcgcatcaaggaatctggggcggagaagccattgtgaagggcttccaaaaacgcaacccatacaaacgccgagttcctcacttttgggttcctgttcttagacgttctgttgtacatagccaagttttaaacgagtatatggcggtaacggttaccgatcgtacgctggatcaaatccacgacaaccatggtttcgatcattacttgctgaaaactccggcctgcgacctgcgttcgatgctagctattaaactgaagaagaaggtacttgtggacctgttggcgggatgtcccaaactagcttccgagccggagaaacaacaagccgtcctgaaagagtacgcttgctatctgtcccagtacaccccagaggaaatcgattggtatggtctgacgtacgtggaagctgttctgaaaattaagaacgaagttgaatccaaggaggacaaacgaccgcacaaattgatttttcgtcaaaagctgatcgagcaactgaaggaggccggtattagtgaagcgcagggtacaaccgaagaattgaaagcaatggaagactccagctcgtcttcctggctatcgaagcttagcttcaaacctaagaactggtagggagacagtaagtagccaaaacaaattctggtctaaattcttttgtttgatatagtcataaactactctccgggtcatggagagaagacaaatagagacttgctcgttgaaacctaaaatgagagtacaaacc

SEQ ID NO: 969 - DNA, 663 bp, Aedes aegypti
atggccaccaacagtccccgaatcaagctgtacaccaatcccatcagtcctccgggacgatcggtagaactgacggccaaagcaattgaccttgacattgaagtcatcgcgattgatctgctgggaaatgataccctaaaaccggactatctcctcaagaacccacagcacacgattccaatgatcgacgatggcggtaagttcatttgggacagccaggcgatcaacgtgtacctcacaaccgtctactcacgcaacgaagatctatatccgaacgatcctttcgtgcgcgccaaggtgaacgccggtctgcatttcaactccggagtgctcttcagccgtctgaaactgttgatctccccggtgattcgtggattcaagcaggacctggacccggaaaaggtggaatactttaacattgggctgcagctgctcgaggatacgctgcacgctgattactacattggcaatcggatgaccttggccgatttgagttgcgtttcgtcggtgtccagcttcgatgcggttctgccgcttgataattctagatttccaaaaaccgtcgactggttgagacggatggaacaattgccgtactatggggaagcgaatggagaaggtgcaaagaaattggcgaaggttgtacagagctttctgaaataa

SEQ ID NO: 970 - DNA, 1896 bp, Aedes aegypti
agtgaaaagcaggcggttcggtcgtttcgcaatcatggctgcagtaatcagaaatttaattcggaataaaacacttaataagctgacaaacattgagtcaaccccgattcgatgttacgccagtgccaatcgtgtaaaacctttcaagaaggtcggcgtttccgataaggctaggaacgatgcgagggcagctgaaatgcgatcatctggggcggccgaagacgccaccctaatggtgggtcagcagatcaaatctgtgggtcaatctctggctagtcgaggttacctgcggcctagtaagccctactccccaccggaagacgttaagcagacagttttggaactggccaaatcgaacaatataggcaaccccaagcaaaagtttgccagcaatcagcaaaagttcgactttttggccgcttgtttcagtacattcaagcacggcgttcccaattcgaggctgcatgagctcaattccgttgaggatgcagtggagttttacagcacgccagttgataccactcttccactggatgccatgaaaacagtggaactgccagagaatctgtacatccaacacgagtacattcgtttccacccagagacggacaccatgttcggaggtaagtcagccttccccaagagttccaccatcgttactggtttgaagtacaagaacaaatacaagggtcatgtggcgaaaaaatcgtggccttgaacaacgtaaaaatgcaagtaagtcatgtggtagagaataataattgttatatttaaaacgaaaaaaaaattcaactactatcttcgaaattatccataagccaactcgatcgctttcttcttcgcttccatccactgctccgggtgtttgctcttcttgtgtgagtacagatttccgttggaattggtagtcattccgcacacatcgcacgagtacaagatttgacccgtatgggatgctcggtgttcctttaaatagattttccttttgaactttttgccacaaaattcgcactcaaacttttcctcaacgtgtactctccgtttgtggctggccattgccctcacgttcggataagtatgtttacagatattacacgtcaccggtttgttcttctcagagtgcatgatatttacgtgggtcttcagattctgccggccgcttacccatttgctgcagatgtggcactgaacccgttcgatcgtaaccactccctggtgtctcaagatgtgtcgctccagtcccaacttggtacgaaattcctggccgcatgtttcacaaaccagacttgcacgctcgccatgcattatttccatgtggcatcgcaaagtgaacgcactagccagcaacttgtgacagattgtgcactccgcttggacatgagtctgcaaatgggccctcagaagaaatgcctttgggaaacttcgatggcatttttcacatttgaacggcttctcttccgagctgctgtgcgatttaacgttgtgtaaatctaaataatactttgttttgtagcttttattacacagctcgcaatgaaactgatttggattcacatgcgcatcaatgtgttcaattatcctgcacttcttatacatcacacgattgcaacatttgatgctagcacgtacattgtgcttcttctgggtatgttgttgtaaccggtacaactcgtcaaatgtctcggagcacacctcacaagttagcttgaagaattccctaatctttatgttttcttcctttgtcctttggatcctcgcctcatctggtttctttttctcgacatctaacgcagatcgcttagtgtacttccttttagttctttttggtgctggttcttcactgctttcactcgaatcagaatctacgttgtaatcatcttcttgtttgatctcttc

SEQ ID NO: 971 - DNA, 1937 bp, Aedes aegypti
cggcagtccaaaactaagagccacattattatttcttctcctcccgtgtaaagatggtgattagaaaactgtacgttccgcctgcagtgcacaaacatgttgctcaacctgttgaagtggtgaaaccttctgttgagcaagaaactgctgcggcttttagtgtaccccaatccgctcaagatccagaacccatctctttgagtcatgtgaatggagaagcagatgatgtaatagtgcaaatcgctcctggtaaaattcgtggtgtaaaacaagtgcttccaaatggaaaaaactacttccgttttagtggcataccttacgccgaaccaccagtcggtgacttaaggttcaaaccaccagtgccggtgcaaaaatttgatcgcgatgtgttggattgtcagaaggaaggtagcaactgctacagttacatgtattatccaccagagaacgaagagtttgcatcggaagattgcttgtttctgaatgtatacacaccaaagctgctgaaagatcaggatgttgcgacattgccggttatgctatggattcatggtggaggctttaatcttggcagtggagatgctgctgtttatggtcctgaatttttgctgcaggaagaagttgttgtcgtgacgtgcaattatagattgggaacatttggatttttatacctgccgtctgttggaatctatggtaatatgggattgaaggatcaacgactggtgttgaagtgggttaacgagaatatcagtcgtttcggaggtgacccaagcaatgtaacactgtttggagaaagtgccggaggagcctcggtgcatttgaattatctagcggacagctcgagacaatacttccacaaggcaatctgtatgtctggcgtttcttataatccttgggttttgcaaagcaatcctgaagcaaaggctcgtaaactggctgagcttatgggtgccaagtctacgagtgataatgatacactaatggaagctaacgctaaggatcttcttcttcattcgccggatgttctcagcgagaacgaaaaacgtacaaataagtatttcgcattcacgccagtagttgaatctgagtgttcggaagaatcatttttgatggaaaatttcatcagttcgatgatgaagcccaacatgactaaaattccgatgatgaccggcgttactagcaatgaaggtcttcttgtagctgcccaattatcgagagatattgagctctacggagcagattcaaaaatgatagtgccacaagagttgccactggatgaaaatcgtctaaaagaagccgctgatgaagttagacgattcttctttggtgataatggcatcactgtggatcgtttgtcaacattggtcgatatcatgtccgataacatgttcgtaatggcagcctatgtcgcaagtgaacttcacgcacgttatcaaaatgaggcaccactatacttctatctggactcatttgagggaaaactgaacaaataccgcactttgttctctgttccggagcatcttgaaggagtatgccatgctgatgaattgctctatctgttcagctcgacgtggatgggtaccgacgtcgagccaggctcccgtgaggataaattccgatcgacgatgtgcaaactgtggacaaacttcgcgaaatatggaaatcccactccgccgaccaacggaggaatagattttgtgtgggagccagtcaagccggcctatgattcgcagtttgtactgagcgcagcaaatttgaatgatgagttgacgatgatagaaaatccgtttttggaaagagttcagttttggcgcgaaatattcgcacgttattacggcaattatttgatgaatgaaagcgtgggtggtaaaacatataatggtcaataaaaatggtttcaaatgatatcaatgaataaatacatagatttattatat

SEQ ID NO: 972 - DNA, 7490 bp, Aedes aegypti
cattgaagtgaacagcaacgcgaaatttgtgccgtgtactgccaagaagatcactgtgcaatcacaaccgtagaatctggacccagtgccgcctcaaaacaaaaacagtggtgaccgcgagtgaatacacgtaaattttgtaaggtgaatggtgtgaattgcggtaaaatttcgatttttccgctagtgattttcgaccgtctacgatcgccttggtgcaggaaaaatttctcttcgactacgtagcccagacaagaggtcatccaaaatggcgtccatttgcaagtggtgaaaatttttcacggtagtaaaagttgaatttcggttgtttagcacaactttttgccgtggatttcaacgtttttcgatgaattggttaaaacgaaacaatttgaacgtgaatccccgtggatcgtaacaactttactttggaattataaggaaaaaccctttggaattcgtcatgagccagtcaaaagaggacaaaagcgactcggaaaatgagtcgagtagtgacagcaaaagcgaatccggctcgtcggattcggagagcgagagcggatccggttcgtccagttccggttccagcgataacgaagaccagcagcagaatgagcaggatagcagtgtgaacacctcggcgcaaaacgacaacgcgcaggatggttccaagccggaacagaacggaaccgcttccggtgaggatgaggaagacgacaataatgccagtgcaaatcgtcagaacgctagcaagtctggtgaagaggaggaggaagaggaagatgaagaagaggaggaggaggtgaatagtagtggtgctgccgctgccgagcagattaacaatagtggcgaaatgaacaacagcaaatcgcacagcagtgcccaatcgggtggctccggatcggaagaaagtggcgacgaggataatcagagcgaagcccagaacggatcggattcggacgacagcggcaaaccgagcaacgccagtcaaacgcaggaagacgacgacgacgacggttccggaagtcacaattcggacgacgaggaggagcaggaggaggaacattcatcaaaaagtagttacgatgatgaggactatgccgctaaccgtcgtcggaacaacgcacgcaagaaggctgccgcagcgcaagccaaacgcaaggcggcctcttcatcacagcccacgaagaagaaaaagagcagtaatcgttggaagtcggaaacatcggaggacagcgatgccagtgaaccggacagttccgaagatgaggacgacagccggagttacggagcccgcagggcagcagcgaaaaagcgtccagctcctgcaccgaaacccaaagcagcggcaaagaaaaagaaacgcgctgcagcttactcttccgatgaaggtagtgacagtggaggagaagcgtcgcggcagggtagaagtaggaggaaaacagctgttagctacaaagaggcgagtggtgatgaggtaaccgatagcgaagacttgctggaggttgaccaggaagctgaggaagctgctgcagcagctgctgccgaagaggagaagactgaaacgatcgaaagaataatcggtcaacggatgggcaagaagggtgccaccggagcggcaacaacaacttatgccgtggacgaaggtggtgatcccaatgaaggtgtcgatgaaaatgatacggataacacagaacaacagtatttgatcaaatgggctggatggtcttaccttcactgcacgtgggaatcggatgaaacactgaaagagcagaaagtgaaaggaatgaaaaagctggaaaattacatcaagagggaaaaggacatcgaatattggcgtaagtaccaagccggtcccgaggatattgactactacgagtgtcaacaagaacttcagcaagatctgctgaaaagctactacaacgtcgaacgggtgatagctcaggtggaaaagcctgagggtggtggaattgattatctgtgtaaatgggaatcacttccttacgcggattccacatgggaggatgcaagcttaatagtgaaaaagtgggagaagaaagtagaggaattccaagatagggacaacagcaagaggactccgtcaaagcattgtaaagtgataaggagtcgaccgaaattccatcatttgaaatctcaacccgattatctgggcgaggatcgaggcttgaagctccgagactatcagatggacggtttaaactggctggtactcacatggtgcaaagaaaactccgtcatattggctgacgagatgggcttgggtaaaactattcaaaccatctgctttctgtattatcttttcaaagcgcaacaactgtatggtccgttcttgtgtgttgttcccctgagtacgatgactgcgtggcaacgcgagttcgccatatgggcaccagagatgaatgtcgtaacgtaccttggtgatgtagcttcgcgtgaaatcatacgtcagtatgaatggtgcttccccaatcagaagttaaaattcaatgctatcctgacaacgtacgagattctgctcaaagacaaaaccttcctgggaagcgttagttgggcagtccttttggtcgatgaagcacatcgtctgaaaaacgacgattccctattgtacaaagctctagaagagttcgacaccaactaccggttacttattaccggaacgccgctccagaactccctcaaagaactgtgggctttgctccacttcatcatgccaaataggttcgacacgtgggaatcgtttgaaaggctctacggaaacaccagcaatgataaatcctacacaaaactgcacaaagagcttgagccgtacatccttcgacgagtgaaaaaagacgtcgaaaaaagtcttccggcgaaagtggagcaaatcctccgggttgaaatgacctctcttcaaagacagtactaccgatggatcctcacgaagaatttcgacgccctgcggaaaggcaccaaaggttcgatcaatacattcctaaacattatgatcgaactgaagaagtgttgcaaccatgctttgttgaccaagccagaggaattcgaaaatcagacgaatcaggacgaagtggtagttcagttgctgaagggatccggaaagttggtcttgttggacaagttgttatgtcgacttaaggaaactggccacagggtattgatattctcccaaatggtgcggatgttggacattctggcggagtacttgcaaaaaaggcatttctcgttccaacgactggacggcagtattaagggtgagctacgaaagcaagcgttggatcacttcaatgcggaagggtcgacggatttctgcttcctgttgtcgactcgtgctggaggattgggtatcaatctggccacggccgacacggtcatcattttcgactcggattggaatcctcagaacgatctacaagcgcaggcccgtgcacatcgaatcgggcagaaaaatcaggtcaacatctatcgtttggtgacggcacgatctgtcgaagaagatatcgttgaaagggcgaagaaaaagatggtgttggaccatttggtcattcaacggatggacacaactggtcggacagttttggacaagaatggaggaagcaattccaccaatccgttcaacaaggacgagttgtcggcgattctgaagttcggagcagaggagttgttcaaggaggacgaggaaggagatgatgaactggtatgtgatattgatgagattttgaaacgggcggaaaccagggatgagaacccagagatgccaggtgatgaattgctgtcggcattcaatgtgaagacgttcgatttcgacgaggaaaaggaaacatctgcaatacgtaacacagtgaaaccaccaacggaagccgaacaggatggtgacactaaagattgggacgagattattcctcagaattatcgggaacgcgtggaagcagaggaacgaaacaaagagttgagcgatctgtatcttccaccgaggagaaaaactctccagcagttgaaccaagaggaaggcggtggtggtggcaagaaaaagcgaaaacggcatgccgatgacgatactgaagatgaatcggatggtagcgatgatggtaaaaccggtaagaaaacgaatgctagaggtagaccttcaaataaggagaagattcctggtttttcggataacgagctgaggcgactcatcaaaagctataaaaagttccctgcaccgctgaagaggttagaagcaatcgcgatcgatgcagagttgcaggagaaacccctttccgagctgaagaaggctgctgaaatgttgtacgaccggtgtgttcagtttatggaacattccaaagagaacgaagagaaagagaagaattccaccgaagaaaaagccaagcgaggtcctagggcggcattttcaattcgcttcggaggcgtatcattcaacgtgaaaactctgctgcagtgtgtcgaagagttagctccactggatgactttcttcctcaagatccggaagagcgggcgaaatggatattgaacattaaaacccgatcagccaattttgacgtcgactggaacaacgaagatgactcgcgattactgcggggtatttaccaatttggcattggatcctgggaggcaatgaaaatggaagagtctctgcaactatcagacaaaattctattgaacgaaaccgataaaaagcctcaagcgaagcatcttcaatctcgagccgaatatttgttgaaaatcatcaggaaacacatcgaactgaagaaaggtgttggtaaaaagcctcgtaaacaacgcaagcctcgtggcgaagctaaagcaatttctgcggaaatggttcattctccgttgtctccgggcactcacaaggaagaagcggaaaataacgaagtgtccgcgacggaagaaaagaaggtctctactccaagtattcccaagatcaagaaattgtccgagtcggattcacatcaccatgagcatgacacgagctcgaatggtcctaaagaagatcacaaagaaccccacaaggaaaagaaagagcgaaagaaaaaggaaccgaaagccaaagagaccaagaaagagaagaaaaagaatacgggaccaatgcatttcacggccaataacgaaccgtgtgcattgaacatcataggagatctggacccgagcgtgttcaacgagtgtaaggagaaaatgcggccggtcaagaaagcacttaagacgcttgataacccggaccaaacgctaccggcggaagaacaggtcagtcagacgagagcttgtctgctcagtattggcaatcagataaaccagtgcctcttggtctacaaggacccggagaaaatcaaagaatggagaagcaatctgtggtactttgtgtcgaaattcaccgaagtcgatgcaaagaaactattcaaactgtacaagcacgcactgaagaagcgaggcgaaggtgacgacagtcacggaagcaacgataaaaagaaagatcaccatggtcatcaccatcatcatcacggacacggtcatggtcatcatcatcacgccaaggatggcgccagttccgcccagaattcgccagtcaaggaagctaaggaaaagtcggataaggcttcgaagagcatttcaggagcaccgcaggctctgcaaacgttgggtaaaatcaaaaagattagcaagaaagacaacagccagaaccagcagagtgcgctggtagtgtcaacgccgttggctgagcaggaaaaagaaaaacccttgcttagcgaccgacgagacaggaaagagaagaagcgccttcatggtggaaccggtgcgcctgatcgaggaggtgatgacggcaaagatgacggatcatatcaatcgaagcgcaagttggaagatggcgagttggacgagaatagcaaggagtacaaacgattgcatggtgatggaaggaacaatcgggatcgagacaaaaaatgggatgattatgaccgggatcgtggctcacggggcggtggcatgtcccgaggacctcccggtacgcctcaaggaatgcgcggtggaatgtttcaagatggaggagggcgtggtggtccctatccggacgatcgatggagtagtcgagataggttcagtgatcataaacgtgaccgatacgacggttacaatcgacaccccccatcaaattatcatcgcgatcaccgagatcgggatcggggagaccgatcctataaggataaacgaagatacccgcctgcccctggaggttacccaagcaaccattacggcatgccaccgagtggttactatccgccgggtgataatccgtaccgatatgccgcagggtatgatcgtggaggaggtcccccgggtggtggcggtggtggctcagggggagacttcatggactatcgaggaagtggtggtagcggcggaggaggacgtggcgactacgaccgaaggccaccgcccccgactagctcgtagcttccaagggtgaaaccacgaaggcagtgaagctgtgcatgtgacggctaggatctaaaatagacttttctcaatatagtgtacagaacaaacgacagattatttaactcagaagatgctatataacctgatatatagtgagagcaatttggtactttttgataccaccataggggcataacttataggaactagttattattttctcagctaacgagataatcttgttttaaactcagttgataatttattaagtcgcaaattttgcaagtaaacaaaaaaagcgcatcccaattgttttttctttcattttccttttgcaatccctattatgggacaaactcatctcatatttcatcggacgtgtaaaattacagttttggatacctcaagttttcgtccctaggttttagaccggcagtggaagcattttgtgttcgtaatcgtacaccagcccagttatgcggggtgtataaacaaaagacgcgaaaatccgattctttgtgttcaagtggacgttctaggatgccgtctctaattattgtgacatgtacagttgtaaaaattaaatacaggagttaggtcgtaagcaatccgcatgctctaaaataaaggaacactcaaccaagtgaaactggcgaagctgtggtgtaaatgtgcgctaaagactggcaaattatgtcgtagctaaggcttaggagaaaatcaatttaccaactattttaatttataccaacacaaaccaattgtcgataaacaaaagtttattttaatttgcaaaaaaaaaaagaaaattaagccgtgaatggctgccgaaagaacaaacattgtttagaaccgtttatttcgaaatagaacgaaacaaaacatattttcaaaaacatttagaagggtggataaaaacatgttactaaaagcagtttccggataaaaaagatactattgaaaaaaaaaaagaaatctatctacaatttgaacacacattaatctacaaaaaataaaacaaacatcaacaatttag

SEQ ID NO: 973 - DNA, 3142 bp, Aedes aegypti; identical to SEQ ID NO: 441

SEQ ID NO: 974 - DNA, 2674 bp, Aedes aegypti
atgggctcagaaatccgcgagccggaacatctgcggaaactgttcatcggcggactggactaccgtaccaccgacgaaaccctgaaggcctactttgaaaagtggggcaaagtagtggacgtggtcgtcatgaaggaccccaagaccaagcgtagccgcgggttcggtttcatcacgtactcgaagccgtacatggtggacgaagcacagaacaagcggccgcacaaaatcgatggccgtgtggtggaaccgaagcgggccgttccccgacaggacatcaaccgtccagaggctggtgcctccgtcaagaagctgttcgttggaggactgcgggatgatttcgacgaggagcacctgcgcgactacttcggtgcctttggcaatgttatttcggcttgcattgttaccgataaggagaatggcaagaagcgtggttttggattcgttgagtttgacgactatgatccagtggacaagatcatcctacaaaagagccacaccatccagaacaagatgttggatgtgaagaaagcgttgcccaagcaggaaatggatcggtacaagaccgatgctggccgtggaggtggtgccggtggcgcctggggtagccagcagcgcggtggaggtccgtctcaaggatggggacaaggcggtggccgcggagctggtggctggggacaaagccaacgtggtggccaaaatgaatggggcagtggcggataccagcagcagggtggattcaataacggcggctacggtaatggtggcggttacaatcaaggaggaaactggggcggacaaggaggaaacccgtgggaccaaagctgtggccagcagggaggctggggcaatcagagcggcggttggggccaaggtggcggtagctttggaaatgagtttggcaataactaccaacagggatacagtgccggtccaatgcgcacgggtggataccagaatcaacggtcggcaccatacggtatggagtcgtacgacggtaatcaaggtggcttcggaggaagcggtggcggctacggaaacgctggaggcaaccgtcggtattaaatgattaccgaaatacaagctgaatgagagaggctgggacgcacgctctattgtagaaggttttgcaaagaacagtgagacagattacaggtcagaatcagtcgaatagagagaaaaatgaaggtcaaataggcgtgtgagaaatgagaggaagaagccaaaagaggaaggagtatgaagagagtgcaggaaggagaaggacaaagcattcgtatttgttttattaagctaaccaaggaagaggaaacacaaccagaaacacaagtatatagacaaatcattcaacaggaagacgcagacagcagcaggaggatgagaagtgatttttattgacagaagcagaagaatctttagtgagaaggagaatccttgagggtgtgagaagaattggagcaaagaagaggaagaagaagcaaccagcagccaggataagaaaccagtgtaagatgaaattgcataaccatctcaaaagtacaatcagcgcgcaaagactacaacagcagagcgatatagtaagagcaggttaatttcttgggctgatgattatatcccatcatacatcttcgtcggcgttcctcaccccctctaggctcactttctgagctaccagcccaagtccaagaagaatattaagaaggttcttcatataacaatagatctccgacccctttttatcctacttatattaggatatgcgggcagcaattttccctctcacgcaattttcttcgtgtgcaagaatttattgttttcattttttattgtaatgcagtagtaaaacatgcagaaaaacattaagcgaaatctagttctagagatatttaatttaagaatcagttgtaagagaaatgtatcttttctcgcaatatacacaacacataatattgattattataacagaaaacaaaacatagtaaaggaatgcctaggtaagcaaacaaactcgtaaaaatcgtccatcaaagagaatatacaaacactttaaaacatacacaaactaaagaactaattagattgagactagcgaaaatcgacagatggtagtgcagaacatttaccgagggagggatatccgagggttggctgagagctttatcatctgtacatattttcggaattctctttcgagctttatagtttgaatttccattttctctgaagtgaaatttcaccagaatttttcatttatttgctggtaataattctaaaacctttaccgtgggtttcgatttacttgtctcttttctttcgttagatttttattaatttattattcagtttgactgataatttttaccacgttttgttcctcttcgctttccctgcttcgtagtcagaaaaaaaaaacaaattcaatcaatacatgagatagaagttacaagctgagtaaaacattaccaaatttcctccgtttgagagtctcgttgcgagaaggattcctagaattagagcagtcatgtggagtagctaaaataaaacagtaaaggaaactgaacaaaaaatatctgtactaacaagtagatgagcaacttaagatttaatcaactaaatgttcaaatcaaataattttcaagatagtaaaggaaacaagaaagtatagtaagagaac

SEQ ID NO: 975 - DNA, 3911 bp, Aedes aegypti
ttgagtaagggaaagttgactgtgttattaatgcgctcaagtcgcatagtaaaataccgatcttcggagagttggctgtagctagaagccgattagtttcaagccgtaatgtatttttcgcaagtcaccattcatctgttcgttgagcgttcaaccgttcgcggactagcgtattttaaatagattataacttgggatctactctagagcgactggtttatgcaacggcaacccatatggaaacgtcagtatttcacatcccagagagaatataatattccattctattctttctggttgactgattcgattcacctggtgcgaattaattagcataaccggattgggtttcaccgccagtgacaattgatcgattacagtgcctctcaaccgcagtaggcgtgcgttttccagttcttccttgttccctggcaatttgattttatcagacctattaagtacacagcgttcaagttcctgcgttcttatacatgatggaggctcttatcgtgactcacatatacccttatcagttcaagaaatatggaatgtgtttgtatagacaactctccatgtgagtctctgcgataagaaacagctgtgtgagaacgtctcaacgacctgttcagcgcttatgcatagggtggttcagagcctgttcagtcttgagtgattctaacaaactgactcagttactgcgaacctccctgaggtttccaccgacggaaggacctatgccgagtgttaggtatcttgtcttagaggtaagcgcttgggtttgcctcccgcgcatcgcctgtgccagtcagtagtagtgagcgagctttcgaacggctcggcagcggccagtgtctgtcgaataattattcaaagcgcgagcgcgaggcgtactacacaaaagatcgcgttcgcgaatcgtacattacccacctgtggaaaaaaaaatgaagaacgggcagaggggacgagttgaagctgtttggtaggaacataaataactagtgagaaatcgtcaacaacaaagcatgccaaactaatatcagaatcatcttagttggccatattaaaagtgtttgtgtttacgatgtgattgatgcaagttgttttcgattgagaagataaacatctaagatcaatcaagcttaattaacatcttgaccaactgcatcagctgcttgctaggcgtaggaagtgcattctgtgacgatgaggactagcagccagcgccgcaaacgaagtacgaacagagagagcagaagtttttaaaagttttaaagtgtcttgttttaaattgatcaacgtggttttaaacggaaaaatttaatacgggagaaaaattgtggcaaagtttctactctccaaattatataagtaggagataagttatgggtagtgtgagctatacagcttgagttacttatcacaaaaagacggtgtgggagagctttgcgtaaactgtgatattaaaccaagaagcaaaagcagaagaaacggaagagtgcgtgccgcaaattaggaattgggtggaatggaagagagtctgatgaaaaatgttcaatcacaaagtgatattcgtaggcggtattcgaaaacgtcgactgggggtgaggtgatacaggagttattctgttcgggtgatttgcaatgtcaaggtgaggacggccaggagaggaaccggcatgccatacaatttgccataagcgccaacagcagcatgatgcagcagaacgaaacgatgctcagccactgtatcactgttgctgcggcgagaacttccgcggaatgtggcactgaatcggaccagatcagtatgaagaatgccgactgtgagatgaaaatgaccgcccagccggatggatttgccgtcatggtggaatcgcccaacaaccgaatccgcgtggctctgagcgtactgatccgcctgctggtacccttgacgcatggtctagctcgaggatggaacggcctacgtggtttccgcctgctgcaactgatgcgaaagatccgagaaagtcgcggcctactgacgacgcttttcgccttcgccgccaacaccgtctcgatgagcctgtcctcggttcaagttgcccaccggattgaccccttgctacgggtgatcaagctgcgaaaggattcttccaagagtgcgatcgagccaggaaaacagtccttgtcaactggtggcaagctcaggcatgcgaagactaacttgcgggagattccggacaagtgtgtggacctagttgtgctggctgaacctcctgctggagttccgatacgtgcggatattgtactgattcatggtcttcacggatcgctggtcaacacttggaagcaaggcttgtggaacagtgaaggcaaactggagcatttcgagcggcctccgaagcctccaatacgacctccaaagcggcagcgtcactcgcgatcgaatcttctagccccaccacacgtattcaagaagccaaagatcgaagaagactctgccgatcggagcgacgaagatgatcagtacgacgagtcccgctcgacgtcgtacagatttgccaaacggaagatcacctacgaatgtggtgaaccaagcaagatccactttgccgatgacatggagtacagctttcccacgtttaggctgaggatggaagaggaaggcggtggtcatacaattgctcaaggatacacggaaaatcgccaccatggtaagcggaaaatgaaggttaagaaggatgaatcgtggtcaccctgttggccaggagattggttgccactggattgtcccggcgtacgagtgattgcgatcaactacactacggatccatatctgtggcgaccggtgtggataacgaagcgcaataggtccaacttggtagatcgatcgcgagaaatggccaatatgcttatcgagaagggagtgggcaaagggcacccgatcgtgtgggttggccactcaaagggagggattttcatcaagcagataatcgtcgatgcatgggagagcggtcgtccagctgcagaacccctatggcggtcttcacgtggtacgttcttctactcagtaccacaccgaggatctccgttggcggattttaatctaccgttgctacgacagtcgatcgagctaactgaaatacagaaaaactgtcccagcatcctggaattgcaccgtcgcttcgtagccctttaccagggcggccacctcaagatcgatgtgttcagcttcgtcgaaacggcattgacactgatgtcggtgttataccttcgtatcgttggaatcgactcggccgatcccggcattggcgatgtttgcggcgtacaccttgaccatcgggaaatttgtaaacctcgcagccgtaactgcatactctacaccgagttggtcaaaatgatcaaaaaggtgagctgaagaagagaaccccaccggagcaacccgccagaacgccaactaggcgatcgaccgctcgcgtgattatatttgttctaaaatattttctatagctacttgttcgaagtggttcaagtacgtttttgttagtgatttgtttcaatttctaaatgtcgaatagttatcatacgtcgaaaatacgttttaatgcggcatagccaagcaaaccagttgaatgaaacgagagcaataattcaatcagatattaacgcagaagaggacagtgtataatcgctacctaagcgcagtaccttcaaattgtttaaaaagcaaaaaaaaagtttctgaaaaaagtaggaataggaaagtggttttgaaaattttcagtgaatgaagtaaaacggaaaatgctccacatttatcgaagcgcgatttgtaactgtagtcattagtctaatcgtagggtattatcgtaatggtcaaccgtgtaagtcatgtgataaatagagattagcatgtttaaacctaa

SEQ ID NO: 976 - DNA, 4666 bp, Aedes aegypti
cagtagcagcaacgagtcgcctttacattatccattcattgcattattggttgttacatggtgaaaaataacccactgaacagtgtagtgtaggaccaagtgaagtgagtgtatgcataagagtacgcaggctaaaataaatcacagtgctgactcgatacacagtgttctgttgtgaataatcagttgtcgattcgtatgtatataaagttctgaatacaagaaaagtaggaaaaagcgacccgcaaactctagcggatcgtggaagacatatagacgaagaaaagtgattgtagcagaaaagaaagaagcgaaagaagaaaacacaagagtgagagtgagggaggaagtaacgaaaaaatattagccgctcggaagagcacctatatttatgtattgcagtaaccagagtagtatggctactctgttacagcagaagagttttatgaaaaatttgaccaatggagcaaacaacgtggtggtcgtaaatggcaccaacgagaaccaaacgacgacaatggtggcggccgcggctaccacaatggccaccgttcctggcagtgccagccggatgcttctgccacacgaaacgaccaccctaatccatcagcaaccgttgattcatcagcaaacaaccatcaacaattcgttcacctcgacgcattcgcctgcctctagctcgatcagtttaaactcgagcagcttcaatagccaatttatcagtcatctccagagcaatcatcatctgtcgtcgcagcagttattcggcagcaacagtagtcatcagcatattgtgaccacgactgccacacccaccacttcctttcaaagtcagttcaacaatgcctacgtagacgtcaatgcaatatttcgtccagcagcatcacccaccaccactagcaccgctacaatgcagcaaaccttttcgtcaactcatcatccgctgccacatataacgaataacaatagcagctccttagtgtatataaatgggacccaacacagctcggcgaccgtgctgacaaagtcgttgtcgtcagaacttcattctcatcatcaacagactgtatccgagagccagactgccaataccaccgattccgcacggtccacagcggcttccgacggatacggtgaatgtggaaacgggacagatgaacaacctgccactgccactgatgcgacggatggaggaagcctcgatgcgaaatccggtgccgtcgttcccgccagcgaaaaggaagatgaccaagagcaggaagcggaacctgagatcgacattgtcatcaacaatgtggtctgctcgttcagcgtgcgctgtcatctgaacctccgtgatatcgcactcaaaggtttcaacgtggaattccgtcgcgagaacggaatggtgacgatgaaactgcggcgtccatacacgaccgcgtccatatggtcctcgggcaaaattacctgcactggtgctacatcggaagatcaggcaaaggttgcggcccggcgttactcgcgttgccttcagaaactaggttttaatgttaggtttaggaatttccgaatcgtgaacgtgctggggacgtgcagtatgccgtggggcatcatgatcgtcaacttctccgaaaagtacaagaaggatgccagctacgagccggaactgcacccgggagtcacgtacaagctgtacaacccgaaagcgacgctgaagatcttctccaccggcagcatcacagtgacggccgccagcgttgcattcgtgcaggccgcgatcgagcacatcttcccgctggtgtacgaattccgaaagaagcgtaccccgcaggagaagatagagatgctgaaacagcccgtgttcgatccggaactgttgatcgaggaagaatgtgatatcgagtcgactaccgtttatcccgctggagagcagcgagatggcggcgacgacgacgatgtggacgcgtacgatgacgacgaggacgtgcccatcaaccctaatgacaccaaagcaattaaccacctgcgaaggaatagtcgtcgactgtgcaagtcccgctatagcagcttacgaaacggtggtcggcgacgtccatccggcaaggcagataacgaccccaccgaggacgcgatgatcgtgtcggatgacgacgacgatgtcgaggagatcgagagtgacgatgagtagagagatcatgcataatgcatatagtagattcctattttcctctggctttactcaacttgtttcttacccatgttcaggaaccttcctgggcatttagcgaaacctagtaatattcgttttctttattacgtttcatccatattttttctattgttttctaatagaaaaattgtggtttcatgtgaggaacactggtcatagacaacacaaacacatacatacacacaacattgagcaatggagcaagcctgtcctagaagcacatttaccttaaaaacctacaaccaatcctgtgaataattacgattatgtataaaacaaatagccagcatggaatcgaaattattcagtttcgtgaatgtgttgcgccaaaatagggtagccttattttaaagtaatgttacgcgtaagtaaggtgttgccacacgatactcggagtcagtagcgcactgttcaaacagttatcatcatactctcattcgacaccgtctggtcagtgcgagtcaattgccgcagcacgcgaaatgcgttgcgtgtgtgcttgcaattaggatgttcgtgattctggaagagacattaccagaagatgatttaagaaaaaagaaataagagagatcctcgttcgccaatgcgttgagatatttacggttttttgttgcttgtacattacaccgaaagctgctgtatcgattctgttttatccattgtgacactgtcgttcagttgagtctcaagaaatgaatcgtacgaaataaaagggttcctgcaaaatgtaacgtgcacgaaatatggtgttgtttcaccaaacgagctgcgttcctataaacatcagaaacaaacactgaagaatcaccgatcggagaacgtgacgacaaacgcacgggcattaatcacatcaaactactactaaaattaccactatcatattatactagggatattggtatatagcgttggacggaaggtggtcccatatatcatgttcccattcagaccaaaaacaaaatgagagagagcagtaaacgattgatatttccagcgccaccgacgtttttttatttcgaatcaaatcttgtagatatttgtatttattttagatcaagttataaaacaaacatcgagcgcacgagcgttgtgctgttggaatcattgtgtcgtccccttcgcttcactcttatttgtcagaattttgatctacgtttcaattacgttgttttgttaatctatcctgttttcttttaggtctttaattttcttctacaatttttatgcgaaatccaaattagaagtagtggtgaaagagaatattatgttgcaatcgtgatgagcaccacgtcaaaacagaaagctagcgctaaatcaagtaatgtgtaggttgtagaaataagcgcgactacaaaagaaacttaaaacttatgtttttttttattgttttgtttgaaattgctttccagtggtacacgttgttatacaatgatgtacgagaaatttttgtttagttttcagaatgattaaagaaaatctatcgaatagtatcatgttataattgtaattatcaaacgggagagctgcatgcggagcgtaatgtgcttttggctgccctgggcgagaaaatattatctgtttttaattttatgggtcgtcattttccaaaagtggtaatattggtaggtaagacaagtcttaaataaagaatgctagcgatattgaaagcatcgactaaaactaaaacatggatgttatttggaacaaataaaaattgtttcgaggttataagttggtatatgagcttatactacgaggagatctgatctacacggttagtaacgtcattctactcgagagtgattcttctcaacattcgagttctcacagagtgagaacagtgaggatagaaatcttgtgagtttagtgaggtgtcgaattatcccatttggtatgtaagagcgagatgtcactttactcgtataataagtatattggtctagataataattatctcaataattattaattcaatatcctcacttcgtttttgtctccctcataatttctgtcgtgttgaataataatttgtcttattttacgagaagagtgaagtgaaaaatgatggtcacgacgtacggaaactaatcatggaattaagtgattcgctgtgtaaaacaatctgacgctcaactcattcgaatcgaggtttgtcacttgataggtgagaatgagatcatcatggatcgcatcaccaaccattggtgactccaagatctttacattatcccactaacccaatatccatgacaactgtggagatgcaaaggtatactcggcctctagtaacaacggttgtctaactaacattccttgccttccccgatgatcgtaaggacgtggccggcgccgttttttgacttttaaaatttgagctctcgatttgtgcacattgaagaattgtaagctaatcccaagcccaattcattgatttcctgtgcgacttcgatt

SEQ ID NO: 977 - DNA, 4932 bp, Aedes aegypti
attgagaatgttattgatcccgagtagcatcagtagcaacaacggagaagcaattgcgggtggtcaatcatgctcatgctcgttgaaatattttcaggttcacggagaagagttgcatttaaatatctttagaatagttcttagacatttgttgtcgttaataacggttccagacacaccgtgagtaagttcagttcagcacccagcaacgtggttgatacgtgaacgcatatgcgtcgccctctcgccctccatgtcgccttgttcaactttcttcaccatccctggggctgaatttcccgagtgttcgtaataatagaatatgtagaacaattcgaaccccacaccacgctgctttggccgggcacacggaaagaacactgggccgtttgagttttgccgttgcatcgcgttagatggcgctcaacaaattgtggcgcaaatcactcactcgcgcactgtactgtagtggcccggacattaaagtgttcaccaataacaagctaggcttagtcgccaccaacagtggcgagttgttttgctgcgccctgtggacggagttcccgcaagccatcatttgccattctttcccttgacggattcagttgatggtatagtgagagagcagttcgatcgacgcgacgtgagtccctgagttcgcgaccggtgattgacgcggtgttgatcagtccggaattgaacaatcactgaacgcctaggagctttcgagtgtccgctggccctattacttatgtacgtttctgtggcactagctgattacaaaaattgtgccgtttttatcaaaaactgtttgtggtgaagaaaacgtgtttttttatcttctgtacattgataacaaaaatatcacacggagtgcaagtcgtttcggaggattgttttctatgtagaactttgctgataagttttatcgccttttgtcgacgacctacgtagacgtgctcacgtaaagcacgggtgtgcgcgccttggtgacatactgtgtgaatcttgataacctgactgtgacgtggaagcgtaaatttgctgaaaagtgttccaaacatggcggacgggaccgattctacgtatgatgtggctgcggctgccttcaagttaccagttgttgtgtcaccgcaagccagtgcgcagcatagcgataacagcagcagtagcagctcggccagacaacgacagcagattgaacattctacgatcgatagtgaggcgagcgcatcgcacgaagagaccaaggaagttagtgaaagtgaaaacgcaactagtaaacattccgataacgaggcggtcagtgcaacggtaagagataagaccgatacgttatcaacagagctcgcgcccggtgttgtaggtggtagcggccacacaagtgattctatgatttattcaacgataagaacaaacgaggagcatgtaaacactccttcggtgataacgtctagttctaaacagttgcaagaaagtgcacagaagtacgaatcatatgttaacgcgaatcatcagctgggatccccaccgcgatactccacgttgcatccgttgataagtccaagcttgcatcaacaggtgagttatttcaactacgcggcgcaggaaccgtcgttcaacagttggccctgcgatctttcgtacaaggctagtagtgatattggacgacatcaccacgttcagcatgcggagagtgatgaacgcgaattgaaccatcatcaccaacaccagcaaagagaagtgtactgcagcagtgctaataatcatcattcgcacgattcgcattctcaccagcatccagaccattcaaatttaaatttgaatatcaatccaattagtagcgaatcgtcagccatgaggagtagtctgttggcgttttgtccgccgtatggctcgtcgttagcgcagcatggtggtgaagaattgcaacaccaccaatcgagccatgctcatcagcatggatctgcaatcgatgaagtgattgcggataccttgaaggatgaaagctgcaatattgtggatcactatctaactctcagtggtgcgggtgttgatatggggcacccagggccttcgggagcagatatggcagacgattcgccgcagcatcagcatcatgagctgcacgatttgaaggactacagtgctgcggtttatcataacaacaatgataagagtgtgatcaatttcaaccatcatcaccataatcaccatcagcagcagcagcagaacgcacacaacaatggcaacagcagtggcggcgaatcgcgtagtccttcgggctattcacacgatgagctggacagcagtctaacgaatttgactcagttgatcaacgtacctcgcgcaagtgataccagcacttcagcggtggtggcagtggcgacggcggctgcagcagcttcggccagtatgtaccaatcttcaccggtgcacgaccacacggcggccgtagccctgatgcagcatgggaccagcatctacgatacgctgcatggagcgggtatccctagcagtccatcgtacagtcggtgcggtttcgcgacggcggcatcaatgcaatacttcggaggcagtcccacgcacgagccggttcacatgtggtctccaggggtaggactcagtgagaacgagtacatcaagggcagtctaccggggttccagaggatagctcccagtacgaatgctgcccgagccaatcactatggttccggctattcacaacagtcagaaccagcatggccatcacactacgaggcgagtgcgatcgcttacagcactgcatccagcaataatagctcatcgggtcgacggccttccacaagtgtaccttcgacgacaccattctcggcagccgcctcactgactgcaatgggcatagaggcggacttgtttaccgagggacgagaatgtgtcaattgtggagcgattcagactccactgtggcgccgggacggaactggacactatttgtgcaatgcgtgcggtctctatcacaagatgaatggaatgaatcggccgctagttaagcagcccagacgcctggtaaaagaacctagttcagcgcgacgcgtcggactgcaatgttccaactgtaacaccatgaacacttcgctctggagacgcaaccaggtcggagaaccggtgtgcaatgcctgcggtttgtactacaagttgcacaacgtcaaccgaccgttggccatgaagaaggacaacattcaatcacgcaaacgcaaaccaaagggcagcaaaaatgccgatggaacgtccagctcgaagagcggcagcagcaatagcaacaacaataacagcagcaacagcaataataatggcagcagcaacagcagtagcaataatccgagtagtactagcaacagcagcagcaataaccacaactcaaccagctcgctgaattcgtccgtgctaggaaactctgtgcatgaattgaaatctctgaagtcatcggtgggccactcaagcatcattcagtccacgtcgacgccatccagcgttgggagcaacatgtccccaacgcatcaatcggcttctccgtcacatcacaaccagctgtcgccaatctcgtatacccaacagatcccatctccgatcaccggaacacccacgagtaccatcgttaacaacaataccagcagcatgaataataacaacggaatgggaaaatatggccatcagaaaagtgtcttcatgatgcctccgctaggtgctccattgaccaatgccaacgttatggctggtcaccaatcgctcagcccgatgggttaccatttgaacaacaataactcctcgaacggttcgatgatgagcccaaaataccaccacagtcctccggagtctccaaacagcatgtactacgatatgatggcatcggaagtgaacggtgtcgatcagcacgggttgggatccatcgtaaagatggaaccgatgtcagttgcctacacgtcctaccaccaggctatccatcaacaggttgtgcagcaacaccatcaacaaatgcaacaacatcagcagcatgttcagcaaatgcacagccatagcaggagtccctcaatctcggatgaaaacgatcagagccaccaatcgtcggaaggtctagactgcaagcacaacatcactcgcccaactgtggtttccatgtcgagctaagcgccaacaaagctagaaaacaagagaaaaaaaaatgcaatttaagaatctcatgctcaaaaccaaatgtaggaagaatcgaaaagacttgacagaatagaaggaaatcacgatcacgtgcacaacacgtatgatgattcatcaagaccccctcgttcgagagtgaatccccagacggcagggcagggctctgcatcaaaatggagcttatcttcttccgtaaaagctccagaatttagaagcatttcaacaagagataaggactgcaattagaaaccagaatttatcgtacgctagtagcggaccgagagagtctattcacttttataaaaaccaatcacttaatgttaggaaaaatgtgttgtaaactgcgttataaaaccatagcatatgaacgagtgtgtcatctaatcagctgctttagagtaaaatgaactgatgtgtttgtaaagtttgcttgttgtaaataagtttaaagactctgtttatgaaccaaaaaacctttgaaatgaatgtggatgaatcataggattaggactagttgttgttgtaatcataagcaagctctctaactcacgacaatacttcgtatactttccatggcttagttagtgatttctgatctgttacgctgtatatctctcaacagatagaatcgctatttttatcacgaattcagcagaataccaaatttttgttttacatccgttatttgttaaaaagtaggtttaagactagccaaataaagcactcccttttaagcgc

SEQ ID NO: 978 - DNA, 1841 bp, Aedes aegypti; identical to SEQ ID NO: 432

SEQ ID NO: 979 - DNA, 4549 bp, Aedes aegypti
caaagtcgcgcgcgcttcgtagcgatattacgcgagagcaacggagagtgagagtgccgttattccgtcacaagcaaaagaaccgactaaccgcgtggcgaaggcgattacgacgcgatgggttcaaactccactccggtatgaggaaactctcactctcaaagtcatactgtcacccgctcgggccacactcgatgcgaatacgatgaccggtgctgcggtggtgaatcgggtacgtgacgagaccgccctaccccaaactcgccgttacaaagatgcgaccgacacccgaccgacgaaggcaatgatgacgaccggcttgctgtggcgttctgcatgcggagagaatttacgttcgcgagaaagagttttgcttttttatttcgattgataccaggttgcttaatactgttttgcctcacttaagtctaggccatccgactgtcaacagcgaaaattgcgcgcgctctctctcggcggctgaaggctgttctttctcttcctcggttagtggatttggttggtcgttttggagtttcttgatttttgacgtctgattcggacattagccgaagttcggtggtgaagaacggttcaaggaggtgggagaagatcggtgccaagcaaaacagaacaacccctctgcctgtggtgtgtcccttgattggtagtagtagtagtagtagttgtagtacacctatactcaaaggggggctacttgcagcaacccagtagtgtgtcagtcggtgagaaagtgcacagacggcgctcgggtcgacaacgggtgcttagtgggacagagtgagagagacaccgtgattgggctgcgaagaagaagttgttaatatataacaagttgcatcatagtcttaagacttcagtcttaagaaagtgaaccaccaataaacatctttcgcaaaaaaagaaaaaaacacgccgcgacgctgggagcaaacaagctttgggattccgcgcgcacaatctcaagctattttcggaattttgcaatcctgacggtgaattgttttcgtggcacgcgaatccgctctcaaggattttccgggatcgtgcagtaccgttgattagcaggaagctgaattttaccgttggagtttgacgccaggataacaatggattatttctacttttggatttacaaccgaagaaaatgaaaatgtggatattttgaatattctgagtttttaaaaattgtgacggaaatggactgatgatgttttgttgtaaacagtgtgacatggactgaaaaaaaactcgaagaaaaagcagtgcaataaaattatcctcgaaggaaaagtgcaatcggaaaacaataagaattttctcgtgcaattgaacatataaggactttgaagcctacattggaagaatctgtgtgtagtgtctagcaaaatatggaatcgcctcaaatgtacgatacgaatcaaattcaagtgcgaagtgatatcaaaaaattaacaatggcagcgaacagcacaaccaccaacaacaataatgcttcgacgcccaataataacaacaactccccgacggcagtcaaccagaatacgttggctttgaagcagcagcaacaggctcaactgaatcaacacgcacaatcaaatggaaatgcattggccaacgggaatattctgtccaagcagatgcttcagcaaatccagtattcgcagagtgaactagacgagcttacatctcaagaaatttctttggacctccaacatctgatcgatgatcagttccgtgacccggaggccctcggtatcttcaccgaaatggttaccgttggtagtaccaatggtagcgtaccgaaccctttggttcagacagcggctgctaaggcacttcagttacagcaagctcgattgtctcagcacacaaatggaaacagctatcaacgatctctggcctacatgccacaaccagttcacactggtgcaacctatgctaacacttcgagtgacgagaacagcagtgtaggttcttctgagtcagctaacatcaaagaagagcccgtagatcccaacgagtaccgtcgccagctgcagaatagtggagcacagttcatgggtaatacgacctatcagctagcaggcggtggcggtggcgtcggtacaggaaactacgttaccaatggtaatggaaacaccttctcaaacctgactccggccacggtgttgcatcaccaagctttgccacatcttgccggagctgcccatctggcaaatcttaccaaacacaacaaaatgttaccccatgtagcccgaaagtcagttccaaagtcggtagacaaaggaactgacgaataccgaagaaggcgcgaaaggaacaacattgcagtacggaagtctcgcgagaaagccaaggtgcgatcgcgagaagtcgaagaaaaggtgaaaactctcatcaaagaaaaggacctcttgctgcggaagatcgaagagaagaacaacgaaattcaactctacaaacaactctacatgcatctgatgaaccacagcaatccagagatcaatcagatctgccgcagtgcgttgaatctatcaaacatgggtgatcatatgtagatttagtgattttattgtatgtaatcatcttcaccccctcctgttcttcataacgtgaagtggtctgtccctagtttgtagtaaattaaaatgcaaatcgcgcattatttagtggaaatttgtagattgaaaatctttgtaaatataattaaatacctggcgacggggaagattatgtacgatttgtattggaactgatggatatagtttcacttgaaattggaccattttgatgaacgttgaaccaaagacagtatgtgtagaaatgtgttaacttccctttgcaaacgatggggaagaaaactgtaagtgttgagctaagcgaggcaaagctgatttattttttggatggaaatggattacctgtacatatacttaatcaattttatttaccatcttcagctgctaaagtgcaagaaagttatattttctacttaacacaggacagcttccataagacttgtttttattattattatcaccaccttttttaaaagattaatattttattcgtttgtgaatgttgaataaatgtttagaaaacggcttataaaccaagtgttatgtttgctcgacagaaagaaatatttcttcagctgaaattttgttgtttcctttgctcgtttattcgtaacttgagaagattcattgtatagaaaaaatcgtaaaatgcagcaaaatcccaaggtcagtcacaatttgcctcagattatcttctgtttccctttccatggctatctgtatttataggattcactaaatgtatttctttcgtaaacagtgaaaaacgtgatcattaagaaccgaagttaccaatctcagcttgttaggataaactgtgtagaaaatctcatccattcaatcagctatgtaaaacatccatacaaagataaaaagacatctatttatgtatactcttgtatcaagcgaccaaacgcagaaaaaaaaatccaaccactgtgtaaatttaattccgcaaaatccctcggagatcgctgcaataataattttagtagaccgaaatcgaaccagactgataagcaccatgtattgcgcacactggttcagagaagctcggtagcaaaaggtgtaactagaccaattttgcatagagaaagtgatctagaattctagtttgtagtagacaagacaacaaagaatggaaaaaatcgaaagtgacaagactcaaacagccgtactaaatattaataatcagaatagtttatcgaaacacaaggcgacaaagtacctttatttccttttttatgaatattaatgtctgatggagtagatatgcaaatcttaatcatccgcaaacggtgagaatcgaaactaatattcgtatatacataaaactcacagctagggaaacttaagaaaaccgtagaaactgagacggattcgttaccatgttttaggctaatgctatactgtaaacctgtggactactactagaaagtaagttttctctcaaattagctaaatgaacgggaaaagcagtaatttgtttttggatgatttattgaatccttaaacagttttttttcttttgatcttttgttgtcaagtatcattctaaagcaaacgatcgtggatgcaagtttggctagttgttcatgataaacgaaaactgaaaattctattattaaagcgtagaacacatacaaacctaaaacaaaaacacacacacgattatacaagtactgtatttttctcagcttgaaaagtctgttttgaaagtaagaaatcaaataaagaatgtattaaaaagtgaataaaacgaaaacgtgttttcttcatggtggtcttcttttcctcctgtgctaatcctcgtttgtttctgccttgcatatgagtggccactatattagatgccggatcgctcccctcaatgaaatgcagcgtcatcgttgttggcaatgcatcagctgttagacaaaatggatcggcgtcctgtgaatgcaaag

SEQ ID NO: 980 - DNA, 2947 bp, Aedes aegypti
ctccggtttccatccgttcagtgatcaggatcaagaatatcatcaagggaaaagcgccgaaaccgcaaacatgggagttccagcattctttcgctggttgtcgcggaagtatccttcggtcattgttgagtgcgtggagcaaaagcaaaccgatgaacacggaaatccgctgtatgatgatatgacccaaccgaacccgaacaaggtggagtttgacaacctgtatctggacatgaacggtatcattcatccttgtacgcatccggaagataaaccggccccgaaggatgaagacgagatgatggtggccatctttgagtgcattgaccgtttgatgaacatcgtccgaccgcggaagttgctctacatggccatcgacggtgtggcaccacgagccaaaatgaaccaacagcggtcacgacgtttccgagcctccaaggaagctgcggagaaagctgctgaggtgcagaagattcgtgacgagctgagggcgaagggatgtattctgcctccggaaaaggagaaaggggcccatttcgattccaattgtatcactccgggaacgccattcatggacaggctgagcaaatgcctccagtactatgtacacgatcgaatgaacaataacccgggttggaaggggctgaaaatcatcctttcggatgcaaatgtccccggcgaaggtgagcacaaaattatggactacattaggaagcaaagggcgcaaccagaccacgatccaaacactcatcacgttctctgtggggcggatgccgatctgatcatgttgggcttggccactcatgaaacccatttcaccatcatccgagaggagttcctgccaaacaaggaacgtccttgtgacatttgccagataatggggcatgaaatgaaggattgcactgggctgcaatcggagcgggacattaatcggacgccacctccccctggggcagagacgcagtacattttcgtccgtttgaatgtacttaaggagtacctcgccaaggaactggacatgcccaatctaccgttcaagtatgattttgaacgcgtaattgacgattgggtgtttatgtgcttcttcgtaggaaacgatttcctaccgcatttgcctagtttggagattcgtgaaaatgccatcgatcggctggttacgttgtacaagaagtgtgtgtacaagaccaagggttaccttacggattccggaagcgtaacggttgatcgtgtcgaactcattatgacggatcttggctatgcagaggacgagattttccgccaacggaaagtcaccgaggatcgtttcaaagagcgcaacaaacgcatgaaactgcagaaggagcgagaacaacgtcccaatttcgagcaaatgaacaaatcccagtttgctccgactcccttgggacggggaatcactccccaggcgattcagaatccacgtcaagaggctgcacacttccggatgtttggcaatagcagcaatcaacagcagagcaattccaacaacgatcagaaccgacgcggtcagaaacgtaaggcggatgaacccctaactccagcagccgtcgaagaagcagaaacccccgatgaggttcgtttgtgggaagatggcttcaaggatcgctattacgagtccaaattcgatgttgcaccacaaaacatgaagttccgtcaaactgtagcatgggaatacgtccgtggcctatgctgggtacttaaatactattaccagggctgtgccagttgggaatggtatttcccgtatcattacgccccttttgcgtccgacttcaaggggctcagcaacgttaacactcatttcgatcggggcactccgttcaaaccgttgcagcagctgatgggcgtgtttcccgcggccagtagaaatcacgtcccaccggcgttcgccgagctgatggtcgatcccaaatcgccgatcatcgatttttatccgatcgatttccacatcgatttgaacgggaagaagtttgcctggcagggcgtggccctgttgccgtttgtcgacgaaaagcgcttgttcaaggctaccgacccgaaggtcccgtcgctgacgcacgaagaacggttacgtaacgaaaacggcctggctcgcttgtacctgtcgcccggaccagacgcgtacaaattggtcaaaggtttgtataatggctcagtggactacgagcgcgaggttccgattctggttgactgcatgcgtggtatcgtaattccgaccaaggaaaacgtcacacacgatggggtgcttccatcgcccattcccggcctgcatccggtgtgcgagaacaaagttctgacggtgaaattcctcgacccacagtacgcggatgatttcgtgtacccggcccggaagctggagggagcccgggatcagcccaaggtcctgggagcgaacgagggtccggtgatcgggtttggacagcgaacgaaccgaggcggactgggtagcgctggccaccggatgatgaaccattacgttggtaacaatagaggaggaggaggtggcggcggaagaggaggaggcggaggcggtggacgcaatgattacagcaatttttcgagaggtaataattcatcaaatagcagcaacttcaactcgtcatcttacacaggcaacagtatgaatacgtcatcaaacaataactactcgaacaattcgaattctggatcgagcgaccgcggtggttccagctccggggccaacttgagcgccttcgagcaactgagcagccgtatcaatcaataccagcagcaggtgatgacagggatcggcaaaacagtggtggatatcagaaccgcggaggcttccagcagaatcacgggcagaaacgctggaggcaatttcggtggcaatcagtacgggcagcgcaatcaaggtggccgattcaacaacaacttcaacaatggaggcggaggcgagagccagtaa

SEQ ID NO: 981 - DNA, 5739 bp, Aedes aegypti
attttctgctcgggctgtcaaagaacgcaaactcgccaaacgcactccccggacacaaaccctgtaacatcggagccactcacacagcaccgcgcatgcatcctgctgatcaccctatcccagctgtcagttatcggctacctcgctctcgcacttcgccccgtcgtgttcgcggtgaaggatctgcctgtctgtgccgtgcttctcatcgccattgtgtgtattgtcccgcatgaaagtctcgtattttgcaccaatttcccgtgcaatttgtacttttgttcaggtacaaagtgataaagttatagttttccacgaagaaagtgtaattgtagcggaaaattgcgctcgccgcgtgttttcgtcagggcgcactgaaatcttttttttttgacatcgccaaacgtcgtcgtctttcgttgttgttgtggttgtagtgtttttctgccgtgcgtgcgataaagatagaaggcgcaacgacgagctctcagtcagtcagtcagtgtgtggatttctcggacttgtaaaaatttctgcttcattccgtgttggtctggtgtagggattgtgagcacaattttcggttcggttttgtggtgaaactctcggttccatcggacaatgagcgtcgaggtggaagcggccaatccgcaggataactccaccaaacaggtgaacggcgagtcggcctcggatcgcccgaatggagtgagcaatggccactcggagggcggcggcggtggctccagtgacgatcgccgcaagagccacaaaagctccagcaaggacaaacaccgggacaaggaccgggatcgggatcgcgagaaggacaagagccgatcggacaaggatcgcgatcgcgacaaggacaaggaacgctcgaaggataaggaccgcgatcgggacaagcacaagagcagttcatcgtcctcgtcaaaggacaaagatcgcgataaggacaagtccagcagcagtagcagcaaggataaggatcgcgatcgacatagcagctcgcacaagagctcgagaagcgataaggatcgcgagaaggacaaggagcgatccaaggacaaagacaaggaacggtcaaaggacaaggatcgggaacgagacaaggacaaggagcgttcgaaggacaaggatcgggagcgcgataaggatcgaaaggatcgcgacaaggataagtctagcagcagcagtagcaaagacaaagaccgcgacaagcacaagagtagttcatcttcctcgtcacgtgataaggacaaggaacgtgacaaggagaagagcaagagcagtagcagcagcagtaaggataaggacaaacattccagcagtagtagcagcaaggacaaagatcgtaaggaccgcagcgataagcattcctcgtccaaggataaggatcgagagagaaaggaggaaaaggtcaaggaggagcctgctgaagtgaagcaagaacagcaggaagtgaagcatgaagagccaagcgcaatgttcaatggtgttgctagtaacgaatcgtctcaggatgtttccgagataaaacaggaggatcctctcagcatttcccaggccagctcctgtgactactcgatgtcgcagttccgtgctgatgaatcccagtttgtcatcaaggaggaagcttccgatcaggatcaagccgaagaggaaccggaagagcccactccgatggaagttaagcaggaatcggattccgaggatgacgttcctctgtcgaagcgcaagaaaaaggacgacgatgaggacttcgatggcggtagcaagcagaaaaagataaagaccgagaaaaaggacaaaaaggaaaagaaaaagaagaaacgcgcctacgaatctgaggcggaggaattcgatgaagaggaagacgaggattacggtgccgccaagaagaagaaacaggcgaagcaagttaagaaagaagtcaaaaaggaaaccaagaccaaaaccaaggtcaagaccgaggtaaaacaggagactgccagccccactaaaggacgcaagaagaagcaggaagaggaggaggaggtttggaaatggtgggaggaggaaaagcgcgaagatggtgtcaagtggaacacgctggagcacaaaggcccggtattcgcaccgccctacgaaccacttccggataacgtcaagttcgaatacgacggaaaggtgatcaagctttcgcaggatgcggaggagattgccggcttctatgcccggatgttggagcacgagtacacatcgaaggacgctttcaacgacaacttcttcaaagactggcgcaaatcgatgacctcgtcggagcgcgaaaagatcaaggatctcaagaagtgtaacttccgctccatgcacaaacactttgccgaaatatccgaagccaaccggaatcgcacgaaggagcagaagctagccctcaaggaacaaaacgaagccctgatgaaggaatacggaacgtgttccatcgatgggcacaaggaaaagattggtaatttccgtattgaaccgccaggtctgttccgaggtcgtggtgagcatcccaagatgggtatggttaagcgacgagtcatgccggaggatgtgatcatcaattgcggcaaggagagcgtttggcccaaagccccggaaggacaccgttggaaggaagttcgacacgataattccgtctcctggctggcgtcctggacggagaacgtccaaggccaagtcaagtacgtcatgttgaacccaagctccaagttgaagggcgagaaggattggcagaagtacgaaacggctcggcgactgttgaaacacatcgacaaaatccgggacacctaccgcgacgagtggaagagcaaggagatgcggatacgacagcgtgccgtggccctttacttcatcgataagcttgcgctgagagcgggtaacgaaaaggacgaagaccaggccgatacggtcggttgttgctcgctccgtgtcgagcacattgacctgcacaaggaactgaacggcaaggagaacgtggtcgtgttcgatttcctcggtaaggattccattcggtactacaacgaggtggaagtcgagaagcgtgtgttcaaaaatctggaattgttcaaggagaacaagaaacccggtgacgatctgttcgatcggttaaacacctccgtactgaacgagcacttgcgtgaacttatggaaggcctcaccgccaaggtcttccgtacgttcaacgcgtcctttacgctgcagaaccagctccgcgagctgaccgatccggacatgaccgtgccggagaagcttctggcgtacaaccgtgcgaaccgggccgtggccatcctgtgtaaccatcagcgggcggtgccgaaaacgcacgagaagagcatgtccaacctgaaggagaagattcgggctaagcaggaagcggtcgaaacctgcgagcgggagttgaaggacctcaagaagagcaacgttcgcgacaaggtcgccaaagacaagaagcagaagcagctggaacgccttagggaacagctgaacaagctcgaactgcaagagactgacaaggacgagaacaagacgattgccctgggcacgtccaagctgaactatctcgatccccgtatttccgtagcatggtgcaaaaagttcggtgtcccaatcgagaagatcttcaacaaaactcagcgggacaagttccggtgggccatcgacatggccgatgagaactacatattctaagctcacaaaagaaagaaacggatcagatccggtatcccctaactgtgagatatcgtgtggggtctctccgatagtgtgtcgtaatagtgtatcgtaaggtacccccaaattctggcaactttaatatctgatgatccaaaatgtttcgtttttagaatcataaaagtttttttagtagaaaattattagtgcccattgcttttttttttgtttttagtctcactccttgtgataagatagggctattgttcacctagaagcacatacccacccacggaacactaatgccacagttaaaaggaggggaattgctgttcctttcctggaatagagtgagacgttccgcgcagttaaatcagttttgtaaaaatctatgtatttatttgagagtaacattataaagtcccccgatataacacatagcaagttgtcgattccttttcggggttggcgatgattttttaaacctttgttcggaaacgtacacgtgttggaagtgaagaagccatccgcagacatcaagagttgtttaggaaactagtttaaagaaggatatttttataattattaaaacaaaaaacaagcattttctcgattaggaggaaatgccgtatatttttataatttttgtgaaacttccgtcagaaggaaacctttccatttcatcacctcgcctccctgctcctagaatagcagggatcggggcataactatcgttatcttacgccaaccaaccacattttgaatgccagcagtcaaggtttatttatttcgagagagctaaacagaaagagcataccttagttggaaaaattccctttcttccttgcatggactaagtacgtacctatgtttgtttgattcgttttctctttagattgtaagtagtagcaattacatattaccaagtgcatatgattgatgaagcaacagtacagaaatttgcaacgttacagcgtgtgattttgaagacgagccaggaagagtttctttttttacgttccctagagaatagtttaggaagatggaataattgaataagccccaagagtgtgatttgctttggaaggaatgatttaatcaaattagtgcccaaaaaattagaagccgaaaaattaagacagacagtgtaaaccgagtggcaatgaaatggaaaataacttgcgatacaaaggttcatatttacaaagcagacaaaagaaaacatatattagtagcccttagtaggtattattgaaaaagtaattaatcaaataaacaacacacccctacaaaccacaaataataccataattaagaaaaacgtcatttccgtatagttctcactgcgtaccatgcgcagaattaccttgctaagaaagaggaaacaactccgcagcagcaacaaaaaagtgcagtaaaacgactagatttaaggcaacagaggttttaaacgcgtaagaaaattgaaactccttatcttaacgaaagtcaaccattgacaaaagcacatatgatgaagcagaacgaaaagaacacaacggcgatgagaagatgatagtagcggtaggacagcattattaaacgagaagagtaaaattacgtcttgagaacggtcccagcaacacaaagagtgttctttatgaaagacattctgggagcccttctcgtcgaaccaccaacatccacagactactaaatcatgcgaacactcgtacacacatattgacctatttgaaataagttaaatatctgtaggttgaacaatcaagaaaaactggaaaaccgcaaattgtgtgcatcaggcaaaaaaaacactaaaataaaattccataaaaattgaaatggtgttcaaatttaccgaatacatggaaaatcttcgaaatccttgccagttacaggttcactccaattcttagcttagcttctttacaaggggttaatctgcgagcagaccaatgagaaggtaactcaggaagcgtggggatgccgcaataccgacgacccactaaaaccatccgaccaccttacggtatttcttcg

SEQ ID NO: 982 - DNA, 7672 bp, Aedes aegypti
atgcagtttcaaggaaatggacaaccccatccgggaggtttccgcccacgtggtgacaagcccgatttctacggcggaaacggagtcccgggaggcaaaccaccacactttatgagcaaaccaggcggaccaccgtcgattccgcccttcaacccgaacggatttggaggaccgaaacccatgtacggcagtggcccgaatggaccctccggtggacccggtcggttcaacaagttccgcccaaacatgtacggcggcccgacggaactcggcggaggaatggcaccgaagaaggactttggtggacctaagatgttcagcacgggcgccccagtaggcatgggcgcgatgaatggaaaaccgatgtatgacaaacctttcgatgcattcggaggtcctaaaaagtacaacaccatgccaaactcgtacggaaacagaaatggttatggtccaaagccagattttaacaacatgagcaaggaagaacgggccaaaattcaatcgctgaaggccaagttccccggacaaggtctggtgaagcccatctggaaggacctagaaccattcgagaaggacttttatgttcctcaccccaatgtgatggcccggactccggaagaagtgcaggcattccgcgagcgtatgcaaatcacagtcatgggcaacagcgttccccatccgtctcaagactttgaggaaggcaatttccccgactttgtcatgaatgaaatcaacaaaatgggattccccaacccgaccgccatccaggcacaaggctggcctatcgctctctccggtcgggatttggtcggaattgctcagactggatcgggaaaaaccctggcatacatgctgccgggtatcgtccatattgcccaccagaagccactgcagcggggtgaagggccggtagtgttggtgctggcaccgacccgtgaactggcgcagcaaatccaaaccgtggtgcgagactttggcactcactcgaagccgctgattcgctacacctgtatcttcggaggagctctgaagggaccacaggttcgggatttggaacgtggtgttgaagtggtgatcgccaccccaggacgcttgatcgatttccttgaacggggcattaccaacttgcgtcgttgtacatacttggtgcttgacgaagccgatcgtatgctggacatgggcttcgaaccgcagattcgtaagatcatcgaacaaatccgaccggatcggcaagtgctgatgtggtccgccacgtggcccaaggaagttcaggcgctggccgaagacttccttcatgactacatccagatcaacatcggatcgttgaatctgtctgccaaccacaacattcaccagatcgtggacgtgtgcgaggagggtgagaaggaaggcaagctgctgtcgctgttgaaggaaatttctagcgatgtaaacagcaagattatcattttcgtcgaaaccaagaaaaaggtggaagatttgctgaagaacatcgtgcgggatggatacggtgcgacgtcgattcacggtgacaagtcccaatcggaacgtgattacgtactgcaagatttccgccatggcaaaagcaccattttggtggcgaccgatgtcgcagccagaggcttagatgtggaagacgtgaaatatgtaatcaattttgactacccgaattcctcggaagattacattcaccgaattgggcgcactggccgttgctcttcgtacggtacggcttacaccttcttcacgcccggcaatggacgtcaggcacgcgaattgctttcggtgctggaggaggcgggacaacaaccgactgctcagctgattgatttggctaaacaggcacctggtggtaaaggtggcagaagccgatacaacgttcgtggtgcgttgacttccggaggatataatcgagatcagaatggttttggaggtaacaggatgttccagaagaagccattcgagaaccgattcggtggtcctccagtcaatggaatgggacctaatcggttcaacaacccgggaccgaacaaatacggcggaccaggaggctaccgaagtgaaaacagctggaacaagaacactggaggttatcaggccgtgccatcgcatcagactcagaacggaactccacagcagtcaccgccacagcagcagttgtatgaacctcaccagcaaatgcgattccattcgaagaataccatgtaccagaatccgaatcaatacgaagatttctccaaccaaatggtcggaggagctccacaagctttcaacggtcatagcggaacgcgtttctactcgaacaagccccatcagggcacaggtggaatgcagcaaactcaacttggcggtcccggtggccgttacaatccgaataaccaatacaacggtgatgtcggtccgaaacccgctggcggacgtcccccatatcaaccgaagcaacaacagtttaacaatagctatgccgccgctggtacggccaacccatacccggcgcaactggctgcagcagctgctgcggccgctgccgctgtcggtggcggacaaaccattccagctgccgggtttgctaccggatttgatccgttggctggcgtccagggagcgatgggtacgttcacttcttcctatcaaattccagctgctgcagcttactattcgtatcctgcggccgctgctccaccgccgccaccacagactcaagccccgccggtcgttcccccggttcaacagtaaactttccgctttcgaagcgatcgaaggtatacaaacacatatatacaacatatattgctaagcatgagaattcaatttttcagcataaaagctcgttaatttccatacttttaacttattaaccgcggaaggtgttcgttttttttgtgaagagtaatcttcccccctatattagtaattgcgcaaaatgtgtgtttttctttacacctttcgtaaaacatttagaacgacttcaattttctccctgatctatatatctattatgtgaaagcattctattggaagaaatgatatcttagaatacaataattgtgaatctaattatgaaataacaacccgtttgaagtttggataaaccagaaagcgattaaaatggatgttttcgtcttaaggagtgtggtcgatggtggttcacaccatacgacccaagggggggaggttgcaatccgcaagccccccccttttcacgtatgtgtgttagatcgtaagcgtagttacatacctacacacccacagagacacacaaaatatacacgctcgaaagccgagagagagaatacacattaatcttaatacttcaatacacacacacgtatataaattatattattacattcaggcattggtagattacaactatttattgaacgaggaaatattcatacctaagcagaacgacaaaaacgctatgcattttccaacgtattcattaggttcctttccgtttcgagttattataatacgatgttagtgttttttcttcatttttcgagatactacttcttattattgaaaacgttagggatttttctttcggtttgtagtgttttgctgaataattttgttcaattgatcgatatgagactagggacggagcgattcgtaagctgatttgggacaaagacgtgatgttttgattaattagcaagtgctgagaatttttttcaaaacagactgaaatattctgaaggaaatagttcgtcactagaacagagttggtagcaagtaatttatttcgacttagtcaccagactaggaagtagccataagctacccgaatgcaaaaaccgataaattagaacaggttagaatagtatgacaagagcaactgcggaaatcatgtcggaacagttagtataccacactcagctcttagcgttgtacatccttattcgaaacgcttgaagcaacacctttatcttcaagcgctgttagttaatttacgcattagtttgagacagcagccacctcttcagccatccaatttgtcatgaggagccgtttcgtcccctttctatcgatctagaacaaagcaaatcacgaaatcattcgaaaacgaacaaccgtgtcgattagcagctgtgaataggaagtcaaatttcctgctaaacattcactaaactcatgcaaaaaaacacttccacgatacacgtattcattgtacgacacggcataatatagaaaagggtgtgacaatcggttctattggtgagattcaaattaaaatgtttctcactaatagccaaccgtgtctttgggaccccagggtccgcacgtcagagattccaaaacctagcctcctttccatatccaaagtatgtatgtgaaacgtttggtacaaagcaaaaagtgtgcaaaaaacgaatgcaccgaaatccgtaaaaatggcatggaataagtggccagccagattagagtaatctacaaaagagggcgcattctgagttcgtatagagaattccgcctgagaaagcgagagcaaacacaaacagaaagcttattctaacggaaaatttcgacacaacataacactatacaacgcaatcagtgcggaaacagaaaagaaaaaaaaactgtttcttcagtaagaaccttttcataccgacgaacgtcactgaatcgtggtgacgtttggtggtaatttgctaagaaatacgaacaattacaaaggaaaccaatctgctacctaagtaaggagataaacagaagaagcgtaaagtgaaaaagagtaaaagactagttgataactagatactaatgagaacggataggcaaaatcgataagagcaattagagagacggcgagcgcctaagatttaagcgaagttaaagataataacttgtgtgataaacgttgatgtcacttgtgagaatatgataatgataaaataacaactgaaaacagaagtacgcaaacaaaactaaacaaaaacacacaatgaaggcaagagacttgaaaacttttttgttttatttaatgaaatttgtgatattcgttaatatttcctttcgcatcctgacacatcgcgccagcattttttagaacgcctaaacccctctgtaaccgagagagagaaagtcgagaaagtaaattcgcgcgcgtaccatttacaaatacagaaacacatttaggaagcatgcgaacaagtccagagcggaactgggtcgcatccgaggcgtccacaaaaccgtttgaatctgtgtaataagctataaagtaattttagaggccacattcctttaaaagaagcaaactgctgcgagtgccgctcagtggtggcttttctcacagtagtcgttagtttattttctctcattgaaaacacaattcagtacctgttcaatcgaaaagtaaaatacgagaatcatgcaaatcataaacgcgaaacgtagtggacgatagcaaagcgaataattgaaagacgaattttaatttaagcatcaatttgagatgaaaaatgcaaactattcaaattgtttatgggaaaatgaaatggggcaaaaataacagtaatcaacagtcgtcagttgaaaaccgtagtagttaaaaagcatggatttccttctcacacaaatctagtccgaaacaaactgttgtttttattttgtatttttattaatatttatcatacataggggaaatccaaagtgtgataaagcgaatagcgccactgtcgttgtaagctgtggcatttttatggttctttttttgtgcgaaaaaataagaaaaacgaagagatgagactattttcatcaaatctcgatgaagatgcgaaaagtaaaagcaaaaccaaacaaagcgtaatttaggaaaagatagaaggacagcacgcgcaaccaatcaaaaccactagaacataagtgaaaatagaactgagagtgttagtcttcccgctagagggcactcaaaggtattttcacctgcatcgaacaacgagtattttctcgttaatgtgcgcgcactgttaataaatgcatggcatccacatgacatttactagcacggaaatcaaacgatagatgaaaagcaggaaacatgaacggataaccataaccaaattgcctttaaatgaactgtgatcgtatcaaatctcgtctcgttcctttttctcatcactttgttgtaagaggacaagatcgtatcgtataagtcccctttttcgatggggacaaaaactcattttttacaccttcatttgttatatcacctataaatcgactatattttttgttatttacaaaagctaataagtactagaacaaatacattcgtgtgtgattcggagttgttcatactctggctgactgattattgttgtttaagaactactagttagaaatgattaaaatacattcaattgacacaaaacgaaatgtatgccaaaagtattcatattgatacacaaaggaaatttaatttatgtttaaatcaaaacgaaatgaaaaattaaaattcgtcaaattgttcctaatcgaaaaccacgtggtatttttagttctcataaagctagaatcattaaacaaacctatgataacgaaacagaagaaatttacttctcgagtaccgtaacaaacaacacaaatgttgcaataaaacaaaaaagttaaccagcaaactttctttcacacaaaaacaaacgcaggcaaataaaaaaaagccggctgtgttcacttctaccacaaaataccgaaataacaattttgtttcatgcaagattggtactcttgcgctttccattgggtgatattgtgataaccatcggagtatgtcgtcgtagaagaaagaacaagagtcattatcgatatatgaaacaaacaaaaaaaaaactcgcatctgtgaaaaatgacaactgaactaacacaaaactagacacacaaaagaaaaacaaacagagaagcaaatcgggtaactttgtaatacagattgttgtttgtaagcgaaacactataggatcttgacaattgcgcgagccgagatcattcggaaaattttgcaaaccttatgcgaaggttttgcgcggttccgtcgaaccgtgaccccactacagtaaaacaaaagaacactttttaggaatatatgaaaatgaaacacttacaagcagaaaaccaaacgctcgcctctctagagaaaccaacaaacattgttgattgacgaaggaaatcgaatcaaacgtcgagaaaaaaaatgttttatttatcgtaaaacataagaattgtatcacttcttatttatggagcaaacacgccagatacattttttcgtatccaaaaaagcaaacacaaaactacgatctgtgaaagtatgatgaagcgtcgtcatgaaaaaagattttttttattgaaaaatgcataaactgtgaaatctcgcgtgtgatgaagcggaaacgatttagcaatcgtattcgacagaaagaaagagagaagtgtcttcgtctgcgcgtccgatcgttggttgggatgggactttggttctgtacgaactcttatacctactttaccaccgtctggcgcctttcgcaagcgtctcacatatttcgctccactggcagatactgcttagaagaaccggaaaaagtcagaaaaccatgaatgaaaatcgtttaataaacaaacaaccgtaaactaataaaaatttatcaagtttaatgggcaaatt

SEQ ID NO: 983 - DNA, 4214 bp, Aedes aegypti
ttcaaactgacagcataattgaacgaaaatgcaaccgcaacacaacacaacacttttcccttcgctgtgtggatgataaaccgaacgcataaatggtggaggcagagtaagaaaaagtggatttctaaatagaattttcattccgtcaaattcgcgagaaaaagtgttgtgtttttggttaaattgtgtccaatctttgcgaaaagatgtccggaatcggtgaattgcatcgaattgtagcaaaaggctacaattggatgtaaaagtggacttgaaacatcttaatagcaatccgtcgccataaagaaggcaaagcgtatattttttcccgaggctctcacagccgtctgcgattcaacctgtacagtttttggtcttttagctttggtggtgtgcgtgcctgagataaataaatacgggccagtcaaagcagtgttcgtgtgcgggactgcaaatatctgtacaaagcaaaagaacgtaaatggtggcgcttaaattgtgaataaaaaggaaaaatcagttcgctcttagttctgacggcagcaatttgcgggcctattaaaacccggaatcatggttaaaggacgtcgaactcgccaaaccaacccaacgggtcatctactcacatcttcttccgcagtcgacgacacagccagtcctaaacgcaaagatttcaagttcgacaatttgtcacatttcaccagcaatgatacatctgcggccgctccaatggttctacgcggaggtcgtaccaagattaatggaattgctaaatatctgacgaccggtaaaccttcggctccgatagaaagtaaatcatcatccacagcacacaatttcatcgatcttaccgatgataatacgtgtgattcgttcgagaatgtggccagcggaagtggaaacgccttgggaggacttggttttagcatgattcaaagcaatccggcaagcaacattttcctgcaggaaccggtgcttagtttgaatttcgacaagacgcccacagacaagtcccgcatggtcattaaaaactcgttcctgtcaactgaaatccaaagtaaattctcgccacccaaatgcgacccgatgtggggaagtgccgctgcatcagtatcaatcaaaatcgaagcgtcggattacgcactggacttgtccaaaccgacacaagtaacggaaattgactcgacgacgttcctaaatcaagacagcaattcatgtgatagcggtgacagcggagtggtcatcttgccaacaggcaccctggagtcggtgggatcggccgacgggaagcgtcgaaaaccagcaactccgcatcgcattctgtgcccatcgccggtgaagaatccactcgtggctagcccgtctacggcactggcacacttgaacattcagagcaagaggaccacccggaggaacgtgaaatccaagcgaaggcttcacgtaaaagaatcggaaaacgcgctggaagaatcggaagtgatcagttcagtcgatatcaatattctgacaaccacgaccactgagttggataagaaaaagccggtcttgaacgattcggtcaatcctactgcacagcagaataccaacaataaccaaagcagcaaacaaaccgaggttccttcagctgtgaccacaaatgtcggcaaacacagcggtgaggcaggaaccaacacaaagctgaccgatttcttccaagtacgacgaagtgtgagaaaaaccaaaaaagaagttcaatgggaacgggaccgcgatattgaaaaggctattcgcgaacagcgggaatctggtttgaagattcaacactttgaagagaagggacgtggaataataacgacaaggccgttcatgaagggcgaatttgtagtggagtacatcggcgatcttataacagtctcagaagcgaaagaaagagaacagatttatgccgaagacgacaacaccggatgttatatgtattacttcaagcacaaaaatgtgcagcactgcatcgacgccaccgccgagagtggaaaactagggcgtcttgttaatcactctaggaacggcaatcttatgaccaaaacggtttccctgaataaccgacctcacctagtgttaatagccaaagaagatattgcggaaggcgtggaagtgacttacgattacggtgatcgttctaaggaagctttgcagcaccatccctggttggcgttctagagacgtgcccctaccggtcgtaggcaaccctataaagctttttcctattcaaatcgagcaaaaccatatttcagagccaaccacccgccatatagttttgtgctgaaatgatgaatgagcaggaaacagcgaaatactgtaagcattttgatgttcctttcaattcccaattatggtacgaaaacaatagtccacattctagcagggatactcttgggaaacgaaacaaacaactactttatctcgtgcactgtaaataatttaattctaagcagacagtgatgctaaagacagtacagatcatcaaattaatccattttacagaaaaaaatgcataatgctctttactgaagagatttgttggaatgcaaacacttgatttttacagtgaatgtctagatatggctaaattatgtgtcattttttcattttccttttactttttccatatgctttgctgcgtttgtgataatagataaaaaatatcatactttaaacacaataataaaacaggatgaatcttccaacatcaattcattagcaatctcatcatatgtcaaaaactaagttgctcaagggcagctctttcaatgccgtacctacaaagtccccaagaaaatagatggaatgcagccttaacacaattcaaatgaccagttaagtgttcaatacgtactttcactattgttaactgagaattttctgcatcaattggctattttttgcattttgtatattgtgcggcaagcacaaaagatattctttgtacaatgggaaatcaagttttcttggaccgaaccgggattcgaaccttgattgtgcttgtacttatgctgcaaagtcaatgaaaaaaagttgacttgcacgtatttgactgacattggcgtctatcaaatcatgagtttattctacgagtggaataaaggtaagaaaaagtaatatcgactcgaatgaagaacgctcaaacaattactcctctcagtcgagttttgtcacttatcaggggagagctcactagggaagtgagaaatatcgatctcaacaaggtgacaattaagttctaaccctcgactcgaacgtgcacagagcgtccagtggaacgacgagacatttcattctggacgcctctcattcgagtcgagtttggtcacgtgtgagaccgagatttctcgcctcactccactcttaagctatcagaacactatagcaaatattgggcttggattgatacagacccaaacaaatgtttgacaactctaagattttgtcagtgttgaaaccaatgttggtctgttggtttatgcctagccaaatatttgcacattcggcaaagcgtgtactgatagctttagaattcgaataaataaatagcaaataagcccaggccaagccatggattcccacacgctcaagggccaactacgattaagtgtttccatcgtggagtggaaagagaatcttaaaatgcatcatgatatcttagacgcaatattgtttcattatgaccttctctagtgaagtttaggggatgtgtagcagtatccaagaagtcttcaaaatcgagttccagcgccgttaccgtatgctggattctagttgcaacgtaaagaggtgtggtttcactctacctagacaccattcgccgaatatttttttcattgctttcgtactaagttactagcccactgaaaactgccgtactttacacgggtcataatattcgcttctctatacatttgatataactcgtaattaatacgtgtgcagcatacatcattttctaatcttcgggcgcaccttgatgagttcagcattggcattctcaatctcgctcaacgagggggctggttggtcagcagtcagcatcattcaggtgtttattgaagtgctgatactacctttctatcaccttaatcttcttctttgttcttatgtaacgtatccaccgctacagagtttgattcccaatttctagttcttatgatcacttccacagttattaactgagagctttcttt

SEQ ID NO: 984 - DNA, 1128 bp, Aedes aegypti
atgaatggacaaacaatgtttagtatggcccgtgcgcctttgaaatcgagcttttcgatcaactcgattctgccggaaactgcgatgacgacttcgccggcacatacgccatctccttcgcctcattcgtgccattcgccaatcggatcggaagaacaggatcatgatctgaccgataccgagtcggatttggatgttaccggaacgccgccgccaatggattgcagcaataaagaaaagtcagatgaaaatgaagatggtgcctcaagtcccaaggacggtgaaaagaagggtaatgaaaaacctccatacagttacaatgcgcttatcatgatggccatccggcaaagtgctgaaaagcgtctaacgctaaatgggatctacgagtatattatgcgaaacttcccatactaccgggataacaagcaaggctggcagaactcgatccggcacaatcttagtttgaacaagtgctttgtgaaagtgcctcgccattacgacgatcccggcaagggtaactactggatgctggatccctctgcagaagatgtattcatcggtggatctaccggaaaacttcgccgtcgttcaaccgccgcatcccgaagccgtctagctgccttcaagcgatcactagttgggccaatgttcccgactctgggctattctcagttcaaccaattcatgtatccgtcgcctgcccatgcacaaacggccctgttggcccaaatgtactcaaggtatgccccatatgcaccaagtatagcaccgaagcctgccctgccacttccgctaccattatccgtcggtgcaccaggattcggcatggatcgactgttagccgccggggttgcacctcagcttacgcatcaaggaatctccccgcatcaacaagcacaagctgaactctaccaaagacttcagtaccagcaactcctccagcaccatgctgcccaggcccaggctcaagcggctcacatgcagcagctaagtcctacggaaaatcatcaacagcactcacccaccctgccgaatcagcctccttcagcaaccaatagtttatcgcatcaaccacaaggatcgccgacgggaccgaccatcttcaagccaatcccaaggcatagctga

SEQ ID NO: 985 - DNA, 3267 bp, Aedes aegypti
tttcactaacacaacatctctcccccgcagtcgcaaaacatcaccaatcaacccctcataaaccgtacagcatttcccattgcgtaaaggaaaaacgatgggttatcgtagcacatgctcacgcacacaaccaaaagccaaccaccccgcacgacgatgacacaatcaccaaccgttcgaaagtcgcaatatttcccatgccgaaccctgcgcatttcacccatcctccaccacactttccatctacatacggacaccaccacagtgaccaagaaggaaaaactcgactttccatcggacgactccattttctcgttttctcgcgactcctcacgtacgacaccagaaggctccctcaggacgacgacggttcggggaccgaaagactgaaagtacctgaaggcccctgattcgcgattcggagtttcccgacctgcaacccaattggcaactcgggactggtgcagaagatggtgatggtgattgagtgttgtggcaccaccatcagaagcagaagcagcagcagcagcagagaactttgcagtcgtggagacggtcgcttctagtgccccggaagcaggagaagaaagcaggaaaatgaatccagaaacatgagaatctagtcaaatacagcatcagcgatctaccaaaactaaactaagcttaacaaaccaaaaatacaagacataacgagagagagagagaccggagctcggtgtcgcaattcgaccaaaacgtgtaatatggagcaatgcaataacgatcgtccctgtgtgatcagcagcgggaactttttcccgaatggagcgccgaatcagcaacataaccacaacaacaataacaataataacaacaacaacaagcaaaggcagcatcagcatcaacacccgcaccactccccgcctccgatcagcaagcacctgacgcaaaagcatgacccaaacctgcacagtccgaccaacgatcagtcgtcacttggcgaaatcgaggtgatcttggtccaacagcacaagcaggacgcgctttcggtgatcattcacccgcaggagggcatgcagcagatcaacatgtgcttgagcggttccggaaatcccggttcggtggactcgatcatgtcgtcggacttccaaaccctgtcgccgatgcacgatcgggactcgcctgttagtatcagtgcaaatacgtcgtacgccacgttgaccccgttgcaacccctgccacccatatcgaccatgtcggacaagttcgcgtattctataggaggcaatatctgtgagccatttccagggatgaacaacagttccgtcggggtgaatatcgagatcaactcgtgctacaacctggaaaaactgggcgtgatccattcgcctgtacacatcaactcggtccaggagctgtctcccacggacatccatcatcacgggttagacaagaatcacgtcctgaaggacgccaagctggaccacctttcggataaggacgtggacgtggcggacggtaaaaacgagtgtatcctggtacgtgcctctccgattccctcgaatctcagctcagtggacgatcgctttctgacgtcggcggcgaagccggatcttggccgacagaaggacgacaccgaccagttcaccagtacagtgcaatatctggatcatccgagcgattcggatgtgatccacggtggtggcgtgggaggacccggcggggccggatccagcgtcaaagatcaccaccattcgaccgtttttctcaacaagtctttcagttcaaaagcaaacataagcgaccttaatctgtgtaaagaaattgttatagatgatgtttacgaagagtccgacttggaccacgtcaagctggaggagaagaagctagaagattcgctgaccggagggcaccattcgtcgctaacgaacggaggtggcaagtgtggttcgatgggtgacgtcggctgcatgaatggggacgttgaggagatcaacaccaaggagctggcccatcggatcagttcggagctgaagcgctacagcatcccgcaggccatctttgcgcagcgagtcctctgtcgatcacagggcacgctgtccgatctgctccgaaatccgaaaccgtggtccaagctcaagtccggccgggaaaccttccggcgaatgtacaaatggatccaggagcccgagtaccagaggatgtccgccctcaggctagcagcaactcaatcggcgaaaccagtgaacgctaaaaagcacgaggaaccggaaccgcagagcgtcatgatgggacactcgaagaaaccgcggctagtgttcaccgatctgcagagaaggacgcttcaggcgatattcaaagaaactaagagaccttcaaaggagatgcaggtgacgattgcccggcagctcggtctggaaccgaccacggtgggaaacttcttcatgaacgcccggcgccgatcgatggacaagtggaaggacgaatcgatgaaagcggcccgaaacggaggcggaggaggaggaggaagcagtgggctgtcgggactcggaatgatgggcggcggcggaagtaacagtagtagcaacgataaccttatcctggagcacctgaaagacgactcgtcggacgacgcactcggcggttacgatagttcgtttgcgtccgatggcggcccgatggaacataactatcagcagcacgttctcaactaataaattaattatttaatttcaattcaatatggacgcccagtcgcgactcacacacacacacagtcacaaagcagcaaaggcaagccagtgtagcaaaatgggggaagagcggtcgaaacggtcgacggaaacggtggacggaggagaattaaataaattcacacgcgaaaaaaaaacaaataaggaaatgcaaacgctagctaaataaaaaatcacaacaatatgaggaaaacaagaaaacacatttagtaggattaatcagagtactacaagaaaaaaaaaataagaaaaaaagtaacaaaaaatcgtaggtgtgtggctattcacgaaagcttgtgagaaacagaacaaaaaagtaaataatgaaaatacaagtaactgagtaaggattagtaggttttctttgcattttaaaccaaatttaatttaatttaaattattaactgaagaagtaaaggaaaacaaaatctagtctgttctttcgaaaaacaaaataagtactaagacaaacactgtacatgtactgtaaagttgaaccctatcattaaatgatttcaaatactgaaaaaagtaa

SEQ ID NO: 986 - DNA, 1357 bp, Aedes aegypti; identical to SEQ ID NO: 433

SEQ ID NO: 987 - DNA, 762 bp, Aedes aegypti
cagcaaagagacctaaccagtttgtttcgattagcaaagtccctcaatgccgtcgaaatgctgcaagttggaggtcggatcggatcatcttcactttccacccaaacattccagtacctgattgtgatcgatttcgaggccacctgttggccggcagaagatgcccaaaaatggaagaaaaatgaaatcatcgaatttccggcagtgctactgaacctgtccaacggacaaatcgagtctgaattccgccagttcgtgatgcccatcgaaaatccgcggttgagcgatttctgcatccagctgacgggcattcgccaagaccaggtcgaaaacggcgttcctctgcacacatgcttgtccttgttcgacagatggctcaagaagaatgtcctcggcgaccgggggctgattctaccgaagatggcccccagcaatcctaccggaaccgttgctttcgccacgtggaccgattgggatttgggatcatgcttgaccaaagagtgcacgaggaagaagatcaacaaggcgggctacttcgatcagtggatcgatgttcgcgccatctataagacattttaccagcacaacccaaagagttttgcggacgctttaaccacgcttggaatgcgattcgaagggcgtcctcacagtggaatggacgactcgaagaacattgcgcgggtggttgccaaaatgcgtcgcgaaggtgccaactttattatcaccaaagatttaaggccatttgagctgctcaataaatag

SEQ ID NO: 988 - DNA, 489 bp, Aedes aegypti
atgaccgaaaacggaccagtcgaacctgcggccactaccaaagatgtgaaaaacatcgaaacgcaattgaggatcgtaaacgagacttgcagcagcaagattgatgcgagagaagctaaaataccgaaacggacacagcacgaacaaggacatctacaagctctatcaaatcggaaccagcgctacgatatacatgaaactatgtccggcttggagtcatatgtgaacacaaccgtttccatcataacagccgatggtcgaaatttcgttggcactctcaaaggattcgaccaaaccatcaacatcattctggacgaatcacatgagcgggtatactcaatgaatgccggcatagagcaagtagtgctgggcctacacatcatccgcggggacaatgttgctgtaatcggccaactggacgagagcatagacagcaaattggacttttctacaatacgcggattgccactagaaccagtggttcactga

SEQ ID NO: 989 - DNA, 1352 bp, Aedes aegypti
atcgatagtgtttcgaagtgtgtttagtattttcactgaaattgcaaacgtttattgataattttgttgaaaaaagtgaaaaatgggctcaaagcgcaagaatatggaggacgaaatgtcccgctttgaggcggaaatttcaaaggcaaccggtccctccagcggaattagctccaacccgttcatcccatcccaagtgcgcaccgttatcggttcccagacgtacaatcaggtgcagcaaaagttagccaccgtgccaacccgtattccacccccaccggttcctccgtttttgccaacctattcgacgcctgttccgcagcaacactcttcccagcagcattctgccgttccggaaaaatcgtacaacacagaacctacgccggcggtcgtcagcagtgccccaaaactatacaacgccaggccaacggttggcaccctgcccaaagtggatgcgcccgcggctgccagcagttccatagggccgaccatatcgtcgactccggtgcaatcgtacgatatcgcaaatatacagtttgaagtgacgactaaaattaaaaagcagaaaacggaaaaatccggcccgaatcctattgccgaagaagccatcaaggcagcgcgtgcttcatccgctctgcagtcgtttggcaattctgaccgccggggtaaaaaggaccgaaagacggtgcgcgtagccggtggccaaacgtgggaggatcaatcccttggggactggcccgatgacgatttccgaattttctgcggcgatttgggcaacgacgtgaatgatgaattgttgacgcgcaccttcaacaagttcccttcgttccagcgcgccaaagtgatacgagataagcgaacgagcaaaagcaaaggctatggttttgtgagctttaaagacccgcaggatttcattcgggctatgaaggagatggacggtcgctacgttggcagccgtcccatcaagctacgtaagagcacttggaaaaatcggagtatcgaagcggtccggaagaaggataaagaaaaacaagcacttcttagcctgttcaatcaaagttaggcttgttcggcgattgaagtggctcgagtttgtgtgaatcagtggtaagtgtcctaatttcatacacaatctaggtatacaaattgatagttttacaaattgtcttgcttttatttccacattgattattcctctacatttacttactattttgtcataatttatccattatctgttccatagagccttcagatactccaatatatgtattgcgttctcaattaactttaagtcaagacaaatcgttatgatatgaagttagaataaatcttgactctttcatttgagt

SEQ ID NO: 990 - DNA, 831 bp, Aedes aegypti
atgaactcatttaataaacttaaaccccttgccagtagtgtcggtttgatttcccgtaattatgcattcaaatcggacttgaaaattaagtgggttcggccggagaaaattccatgctacaagccgcaaaagagtggcgatatgctgccaatgcgaccgattgccggttcggaactgctgaaggatttccggatgtccaaggagctggaaagtgcggatgacacagttaaggcaatgttctccctggatcataaccgcagacgggaaatgctggaaaactttaaggaggaaatggtgaaacgagttcagcggcatgaactggattacggctcgattgaagccaagttgggtctgatgactgcgcaaattagaagcctccaggaagtgatggaaaaattccctcgacaatcggctgctaaggtccatctgaaggaactaatcgataagaggaagcgttttctgagatatttgagacgttgggactacaggagatttgagtacatacttgaaaaattagacctggtgtacaagccgtatcctacgcactttcattggattacccgaaaggattctcttcgtaagctgaccgacattcactgcgacgatataaagaacactcgtctgcaaaactatcgccagctgctggaatctcaacagttggacttcctcgcgaagaagctagaaaacttggaattcattcggaaggagcagatcgagtgcaaagttcccgtcacggtcagtgtggaacaaattcaggcggtgaaaaagcaatacggagagctgaaggaaaagcgaaaactgatggaagaaaaaacgcaagaggaagaatga

SEQ ID NO: 991 - DNA, 435 bp, Aedes aegypti
cagtcaacaaaaatcctcactgagaagaaaagcacccttattttacgctggaaaaaaacgaatcgcagcccaaaatcaatcaaaatggtattcgccaaatcgtgggaagatttcgagatcgccgccgagaacatgtacatcgcgaacccgtgccagtgccggtttacgatgaagtacacccaccagaagacggccgtcgtcctgaagctgaccgacaacgtcaagtgcgtgcagttcaaaaccgaggtgctgtcggacctgaagagaatagagaaattcaccggcaacctgatgtggctgatggcgtccaaggagtgaaacggggtgttatgttctttaatttttaatatgctaagtgtggatttttcttgttgggtgcatgtgaggaatgtaacagtggattttatgtgagaaatacatattccgtacatgtac

SEQ ID NO: 992 - DNA, 1212 bp, Aedes aegypti
atgttcgttcctagtgaagatcccgtaaaaagtgaatttctctcggaagaagaagatgatgaaccggaagccgcacccaaaagaaaacgtatgaaacgtggcagcaagaagtcaacccagaaagcaatacaatacaactgcgatcaatgtccggaggttttccaggaccaactgttgatggttgcgcacaggcgaggccacgccggtttaacgccattctattgcgaaacttgcgagagggagttccccactctcttggaaacgaaactgcattacgccgagcagcatacgcagcagaagacttgggactgcgatcaccctgactgtacggagcaatttgccagtcatcaagctttgaggcagcacaagatcaaggtccacgatccgaactacaccaaaccgcagcccagggtcagtatatgcgaagcgtgtggcgattcgttcgataacagtcagaaactccgacggcacagatatgccgttcacgaaacggaggaaaagccttacatgtgtgagatttgcttcctgaggttctctctgccacacaagctcaaaaagcacatgctgcgccacgaaaacattcggagccacgtgtgtccgtactgcggagtggcaaaggtgaccaaaggcgagttggtgtcgcatataaagaatgtccattcgaaggagcggggattgagtgaccaagtggcctgtgacggacagcacgcggatattgccgccgccaccagtgccgaagaaattacgttccttaaagagaaacctaagaaggatactgatcgaattcgtaacgtgaggaagatcaaccggaacaacggcaaagcgtacgtccggaaggataacgttctggtggagggtaagtcctttcaggagcggttcgactgcgggtgtcccaaaaactgcaagggtaacttcgcgtccgaggctattctggagcagtttttcggctcgttttggaaccttggcgattggcacaagcagaatgccctcgtggcggatcaggtcaagggggtggacgtgaatcggcaccggccgcggtccgaacttaatccgcgctcggagcggaccctgcagttccagtattttattccgagcgagcaggataacgtgcgggtttgccagaagtactttttgggtatactgcagattagcgccggacggctgtacaaatgtttgggtaggaaaagtccgaataaaaaacggaagtgaagt

SEQ ID NO: 993 - DNA, 605 bp, Aedes aegypti
ttttgtttaatggtgtgtttgacgtttctctgcattcgagacaaaaaaaaacgcgaacaacgcgaccggaatcgttttgagtgctgttgatattcattgcattttaatttaaaactggatttgtacgtaaaatcaatattataatgctgttctattcatttttcaaatcgctggttgggaaggatgtggttgtcgagctgaaaaatgacctcagcatttgtggcactctccattccgtggatcaatatctcaatatcaaattgaccgatatcagtgttaccgatccggagaaatatccccacatgttatccgtgaagaattgtttcatccggggatcagttgtccggtatgtgcaacttccgggcgatgaagttgatactcagctgttgcaggacgccgcccggaaagaagccgttacgagtgttcggtaaaataagttagccattgggagtgcataatatatcatcgaaaaatataaaatgaagttcattcgtacttgcgcttcgggctggtagacgagtcacttttttgtgtctgatgtgaatgacggatgatgttataaaatcaacacatcgcttctacaatggacctttgcacgagttcac

SEQ ID NO: 994 - DNA, 5964 bp, Aedes aegypti
atggctgagttttcacaatcaatgttcctgggagaaaataccctggaccgaatagaaaagcaagccacaaacaaacagcgcaacaaaccggaacagctttcgacaccgcctccatcaacttccggagcggccaacaggcgaacgacccgttccagtcaggccgtcaaacgccacagtagcgatgagcaaggactagaagtgattgaagaatcgcccaccaataacgcgactcggttcggtggcggtggaggggacgttactcgccagaaaagtgtccgcgagcgcttgaaaaccatcggaacacagtcacggtcgtcgcgatcccggaaggctttccgccggaacaagtccgattcggtcgtgtcgaaggtgggggtggctgggcttcagtgttcgaaggcaagaagtgaaagtagggaccatctggatatgatcgattcggaactgttgaagagcgatgtgtgcttcaatgggttgtccggggttcccgtggagcaagtggaagcgaagggagcacagaagacggaaataaacatctcgaaactgttggagtcggatttaagctttgaagtgccgaaactgatcggacaacataatggccagcgaagccccccggatgccaaagtatcaagaagaagcgatgagtttgaggacatgttcggaaatacagatttttccgtggatttacatccacgtagtcagagtttggtaaactcctatcgagactcaaagccctacgataacatgttcgagcagagtgcttttaccttagaagttccggaggaaccgaaagcagcagaaccgcaaatgacgagccacttccgagaagctgctgaagatgaagagttgagagagttctcagagttgcaagaatcgcttcgcgttgatccgaacgattcggatctccagatttcttcggaacgtttggaaatccctttgtccatcgagaatgttacgtttgcacatttaccttcggtagaaggtttggaattggtacaacaagaaatggacaaatttgtatccaacagaattgagcagtccagatcatcaatggttcaagtcccaacaaagcctcaatccggaagtctcagcaaaacgctttccatgacgcaaagtcacacttttccgtcgcagatacctttcaaaccaagcactgcaaacactcgacccgagccaccatccaacggttcaatgtccctggactcgtcgaaaaatcttcgcctggtgtcgaactggggtctgccggatcccatagcgaaagcttacgccagaaaaggcatcaccgagctgttccagtggcaagcggactgtctttcgaacgccaaagtgatactcgagtgtgccaacctggtctacagtgctcccacttccggtggaaaaactttggttagtgaattcctggtcgccaaggccgtggtcgagaggaagcggaaggcgatcgtgattctgccgtttgtggcggtggcccgggagaagatgttttacttgcaggaaatcctctccccggctggtatccgcgtggaaggcttcttcggtggacacaatcctccgggcggcttcgacagtgtcgacgtggccgtgtgtacgatcgagaaggccaattcgatcgtcaatcgcttactggagcaacgaaagctgggagacgttggactgctcgtggtggatgaaatacatctgatatcggattcgtcgcggggatatattctggaactgttgctgacaaagattcgtttcgcgagtgaaaggctgggcgagcggattcaagtggtggggatgtcggccacgttgcccaacatggaactgctggtggagtggttaggtgcggaacagtttaggaccgactatcgtccaattgaactgaaggagatggtcaagttgggaacttgtgtgtttgataatcagaagaagctgttgaggaagttggatccggatccgtttcaggaaattatgcgggatcaggataacgtggctcagctttgcttggagaccattctggagggttgttcagtgattgtgttctgtccgtccaaggatcggtgcgaacagttggcacttcatctggccgagttcatctatcgaacgttgaaaagtgggggaaacctgggtgaacgtttgcgtcaggagataaaccgggataaattggaggaggcgttagggttgttgaagaactgtccaaccggtttggatgctgtgttggggaaaactgctcgttatggatgtgtgtatcatcatgcaggtcttacggctgacgaaagggacatcattgaaagttctttcaaaagtggaaacctaaggattattgtggcaaccagcacattgagcagtggagtcaatttaccggctaggcgggttataatccggactcctatgttcggtggaagtgtaatgaattcgttgacctatcggcagatgattggaagagctggccgaaagggtcgtgatattctcggagaatcgatcctgatgtgcgacggacaaagttctaaagcagcttgggaattggtaaaaacggaactaaaacccattgcttcctgtctggacggagatggctacagccacctgaaacgcgccatcctggagatcatcgcttccggagtggcgtccagcaccgcagatctggaaagcttcgtcaactgtacgctgttcagttgtgagaaaaagtgccgcttctcgtttaccatagattcactagaacaaaaccatcggcatgtggcgtggtcaaagaaacgcgagtcagacaccaatcatggggagggggagagcatcgatcccatagcgagctgtgtccgtttcctgctagaatacgaattcatccgaatgcaaaccaatgtggaaagtggcgaaacgttgctggtttctaccccgcttggtaatgcatgcctgtcggcttcgatggcacctcgagatgggttcctgttgttcagcgagttgcaaaaatcccgacagtgtttcgtactggaatccgaactgcacgccatttatctggtgacaccatactccgtaagctaccagtggcagaacatcagctgggtagattttctcgagcgttgggagaacatggacgcggcaatgagacgggttggtgagctgataggcattcgagatgcctttttggtgaagggtttgcgcggtaagatcggtgaggctgaccacgaaagtctcatgacgcacaaacgtttctacacggctttggcgttgaagcggcttgtcgacgaggaaccgctgagtgtggtggcccagcaattccagtgctctcggggattactacagagtctacagcaggttgcgtccacatttgctggtatcgtcactgcgttctgcacatcgctcaactggaatttgctggctatgatcatcacacagttcagagaacgcctcttcttcggagtacagccggatcttctcgacctgatgcggatagctagtttgaatggacaacgagcccggttgctattcaatgccggcgtcactgggctcttggagttggccaacagcgatccccttaagatagaacaaatcttgtacaattgtatgagcttcgaaacggaacaacagcgcaaaggcgaggaagaatttgaaacacgacggagactaaatcagcgcaatttgtacgtgacggggagagctgggttgactgttcaagaagcggcacatttgttggtcacggaagctcgacaatatatacagttggagatgggtgtgcgtaatccggattgggaggaaaactctgggagcaaggaagcaaatgaatcgcttccaatggaaaaggttgacagcgaaaacctattctcacctgtacaagctgttgttcaaatagaaacgaaagaaacgtccgcgtctgaacgacgccagcaattgccctcggtagtttctttcgaagtatcggatctggacagcaatagggaaatagagcagctccacaattcacttataatgaacttttcgcacgtgttgagtgatgataaagtgccatctcaacagctaggtggcggtaaatacgatagtttgaacgttgtagacctttgcgtagattcaagtttattcgagaaatttgcagctattttagatcaatccgattctgttagtgtttcttttgctattagtcagtttgatcgttccaagtcagttattggtggtaatttgctgatcaaccaacaagtgaaaacaaatcaagatgaaattgtgcgaaactatccttttctgttcgataacttttatctcagcggagctgcgtttacatttccggaagccggtggagatgattccgaaaatgtagtttattatgtaaatcttcgtaaaagcggtgcagtaaaatgtgatcaaaagaaatcgatgctaggtagattgttggagcgagaaaacgtcaccgttgacatgtacgatgccaaagaacagctgaaggtgatttaccggagtggattgttgtcgctggagcaagaagtgattgctagtctgcgcgatccgaaggtcgcctgttggttgttacaagccgaggagaaggttattccactacaagctatggtccagcaatactgtccggagcttaccacactgtgccaaatggcgggccgttgtccagggtctactggacctagctcaaattacatgagcactatcgatgcaaaaatcagatgcaccgtagagagcttcctcgtgacacacctgatccgcgcccaaataactcagttcgatcagctagatcgaacgcaggagatgctgcccacttttgtgcagcgagaaatgcccatccatggggcactggctcgcatggaactggtgggattcccagccgatgccaacaaattagctcacctaatcgaacggctcaaggtggcccaggagcggatcagtgaacgggttcgaacgttgaacggaggccgccggttgaactttgcgtccaccagtgaggtggccgctgctctgaaagtgccccgcgaacggaacggtagggtgaaaacctgccgacaggtgctggaaaagattgattccccgctggcaacgttggtcattgcgtataggaaaatcgagagcaaccttagtcggacgatcgaaccactgtacagggcaattagggatgggaaacggatctatggtaacagttactgcttcacttctactgggagaatttccatgcatgagcccaatttgcaaaccgtcgtgaaggatttcaaggttgaaatcgaccccggtcatgtcgaggtgttcagctgccgaagtacattcgcctgctctagtccagatcggattcttctatcggcggatttctgccagttggagctgtgcgttctaactcatttgtctcaggaccggaagctcctggcggtgatgaatggcgggaaggacgtctttcgcggaatcgccgccaaatggaatcgaatagaggatgaggccctggtgtcggatgagctgcggaattacaccaaagctatcgtgtatggagtgatctacggaatgggcgccaaatcgatggcggcagaattgaacgtagatgaagacatggcctgcacgctgatggagcagtttcactcgacctatccggaaattcgccggtatgcagataaggtgattcaggtgacaagagaacgaggctatatagaaacgctcaccggtagaaggcgctatcttccggcgattcacagcactgatatgaagaaacggtccgaagcggaacgccaagctgtttgcactacggttcagggttcggcagcggacattctaaagaacgctatcctgagaatgatgcgcaatttgagaaagtaccgtcagacgcttcggcttggacaggttgaactggtgctacatatgcacgatgaactgattttcgaagtgccacgcgatcagtcccgcaaggtggcgaaaattctcaaatctagtatggaaaactgcgcgaagctcagtttgccgctgagggtaaaggtaaaaatgggggccagttggggagaaatgcaggaaactcaagtgtga

SEQ ID NO: 995 - DNA, 807 bp, Aedes aegypti
atgaacattctggggagaatagttcgcacgacgatctactgtagagcaccgctggcagcttccggccatcgatcgattattccaatagcggtaagcagcagcaccaactatcaaattcaatatgcttccaaatcaaccaaagctggtgctggagattcggcaaccgctgagggaaatgctccggccgggacgaagaagcccaaaacggcaccgaaaattaccctcgttggacccgatcacagtgtttcgatcatgaacctggacgaggcgcagaaaatatccaaacggcgcgacctgaagctggtcaaggttgtggacttggatttgaaaactcagcgaccggtgtacaagctcatgaccagtgcggaatacctcgaggaagatttgaaacgccgtgaggaaaagaaacgcaacaagcaggaagcggccatcaaaggggacaagctgctgaccgtcagcgcacggattacggagcacgatctgctgtccaagattcacaacgtgcagaagtggctcaacaagcagtacgaggtgcgggtcatcgtgtctggcgatggggacaaagccaaacaggaatcggtggctagcgcgttcgaaaatcacgtcaaagatctgggcagaattgttcagaagcgcttcagggacaacgatatgcgctttcagattctgcctatcctcaattcttcgaatcaggaaactccccacactgccacgttgaaaaaacccgctcaaaccgggaagaatcccggccccgagcaccaatccgttagggcatttcattcggcatctttcgtgtcggcggcgtga

SEQ ID NO: 996 - DNA, 5444 bp, Aedes aegypti
atggaggacggccatagcaagtccgtcgaagaagtgatcagtcacttccgagtggatccagaacggggtctctctctcgaccaggtcaaggaataccagaagaagtatggacctaatgaactcccagctgaagagggaaaaacaatctggcaattagttctggaacagttcgatgatctgttagttaagattctgctgctggctgctatcatttcctttgtcctcgccctttttgaagaacatgaaggtgttgaagccttcgtggaacccctggtcattttgctcattctgatcgccaacgcttgcgtcggtgtgtggcaggaacgtaatgccgaatccgccatcgaagccctgaaggagtacgagcccgagatgggcaaggtcgtccgtggcgacaagtccggcgtccagaaggtgcgcgccaaggagatcgtgcccggtgacatcgttgaggtgtccgtcggtgacaagatccccgccgatatccgtctgatcaagatctactccaccaccatccgtatcgatcagtccatcctgaccggtgagtccgtgtccgtcatcaagcacaccgatgctatcccggatccccgtgccgtcaaccaggacaagaagaacatcctgttctccggtaccaacgttgccgccggtaaggcccgtggtgttgtcatcggaaccggtctgaacaccgccatcggtaagatccgtaccgagatgtcggaaaccgaggaaatcaagacccccctgcagcagaagctcgatgagttcggtgagcagctgtccaaggttatctctctgatctgtattgccgtctgggccatcaacattggtcacttcaacgatccagctcacggtggctcgtggatcaagggtgccgtctactatttcaagatcgccgtcgctctggctgttgctgccatccctgaaggtctgccagctgtcatcaccacctgtttggctctgggtacccgccgtatggccaagaagaacgccattgtccgctcgctgccatccgtcgaaaccctgggttgtacctcggttatctgctctgataagaccggtacactgaccaccaaccagatgtccgtctcgcgtatgttcgtctttgaaaaggttgaaggcaacgacagcagcttcactgaattcgaaatctccggatccacctacgaaccaattggtgaaatgaccctgaagggccagagagttaaggcctccgactacgaagttctgcaggaagtgggaaccatctgcattatgtgcaatgactctgctattgatttcaacgaagttaagaaggtctttgaaaaggtcggtgaagctactgaaaccgctctgatcgtccttgctgagaagatgaatccattcaacgttaccaagcaaggtttggatcgtcgctcggctgctatctgcgtccgtcaggaaatcgaaaccaagtggaagaaagaattcaccctggaattctctcgcgatcgtaaatccatgtccagctactgtactccactcaaggcctccaagcttggaaccggaccaaaactgttctgtaagggtgctcctgaaggtgtcctggatcgttgtactcatgcccgtgtcggatctaccaaggtgccactgactcagactctgaagaaccgcatcttggatctgactcgccagtatggtaccggtcgcgataccctccgttgcttggccctggctaccgctgataacccaatgaagcctgatgatatggatctgaacgattcgaccaagttctacacttatgaagtcaacctaaccttcgtcggtgttgttggtatgcttgatcccccacgtaaggaagtcttggactcgatcgctcgttgccgtgctgctggtattcgcgttattgtcatcactggtgacaacaaggctactgctgaagctatctgccgtcgtattggcgtgttcactgaggatgaagacaccaccggcaagtcttactccggacgtgaattcgatgatctgccagtcagcgaacagcgtgaggcctgcgcccgtgctcgtctgttctcccgtgtcgaacccgcccacaagtccaagatcgttgaatacctgcaaagcatgaacgaaatctccgctatgactggtgacggtgtcaacgacgcccctgctctgaagaaggccgaaatcggtattgctatgggttctggtaccgctgtcgccaagtccgcctccgagatggtgttggctgacgataacttctcctccattgtcgccgccgtcgaggaaggtcgtgccatctacaacaacatgaagcagttcatccgttatctgatttcttccaacatcggtgaggtcgtgtccatctttttgaccgctgcccttggtctgccagaagctctgatcccagtccagctgctgtgggtaaacttggttactgacggtctgccagctactgctcttggcttcaacccaccagatctcgatatcatggagaaaccaccacgtaaggctgatgaaggtctgatctccggctggctgttcttccgttacatggctattggtggttatgtcggtgccgctaccgtcggtggtgctgcctggtggttcatgttttctgaccacggcccacagctgacctactggcagctgactcaccatctgtcctgcattgctggtggagaagaattcaagggaatcgactgcaagatcttcactgacccacatccaatgaccatggctctgtctgttctggttaccattgagatgttgaacgccatgaacagcttgtctgagaaccagtctctggtcactatgccaccatggtcgaacttgtggctcattggatccatgtgcctgtcgttcgctctacacttcgtcattctgcacgtcgatgttctttccaccgtgttccaggtcaccccactgaacggagacgaatggatcactgtgatgaagttctcgctgccagttgtgctgctagatgaaatcctgaagttcgtcgccagaaggatctccgacgtcaaccccgagttccattaaatcaccactccagaaagcttaacaagcttcctatcgtttcatccagttcaactgttcatcacaccaaatattccctccagaactaagaaaatctacagccaccttgaaccccacgcgcaaattacaacgtctatgatgcatgcttcaaccaaagtaaaacatcctattttccccgtacctatgctaccatctatttctgtgtcgcgtgcatctcgtgctgcactggtgttcggagaacaggatacatcgagtgcaaaggaaggactaggaaccggccgtcgaagcgcggggttttaaggcagacatccttggctatcgcgagttctcgaccaatggtttctgtttccgtctaacaaacaactatacacagggaaacagatccttaagccaagatctaaccagactcggatatagccagaccctttccttttatttgtgttatctcatgcttcatcgacctcgttctgtgtttgtgctgttgttgttcctttaccaacaatgaagaacctgatgaatactatacaacaaccctacgccatccttactgctaacctttaacgtcaatcaaccccacaaactgtttgccatcgtacagcgacgaattagaattatattaaaatgttttttaatgagtgatataattctaagcagataaacgacaaactaaggaaacaagtaaagttatttattttaaattattctatagataatttatcccccaaacacacagacgaacttatctcataccccccatattgaacgcttatccgacgtttgtttcactatcaaatcccatttccttaatttcaaatctcgaataatatttcaaaacgcttcaattcatcatactgttgcaagccacgccctctcgttctgaaaaccgatcggacgaaacgactgtaacggacttaccttggcttgcaacgatccaaaagcttccattaaaatttttccatgcttttttttttgtctttcgaaacccttttaccaacgaccaattttgattgctactgtttgttatgtttaagtgactgagacggtttggcgcgttacgccccaaactattcgacagccgttaatctgcgcacaataaacttaattgtcttttctcttttttccattctataccctgtaggcgaaattaaaaaatgggactaagaagctctagtggcttttaacatctgctagtactcgacaaaatcgtgtttctttcagcaaacaagaaaccaacgcaaaaatgcaataataaatgaataaaaaaaagtcgaaacaataaaaaaaacaaaaaccaacaccaaatcgttatttattaaatctaggaaggaaacctacatctgtttctcctactaggaagtattaaaaccgaatatcaaaaatcaaatgttaaatatcaaatgtctggttttcaacaactaatccaaaggataaaatgagttgaatttcctttttttctcgttttacttaaggctaaattcgaattatctacaccaaagtgaaaaaaatactacaatacatttagtgagcgtgttccaatcaaaagtatcgaaaaagttttgccgaagttttcttaacatttcaccgtagatcagaaccagaccatttgaagttaatatccctggggtagagtagaacaacagcgacttttacttttttctagtgaaaatgaacaattgaagacatttttctctcatttattaatgcttaagtttcatttcctcgaattgtatctttatatactgtcttttcagttgatcttttgttgaacccttttcaaatatttatgttaccttatgtccttttagtttatttattatttttataaaatacgagacaatgtaaataagataattaaataaagtgaacaaaggttgaaaagagagacatcatcttcttgttgagttgtagtcgtcgaaattacacttaaaaagttagatatttacaaaaggaataaacttaatttaataaaagtaaaaaaaaaacattgtgtgacgttgaccgccatctttaattttatgtcatttcatctttgtttaaataaacaagtataaaacaagttaaagtttcacgaaaatgaacaataaaaatcgttaaaaccatctgcctatatctttatctcgtcgaagcttcttcagtcgtcccagtttatctgtttgataagatttgttttcccgctttttggtacctgaattggttcaaacaactattcgagattcagtttgcaagacagatctccaacaacgcgtgttaggatagaaggataccgtccagccagtgatcgtggattgggaacgtttgtcactcgtactacattgtgtagtgttgtgatgaacaggaaaactgaaggatcgacacaaacggcactcgtggctaaatagagatgtttagtttgataaacttgtttttgaataaacattgattgaataaagaaacagtcggagataattatg

SEQ ID NO: 997 - DNA, 3522 bp, Aedes aegypti
atggaaaaatggggtgataacttcggggaagaactgtgggacctggctcaaaccatgacgaaggctagcgaaatcacgcagaaatacaaagcatacaatgcccgggtggagcacaaggacggcaccagtctgatcaaatctatcgtggataatgtcggccggatgttgatccgcaagatggacgccatcaagtgcatcatcaacatggccgagcagttgtccgaggagttcgagttcaacgaaaccatcgcgggcaacttcacgtactattcgagcaagtattcgaatatcgatggtcgacctgagcccaacataccgtcgtcgttggaggagaacatctggatgtaccggaatatgtatttgaatccagatacgcacttcttcaacatctcggtgaacacgtcgtacagctcggtgcacgtgccccagaacgtgtacgaccggtacccgtgggtgatggaagctctccaatggtccgaagcgttggacgacgtgttcatgcagaactacaactcggatccggcgctgtcgtggcagtattttggttcctacacgggtattctgaggcattatccggcgttggagtgggaccgacggcaggtggatacattcgactgtagaaagcggtcgtggtacattgaaacggccacctgctcgaaagacattgtgattttgctcgataattccggttcgatgaccggctatcgtaactacatagctcaattaactgttaaaagtatactagatacgttttccaataacgattttatcaacatctataagtactcgaacgacgtagatcctttagtggattgtttcgcggatatgctgattcaagcaactccggagaacattcgatttatgaatgaaaaggttcgaggacttgaaccagatggctatgccaatgtcaagaaagccttcgtgaaggcttttgagctgttacaacattaccgtgagatgcgaaggtgcaacgagacggttagtggttgcaaccaggccatcatgttgatcactgatggagtgcccagtaacataaccgacgtgttcgagcagtacaattggttcgaaaatggaaccaaaattccggtgcgagtgttcacttaccttcttggacgggaagtgaccaaagtgcgggaaatccaatggatggcttgtttgaatcgaggccattactcacacatccaatcgttggatgaagtacaggaagaggtgctgaagtacgtaactgtgatagcaacgcctttggttctgcaaggcgttgaacatcctccgacatggacccatgcgttcacggatacagcggaaaatcttcagtcggatgcagacgacgatgaaccacctcggttgatgattgcagtcggtgcaccagcattcgatcggaaagcgaatcattataatgaaactcggacggcacgactgcttggagtagcgggaacggatattcctctcgaagatctggatgatcagacgctgccttacaagcttggagtaaacggatactctttcatcgtgagtaacaacggatacgtggtaatgcatccagatcttcgacctgtttacaaaggtcgtctcaaggagaactacaacagtatagatttaacagaaatcgagcaagtactgaacgatatcatggaagcctcggacgaaactttgacgggacgtgaagtgaatccgcaaatggaagctctcagagaaaacttggtcttttcgaaatcgggcaagatgttgaaggttccggttcggtttcattacgataaaatgcggcgagtgtcgctggaatatcaggactattactacgaacccttggagaacactccattctcgttgggtttagtgctgccccatgattacggcaatacatggattaaggttggagatgagatcaaacgaaaccagcatatgggactgaacatatccgactttttcgttggagagaattggaaacttcatccggattggatctactgcaaataccactacctggagggccacgagttcaaaaccccggaggatgagctgcgccactttttggtgcggctttacgaaccgaactggaaatggttccagcagtatgagtccgagccggacgatatcgaaaaagatggtgacgaaccgaactgtggtagaaaaacgctggacgatgatgcttactattgcaataaggagctagttcagctgttggtatttgacgcgaaggtgacaaacaccagctaccggaattgggagtttgagaatgaaaatgagcgaagaatcattgatatgtacaacgccacgctacgcttcgttgcaactatgagtggccttacgaggtggcagtttatttttggggaggttgaagtagattctgacaacgagttcggtgactatcacaaaaaagccatcgacgagacttggtacagaagcgccatcttgcagcacaaaattgatccgaaaagtttcgtgtattcggtggctcacgcttcggacgaaccggaagacgaagaactgaaagttaccgcgtcgatgggcatctttcctagagatggaggttttgaaacaccaggctgtgtaacgggattccaattttcgcatcagctgatgtacgagcgcttcatggaaattacgtcgagaacaacatgtgatggctgcatagaaacttgcaattcggaaagccgtgattgttacgtaatcgaccacaacgggtatgtggttttgtcggagacctacaacgatacgggtcgatttttcggcgaaattcaaggcgcaattatgcaatcgatggtggacaaggaaatcttctccatgataacggtatttgacctgcaagggctgtgcgaccatgaacgagtagctcagaacgatggtttctcgttgatgcatcccttacgagcactgatgctgggaataaactggctgatagcggagttcttcataactttatcgaagtttgacttctgggtgcatggcattcctagtcctgaatacgattatgacaccggagttgagtacgaagacaccgactatggtgacatgtcacgacccaagccgaagaagcctctggtagatgaagaagaggagtattttaaccgtcccaaggaaatcaaaatggaaactgtgtacgaagcgtgcgacaaaaagtccaacctgtacgttatgcagcaggacaagttcatcaagggtgacggattcttctacgaatcagaaccggtcaatcctatggaactgttgcaccgaccgtactttgccaaacgggttccacgttcgaatttactgatggtcatcgtcgaaagtgagtatccatcggaccatgtgattctgtcggcggctccccaaaacgtcatgcacaatgggagtcaggcgcttccgtgcgtgaaaacaaggctaaactttttaccccgccgacggctggaggaatgctacaccgagcatcctgacgaggacatagtggctcagtgtggcgaagcctccatgccaacaattcaactgactgtagtgatatcgtccctagtatcacttttgttatatcgatgtgcccaaatgtag

SEQ ID NO: 998 - DNA, 1790 bp, Aedes aegypti
cggacaaccgcatgtgcgcatcatctgacatctcccgccgcaggtaacgcctccgtcccaacacccggtcgggcaccctgcgcatcgcagttacataagacaagtggagaaaattttcctagccctccgcacagtcgccgaaatgttgtcctcgctgagaaatgtgctaagtaccggttcccgggtccaggccgacctcgtccggaactatgcggccaaggcagcagccaaggccgccgctggagcccaaggtaaggtcgttgccgtcatcggtgccgtcgtcgacgtgcagttcgatgataacctaccaccgattctgaacgccctggaagtccaggagcgtggctcccgtctggtgctggaagtggcccagcatctgggagagaacaccgtccgtacgattgccatggacggtaccgaaggtttggtgcgtggacagcgcgtcttggataccggatctcccatccgtattccggtcggtgctgaaaccctgggccgtatcatcaacgtcatcggtgaacccatcgatgaacgtggccccattgaaaccaacctgtccgccccaatccacgccgaagcccccgagttcatcgacatgagcgtcgagcaggaaattctggtcaccggaattaaggtcgtcgatctgctggccccgtacgccaagggtggtaagatcggtctgttcggtggtgccggagtcggtaagactgtgttgattatggaactgattaacaacgtcgccaaggcccatggtggttactctgtgttcgccggagtcggagaacgtacccgtgaaggaaacgatctgtacaatgaaatgattgaaggtggtgtcatttccctgaaggacaagacctccaaggtcgctctggtgtacggacagatgaacgagccccccggcgcccgtgcccgtgtcgctctgactggattgaccgttgccgagtacttccgtgatcaggaaggacaggatgtgctgctcttcattgacaacattttccgtttcacccaagctggttctgaggtatctgccctgctgggtcgtatcccatctgctgtcggttaccaaccaaccctggccactgacatgggtagcatgcaggaacgtattaccactaccaagaagggatccatcacctccgtgcaggctatctatgtgccagctgacgatttgaccgatcctgccccagccactactttcgctcacttggacgccaccactgtattgtcccgtgccatcgctgagttgggtatctacccggctgtggatcctctggattccacctctcgtatcatggacccgaacatcattggtgccgagcactacaacatcgctcgtggtgtccagaagatcctccaggattacaagtcgctgcaggatatcattgctatcctgggtatggatgaattgtctgaggaggacaagctgaccgtggcccgtgcccgtaagattcagcgtttcctgtcgcagccattccaggtcgctgaggtgttcaccggtcacgccggaaagctggtccctctggaggaaaccatcaagggcttcaccaagatcctgaacggcgagctggaccatttgcccgaggtcgctttctacatggttggtccgatcgaggaagtcgtcgagaaggccgaacgtttggcgaaggaagccgcctaaggggctttcgaaattgtgctggaagaaagttattacccattacataataaaaaatcgaagtaaatttaccataagcgaaacatgtaacaaacaaagaaaaagttaaataaaaatcggaaaatattacataatc

SEQ ID NO: 999 - DNA, 2444 bp, Aedes aegypti
gcacggtagacgcgaacggaacggaatcggtattcaatcgagcagagaattcgctgcagtaaattaccgcaatcgagcacggttcattgggttggctacgggcacaacattatcagcttatcggacgcttgtcggggatgtgagttgagcagtttgcagaatgcctcaataaggctgattgtttgtgaatttcatgttggatgaattgcgctacagttgactggaaagttccgaaactcttggaagagacgtgacgatcggtgaagtgctgctagttagataagtgagatgagcaagaagagctataccgtaccggtggcggacgttgaatcgccggatcatcgagatgaccagaaactgctggggaatccgtttgacaagctgccgccgatcatcatcggtggaccggaggggaatggctaccatgcgtttcagcagaagggaagcccggtgacgcccacaactccgatcgtgtacgcccctcgatcgccgtcgctcggaaagagaagtcgagcattccggccgggcacaactcgcaagtaccgcaagcgggccatcctgaagagcggcgagtgtaacatttccacttccaaggtttcgcagcaacacttgcgcttcctgcaggacatcttcacaacccttgtggacgcccaatggcgctggacgctgctcgtgttcgccttcagcttcatcggctcgtggctgttcttcgccgtgatctggtggctgattgcgttcacccatggcgacttggaggagatgcatctgcccgaccatcaagctgaagtcgggtggactccctgcgtgtacaacatcgtgtcgttcacctcgtgctttttgttctcgatcgaaacgcagcacacgatcggctatggtgttcgtacgactacggaggaatgtcccgaggcgatcttcatcatgtgcttccaatcgatctacggagtgatgattcaggcatttatggtgggaatcgtgtttgcgaagatgacccgaccaaagcatcgcacccagacactgctgttctcgaagaacgcggtgatctgtcagagggacggagaactaagcttgatgttccgagttggagatatgcgcaagagtcacatcattggggcaagcattcgggcacagttgatccgaacccggacgactaaggagggcgaaatcttgtctcagtaccagacagagttggacgtaggagcggatggatgtggatcggatttgttcttcatctggccacagatcgttgttcataagatcaacgaaaactcaccgatgtataatatgtgcgcttcggacctactgcaagatagattcgaaattgtggtgattctggaaggtacggttgaatccaccggacagtccacccaagccagatcaagttatgtcaactcggagattttgtggggtcatcgctttgagcccgtggtgttctacaacaaagataaccagggctatgagatcaactacagtaagttcgacgaaacgcagcaggtggacactcctttgtgctctgctcgcgagttggccgaattctacaaaattcaggacgactacagaagcaacgccgaggattcgatccaaacgcctgcttagatgtctaaatgtgctagtgtcgtcgtcgttccctcatgcattgaccggaaaagggtgctttttcatccctcgaacttcctcattcccatctctcctccgactccttcataactcttattccattcaatcccatactccatcccatccaatcgttccaaaccaaacctaaaaatactacagtgcgttgcaaacgaacctcattcactcatttaattctacaaaataatctcgacaacatctcgtccaagacgcttctggagaaacgctggcagcgcaagtacgaaaccctgatgcacagcatcagccaattccacctggaggatgaatcgggctcgatgcgactcagccccttgcctacttacctgaccatccagaacattccacggcgaaatcgatcctacctgcagttggagaacaacttgcgcaatctgttcgattcgccgctaacccatccaccgccgacacctcaggatggaccaccctcgtctacacccccgccggccatcaacgaacctccgggctacgtcgctggtcaaagggcccgaagccgaaccaactcctaaaccaaccaccagggaaagggggagggggatgggcgcacttgggtatgtgtgcgcgtgccctttttgttgagaaagatcttattttacccgtagcgtacattcccaacaactcagtctgtaatcgaatcaaaaagtgctttagctagtaggataacaaattcagtactaaaaatggacgatatcatttagcgtttaagacctaggtaggaaactatgagtattaaccaaccaagagtggagaaaaacaccagacgattaataaatcaagtgatattttaatggtacaag

SEQ ID NO: 1000 - DNA, 2761 bp, Aedes aegypti
gtggtttcgcgatgactgacgactgacggttcggatttgcggatcggtcgtcttcttggtcgcggagtgcttgcgaaaattctacgccagagttgagtgattttttttcctgtggaaatttttccacaatcggagcgcgctggtgattgcacctagattgcaaaagaaacgagctcgattcgcctccgccaaggtagtgattgtgtcgtgaaatcgtcgctgctggtagagcaaaggaggacggaataattccgcggacgagaatcgacgcatctgtttttcctagtggcagcggtgtaattatcgtcccttttgctcaattattcatccatcggaagacgacctcgtcccactgttccaccagggaggaagtttcaaaggaaaagggttgcagacggaggaagggcctgtgtgttatcagattcctcttcttttggagggtcgttttcttatgctggacggaacagaagaagcaccaagaggagaactgtgaagcgattattctcttgggggaaagaggggaggaagactttgattttatctttctgccccaaagacggagagacagaggagaaagagaagaaggcagaaaaataacagaaaggagagagcacgcagagagaggaacactggccacagtttggaaacaatcagaataacataatgatgaacgaggagtcggcccccagtaggaatgtggtgtcacaattcttcaaacgaatttcgcagctgtaccagcttcagttggaccgatggaccccgcacaccaaggtccgatgggtggcggcaatcgtgctgatactgatcttcctgcttcgagtattcaccaaacagggctggtacattgtgacgtacgcactcggaatttaccacctgaatctgtttattgcgttccttacgccgaagatcgacccggccctggatctggatgacgaccagggcccagagttgccgacgagatcgaacgaggaattccgacctttcatccggcggttaccggagttcaagttttggtacgccatcagcaagagcacggtcatcggcatcatctgcaccttcttcgaggcatttaacgtgccggtgttctggccgatcctggtcatgtacttcatcacgctgttctgcatcaccatgaagcggcagattaggcacatgattaagtaccggtacctgccgttcacccacagtaagccccgctaccaggcggtgccgacggaaaagtgacaattaaaagcacaaaccttgccagcatcatccgtttcttcgtcgtcgtcatcgtcgtcctcggtcgcttcatcgtcggaggttgccgccagtactgcttccccagtagttccggccatggcaccaacagcacccgcaacctcaacggtggttccgatcatttcgactgtctaggagaagaataaaaaaccgtacggaaaacaacccaatcaaagaaataagcctccatcgagcaacatgctttcgaacaagcgcaggaaaagtcagaacccttacggccccattttgataagagactcgaggaagatcatccgtttcgttttgctctgatgagtgatttttcgttacacgtagttgcttcgattttgagttgtttttcagttagtaggtatgacgaatggaaacgatgattcagatgggttaatctgaaggagaaaatccgtttcaagaagcccatcaaaggcattgatttgtgcttacgtcgataaaattgtagaaaaccacgatctttttttgttttacactagaaagtatcaaaattatcatttatttcaactaccaaaaacaaaaattctagtttggctccgcgtcgtggtcgcctaacgcaaagcgtgtgtttgtgcgtttgggttaagagttatttcgggtgttacgaaacactcccagcaatagtgattattattatttccaccgcaaaacccccctttattttcgtagttgagtaatgctaggtgaatgttgagttagttcgttttattatttcgtatttaagggcagttccagtatatattttccccctattagtgtagtaggtttagcatcagactttcggcacagagctgttcaataatctttctctgtacatttcttatcacctcatcttttttcctagctagtgtcgtaactgttcaaatattacacaatcggtggtacacaaatgaagtacacacgaagaagtgtagcttcttcaaagttatcaactacccgcagcagataattctaactagattccgttgaaatttgcctttcttgtaaaaagttttgagttttgtgaacagctttttcgccgaggcagcacccattcgagatggtgtgaatacatgcatagaagattcatccgatgaaatgaacgtgaggcggtgaaacaaaaaaagggaacgcaaaactatttgaacaacacaatttaaagtaatctacattgagaaaaaaacattctttagccagaggacaaagcaaacaaaatatacacacacagacacaggaaggtaaaccgtggcaaccagcgcattgtaataagaaaaatcttggataaccaaataaatattacaaaatgaaagatggtttgagttagagagcagaggtttcagtgatgacagtctgaataatttgatcctacttatagttgccataaaagctattggtaaccacgtgtgcagcttcatttctgagcaaatcctcggtggatagagaatgatcttctctttatcatagcattggtctatagcttgtaaatctattcctataaggtaccgtgggg

SEQ ID NO: 1001 - DNA, 4789 bp, Aedes aegypti
caaatacgagctccctctctcaatggtagtgcatacttcggagcaccaattcaaattgcccagataaggccaagcctataaaaggatcgttcgatggctttgcagagctttagtatcgtgcaggtggatcgtagcggagttgtgcctaaaggtagtgtctcgggaattcgaagcagatcgtgaggaataagaagaaaggaagatctcagtggaatccggatttcgttagatgtcctttgaagagttctgtggcggtcccttttgggacggccagaaggaatggcggcaggacaatccggatttgaccttttgcttccaacgagttgccctgcagtgggttccctgtttcttcctgtttgtcttttccctgtacgaagtctacaagtatggcactagccgctaccgagatataccatggaattggttcaacctgtcaaagatgctggtcaattttacgttgatgtgcatgagctggatcgatctgggcatggttgtgacctacaaggacgagcatggcctgttcgacgtccagatcgtgacggcgatatttaacgccatatcttatattgtccttatggtactgatattctttcaacggagatatggcatcagaagctcggggacgatcttcatcttctggttcatgcgaatgttcttcggtatcattcagcttcgaacagaaattcaaaacaagggaattcgtggcgaagtaacgggcgatggcgttaacttttgggagttccaatacatcagctactgcattcagtacgctttcatctgtctaatgttggtggttgagttcttcccggatcaggaaccatcgtacagcgattacccggaatccaagaaaccaagtccggaactgcgatccagctactttgtgcggttgttcttcctgtacttcgactcgttcacgtggcgtggattccgcaatccgcttaccatggacgacatgtacgacatcaacccgcaagatgcgtccgcagagctggtgccaccgttcgacaaatactggtacgaaagcgtggagaagggtcgacacaaacagatggccgccgacaagaaagctggaaagacgaacatcaattacaaaccacactcgcaaaccaacggatccgtgttaccagcgattgtcaaagcgtacggagctccattctggtttgcaggtctgttccagttggcgatctccggactgcagtttgccaatccgtatcttatgcaggaactcatgaagtggatcgctttccatggccccaattggcaaggaattatattgaccttcggcttgttcgcaacatctctgctcatagcgttgttcaacggtcagtacttctacaacaccttcctgaccgggttccgcatccgtactgggctcattagcggtatctatcgtaaggcgcttcggatatcaagctccgcgaaaaaagacaccaccgtaggagagatcgtcaacctcatggcagtggatgcccagcggttcttcgaattgacttcctacttgcacgtcctctggtccggtccggtgatcatcgcgctgtgtatctacctgctgtacgacatcttgggagtggccgtgtttgccgggcttgccgtaatgatcataatgactccggttactggagtgatggccacgcagttgcgcgacctgcaagtcgaacagatgaagatcaaggacgatcgcgtcaagaagatgaacgagattcttggcggaatcaaggtcctcaagctatacgcttgggagaaaagtttccaagattctatcctgaaggtccgaagcaaggaaatcggcatcctcaagaagatggcgtactacggagcgggagtgtacttcacgttcaccattgctccattcctggttacgttggtttcgtttgctgtgtacgtattgattgacgagaacaatcacctcgatgcacaaacggccttcgtttctttggccttgttcaacattctgcgcatgccattgggttggcttccgatgatggtgaccttcgctatgcaggcttgggtgtcgatcaagcgtatcgacaagttcatgaacagcgccgaacttgacccgaataacgttacgcatcacaagagtgataaggcgctgtacattaaggatggatccttctcttggggtgatgaaacgctcatactgaagaacatccatttggcgctgaagaaaggtcagctgtcggcagtggttggcggtgttggaacaggaaagagttcgcttatctctgccttgcttggagaaatggagaagatcaggggttcggttaatacggacggcacgatcgcctacgttcctcagcaagcctggatccagaatgctacgcttcgggacaatattctgttcgggaagtcgttcgaccaaaagaaatacgatcgcgtgattgaatgctgtgctctgaagcctgatctggagatgctcccgggaggagattcaaccgaaatcggcgagaagggtattaacttgtccggtggacagaagcaacgtgtttccttagcccgcgctgtctacgccgacgccgatatctatctgtttgatgatccactgagtgcggtcgatgctcatgttggtaagcatatatttgaacaggtcattggtccacaaggaattcttgtcggaagatcacggctgttggttacgcatggtatctcattcctaccccatgtggaggagatcttcgtcatgaaagatggtgaagtatcggaaagtggttcttatcagcaattgttggatcagaagggcgcgtttgctgaattcctttctcaacacatccaagacttggatgaagaagatgaagaaatccaaatcctccaggaagccctgacggacgaaacttcgaagggtatcgtaaaacgtttagtctccatccgttcgaaccaatccgacgaaggtgtaccccggaaacgcaccagtcgccaggagtcccgttccagcatcaaaaaggatcaaccgcctcaattggctcccaaagcaacgctgatcgagaaggaagaatctgccaccggtgccgtaacgttagccgtctacataaagtacgtcaaggcgattggtctatccctaggtctgtggtcgatcatcttcagcttcatcacccaaggtagtggaatatactccagcatttggttgacggattggtccgaggatcctgaagctatcactgatacgtccgtccgggatatgtacctcggtgtgtacggagccttgggaggaattcaatcgatcgctctgttcatcagctctgttgcgttgggcttgggttgcttgaaggccgccaaggaattgcacgataaacttctcgaaagctctatgaggatgcccatgtctttctttgacaccactcctctgggtcgcatcatcaatcgcttctccaaagacgtagatgtcatggacaacgtccttccggcaaccatccgagcgtggctgtacttcctgttcagcgtcatcggagtgttcgtggttatcggaatttccacaccaattttcttggcagtcgtacctccgttgatcgtgatctactacttcatccagaagatctacattgaaacttccagacagctgaaacgattggagtcagtcacgcggagtccgatctactctcacttcggcgaaagtatcagcggtcaatcgacgattcgtgcctacaacgagcagtctcggttcacgcgcgattctgaggacaaggtcgactacaaccagaaggtatcctacccgactatcatcgccaatcgctggctgggaattcggctggagatcgttggcagtttggtgattttgttcgcggccctgttcgctgttctggcgagggacacaattgggccagctaccgttggtttatccatctcctacgctctgcagatctctgccacgttgagtttcatggtgagaatgacggctgaagtggaaacgaatattgttgctgtggaacgattggaggaatacactgagttgcccagggaagactcctggcagaagggttcagttgacaagagctggccgtcggaaggtaaagtggagttcaaggacttcaagttgcgctacagggaagggttggatctggtggtcaagggaatttctgtgaacgtcaaaggaggcgagaagattggtattgttggaagaacaggtgccggtaaatccagtttgaccttgggtctgttcagaattgtggaagcagctggaggcaaaatcgtcatcgacggggtcgacatttcacagattggtctccaccagctgcgaggtcgtctgacgatcattccgcaggatccggtcctgttctccggaagtctgcgcatgaacgtcgatccgttcggatcctactcggacgaccaagtatggaaagccctcgaactgtctcatctgaagacgttcgtaaaagggctgccagccgggctggagcacgaagtggctgaaaacggagaaaatctctccgtgggtcaacgccaactgatctgcttggctcgagcggttctccggaaaacgaaggtactgattttggacgaagcaaccgctgcggttgacttggaaacggatgacttgattcagaaaacaatccgcacggagtttgccgactgtacaatactgacgattgctcaccgtctcaataccattatcgattccgataaggtattggtgttagataagggtctcgtggctgaatgtgattctccgcagaatttgctcgccgataggagtactattttctacagcatggcgaagaatgcgggtattgttagctagtgagcgtttatgttgatgttgtgggtgtagtaataatgattgatattttatattgct

SEQ ID NO: 1002 - DNA, 2774 bp, Aedes aegypti
aaaaaaaaaaagggtcatctatgtataaaaattaaacttttacactttttgatatttaaatcatgatttcttcatgattctcatcaacggtacattcaaaatctgttttgcaccttcgtctttcatttagctcccttagtcgaaaatacatctacggcggctgacttgtcgtgacgatagcactgcgcaagctcgcatcccaacagaccagctctgtctggcccgtacatgcattggacgattagaatgatgctctctatatccaccagcaaagcaaagcacgaatgaaagtagctcaaactgaggtttcgaggcaactaaatagttgtattggtaaacgtcgattgacagagtgaaaagaagggaataatatattttcagatttttgcccatcagtcaaaaaatatagacagcccgagtgtgtagtgaaaaactaaagatctagtccagtttgtgtgtttttttctgaaaaacgtgaagaattttcgcattttcgtactgtttgtagtgcagaggtgtgtttttttggagttgattcgaagctagacaactagagtctcaaaatgggaaatgaaacgtccttgcccatggaattatgctcaaatttcgacgccgatgagatccgtcgcttgggcaagcgcttcaagaagcttgatttggacaactcaggcgcgttgagcatcgacgagttcatgtccctgccggagctgcagcagaatccactggtgcaacgcgtcatagacatcttcgacgcggacggaaacggcgaagtcgacttcaaggagttcatccagggtgtctcgcagttcagtgtcaagggcgataagctgtcgaagctgaagtttgccttccgaatatacgacatggataatgacggcttcatctccaatggggaattgtttcaggtgctaaaaatgatggtcggaaacaacctgaaagacacccagttgcagcagatagtagacaagacgattgtgttcgccgacaaggacgaggatggtaaaatctcgttcgacgagttctgttccgtggtcggcaataccgatatccacaaaaagatggtcgtcgacgtctaagggaaacccatacatccacacacacacacgtacacacataattataagcatatactgatatatacataaaaatacacttttactttctagcaaaaagaaatcttatttattaagtaaaaaataagcaagagtgtatgtgaacgttgcatctgatgaaaacaggaaaacacaaacgttgtattttttttagttgtttctatgttgtttgctatcaattttttccttattatcataatatgaaaatgtattaacactaaagaaaaggcatagggaataagatctgtcttgtgtgagaaagatttaaaactaaacgtgcgcttgttttcaaagaaaggtgactttttccctcaaaatcaatcacgcaacccaatagtgaaacacaaacataattactactgtgcatttggttgtcgtactgttcatctacggtaatatatttatttatttttttatactggtaatatccactccctctctgttttaacgttcaattcatcggaagtgaaacactatgcaagataaaccaaaagtaccataaaaagtgtgcaattcaaaggcattgctaactattttaacatgcgaatcttaaggcaatatatttaacataaaaatgatagcatgcggctcttctaactgtcacggaccactacaagcacgttgatcgaaaacaaacccaatattggagtatcgctcgctgtaagtacttaatggaacagaaataaaaacaacaagctaaagtaaatcaaaagcatcatcaattactactaatattatacactttcacgcaaacaaacacacacatacactgacataaatatgtaattgtcatccatgcgagaaagctacgttaaatgcaaatttaaattatagaataatttccaacctttatttgtcatagggcttttgagtatgtgaacagttgagagcaaaacaaatagatatttaacaaacttattgccactgttagagattatatcgtatgtcgtgaatgtctagctaatttttccccaaatttaattgtacatgcaaaaccataagtaaaatggacggataaaagaagagtactatcgtagagtcataggttaggagccaatttttctatacactatactgttgttgagtcgaaaacttattatcccgttcatcccgattgaattgcgctgctcccatactgttttataccatccgttgttactaatatgaacaaactttattgattcggaatgaccctcccttttaacgaaccaccgttgattaacgctcttcgtctatcgatttgatagatttagtctcgccaaaaaaacaggtctttctgttaaaaattctccatttttgtaatccataggtcattgaaatgttgttgagcacacgtacacacctactatcgattaacaaagcattaaaataacagcaaacatcggaattttaaaatactacccatcactagttatatactgaatagtcaacattttcttttgtattggcgtgtctgacgacagattggcacgaaataaaaacttgtttcagttgaattgtggctgtcaaagctgatatacaactaaaacatggtttgttgttaatcccaagaaaacaatcccaaacctttgcaccaatcaatccaatccagtgcaatgaatcggaaaacaatgctgtttgctcgcaatagaaaaaaaaaaacaaatgtgcaatcaactccct

SEQ ID NO: 1003 - DNA, 1476 bp, Aedes aegypti
gcaattctgtcatcgacgggtggtggcgttaatttaatattggcgatagtggcaactaagctgggaggtttcatttcccagggaaaagcggaatacgtgcgaaggaaaccttgtgtaattgtttcctgataagtcgtgcgatctcttggagtttccgaagaagcgagatccggaatcaaccttcggtggataagtgggaagaaatcagtgtgactcatcccaggttttccagttcaagtttggcagcaaatcgtccaaaaccgagcagcagcgacaatgttgatcaaagagtttcgagtgacgttgcccctaacggtagaagagtatcaagttgcacagctctactcagtggcggaggtgtcgaaaaatgaaaccggaggcggcgagggaatagaagtgctcaaaaatgaacccttcaacaactacccactgctgggaggcaaatactcatccggtcagtacacctacaaaatctatcacctggcctcgaaggttcccgccttcatccgactgctagcgcccaagggatcgctggaagtgcacgaggaagcctggaatgcatacccctactgccggacagtcattaccaaccccaaatggatgaaggaaaagatgatgctgatggtggaaacgctgcacgccgaaggcgatggagagatggaaaatgctcatgagctgccaccagagaagctgaaacagcgcgaggtggtacacattgacattgccaacgatccagtgactgccgctgactacaaagaaagcgaagaccctaccaaattcaaatcggtgaaaaccggccgaggaccgctggtcggcccggactggaagaagaaggttcagccggtgatgacctgctacaagctagtcacctgcgagttcaagtggttcggactgcagtcgagaatagagaacttcatccagaaatcagagcgaagactgttcacgattttccaccgacaagtattttgctggatggacagctggcacgggctcaccatggaggacatccgtgaactggaggacaagaccaaagaggaactggacaaacagcgtcacgtcggcgaagtgcgcggaatgcgcgctgaaacagactaagccgtcttctagcgtgttttgggaaagcgtcgtttaagaatggtcctggttacttggcataaacaatgggaatgggaaaggaaatacaattggataccggatattataatcgacagtttaacagttgtcttggaaaatacaaaatataataaaaaaaatctaccatgtggctgactcgtaagcggaaaacaacagtaattatacaatgaatgaaacaattacaactatagcaacagaggtacacacatactggtatagtcacacctacagcaggtgcactacacatacacataagatagtcagaagcaggaatccatatagacactcggaagaacacacaaacacacacttaacaacagaagaataacacaaacacacgaa

SEQ ID NO: 1004 - DNA, 1560 bp, Aedes aegypti
atggcgtcgatagattcgcaggcgaaaaaccgaatgcaaggtttcaaaaacaaaggaaaagaccaggaggaaatgcgaaggcgtcgcaatgaggtcaccgtagaactgcgcaaaaacaaacgcgaagaaaccatcctcaaacgtcgcaacgttccgcagacgacggccgaatcgacagacgaagacgactacacctcgccgtccaatttgagcaaactggtcgagaaggccggaaacagtgacgacaaagacgaacagctggccgcagtccaggcggctcgacgcttgctctcatcggaccggaatcctccgatcgattccttgatacagagtggcattttgccgattctggtgcgttgcctcgaacgggacgacaatcagttgctacagtttgaagctgcttgggcgctgacaaatatcgcatcgggaacctcggcgcaaaccaaccaggttgtacgtgctggagcagttccgctcttcctgcgtttgctcggatcgcccgctgccaacgtctgcgaacaggctgtctgggccttgggcaacattatcggtgatggtccctgtcttcgagattacgtcatcaaactgggcgtcgttcagccgcttttatcgttcatcaagccagaaattccaattccgttcctgcgcaatgtcacatgggtgatcgtgaacctgtgtcgcaacaaggacccaccgccaccagtggacacaatactggagattctgccggcgttgaacatgctgatccaccacaccgatattaacatcctggtagacaccgtgtgggctctgagctatctcaccgacggaggcaacgaacagatccagctggtcatcgacagtggcgtggtaccgaaattgatccccctgctatcccacgtcgaagtcaaagtgcagacggcagcgcttcgggcggttggaaacattgttaccggttcagatgatcagacgcaggttgtgctcaattgcgatgctctgtctcacttccccgcgctgctgagccatccgaaggacaaaattcgcaaggaagcggtctggttcctgtcgaacatcaccgccggcaaccaaacgcaggtgcaggccgtcatcgatgccggattgttgcccaagatcatcgagaacctgagcaagggtgaattccaaacgcagaaggaagcggcctgggcgatcagtaacctgacgatcagcggcaaccgcgatcaggtggcacagctcatccgggacggtgccatcccaccattctgcgacttgctgacgtgcaaggacacgcaagtcatcaatgtcatcctggacggaattaacaacatgctgaagttggctggaccgcacacggaggaaatcgccaacatgatcgaggaatgcgacggtgtgtcgaagatcgaggttctgcaaaatcacgagaacatcgaaatctacaagctggcgtacgatattatcgagcagtttttctcggacgacaccgatgaagcagtgctagacgagctgagacctgcggcggatgagaacgcgttccagttcaaccagaacgccaacgtacccagggatggattcaacttctaa

SEQ ID NO: 1005 - DNA, 3044 bp, Aedes aegypti
actcgagcacgcccggctgcatggcgatgaccacgaggattcctttccggatatacaaccgatggatgacgacgaggacggggaggaagaggaggatgaggacgatgaggataacggaaacgagttcatcaccatcaatgtcaccaacgagcagggtgtcaacaaggagctggagcacatcaaggagaagaaggaaattccgaagcctcacgtgcatcacctggcggggcactacatcggcaacattactccaccgaagcacgaggacatcgacaccggacaaaaccacctggacgaggatcatcccttccgcaagtactccaagatcatctgtctgttcatcacgtggatggtgatcatcgcttttctggtagtcaaagacgaaaaactggtccacgccaagcaactgtcgattccggccggcaaaactaggccctacatcctgcccaagttgccactcagttccaaggttaagttctcctttgaggggacgtttctcagtgagcaatacaccaacattacggagcactatttgaccatttacttgcaatcgctcacgtcgactctggagggtaatgatagtgaactgctgaattcggattctgtgcacaatattagcgatccctggcacgtacccatcgtccatccatatctgtttgacagtgccccgatcattaagaagcagcacagcttcgatatcagcgataacaatttcgagcggattcatgcgcagagtagcgcagtccggatgatggtaaagagcaatataaaggctagcttcccaattagtgtgaagtatgatcaaagtcccgtcaatcgcgacattggagtgatctacgctgcgtttgtgttgattttcctgtacgctttgatcatctgggaggtggttcatcggacgtttgcggcagtgatcgcatcgacactggccatctcgatcctggcggctctggatgatcggcccacgatggaggacattgtcggttggatcgatgtggagacgatcctgttgctgttttcgatgatgatcttggtggccatcctggcagagacgggcatttttgactttttggctgtttatatctataagattaccaacggtaaaatttggaacctaattcactgtttatgcatatgtactactctgatctcttctttcctggacaatgtaactacggtgctcttgatggctccaataactataagattatgcgaggtcatggacatgaatccggtaccggtgttgatggccattaccgtccacgccaacatcggaggaacgatgaccccggtgggcgatccaccaaacatcatcatcacgtcgaaccagtacattttgaaacacggtgttacatttttaacctttactgctcacatgatggttggcgtgatcattgtcgtaattgccacgaacatccatctccggttgaagtacaagaacatcaacaaccttcggatgcacgagcccaaggaactgaaggagctgcgacggaacatcaaggtttgggaacgggctgctggcaagattcccccgtattcgaaggatgccaatatcgtgcgggaaacgttgatgaagaaggttcggctgttacggcatgagctgaagaagaaaatgaccaaaggcagcgtgccggaggatctgtaccggacgaccttggaggaactgcagaaggaacaccccatcaagaacaagggactgctgataaagtccggagtggtgtgcgccttcatcatttcgctgttcttcctcgagtccatcccggaacttcggcgaatgtcttctgggtgggcagcgttgctgggtgtgatgctcctgctgatcatctccgataaaaacgacatggacgccgttctgtcgcgtatcgaatggccaacactgctcttctttgctgccatgttcacgctgatggaggccgttgaacggatgggactgatcgactggatcggtcatgctacggagtcaattatccaatcggtatcggaggatctaaggctggcggtggccataataattattctgtggatttcggccctaacatcggcttttgtggatagcattccggtgacggctatgatggtcaagatcgtggtggctctgtcggagaagtcgaccctaggccttcctctgcaaccgctggtttgggccttggctttcggtccttgtttgggaggcaacggaacactggttggtgcttcagccaacgtgatttgcgctggaatagcggaacagcacggctatcggttcagtttcatggactattttaaacttggattccccatcatgttggttagtgtgatagtaacgacaggatatcttatcatggctcacgtagtgttcgcctggcattgagaatgcacccctctgaacctgttggacccggtttgaaaccaataacaacacatctaagccaaaacgctccaaaaaacccacaccgtttgtacgtcgctaaaagtgaaccacaatccatccctgggatgacaagtcatttgtatttataactgcattattaaccactttataggaagtaagtaagcagaaacaacagtgctgttaagtgttctagtgctacttttctatgttgtcataagcttagtttcacgtacatatgttatcgaaaatgtccggttttcgaattgcctctctgaaatttttttctctctgtccgtgtagtcacctatgtttgtcagtcagagtaagtgaaagttttagtatgatacgaaagttgtagttcaataaattatgccaatcaataggtggacaaaatacagttgatgcatccgaaatccttttctggtgttttgcttatttcaagcatgcgatattttggaatacagtctcatcatatcagcacctatgccactaggttttcctctatatcaatagtccgtatatcgattccaatgaggtccacaaagccaatggctcgaccattttatacattcatcatgtggcacgcatgaaaaaacaacattgggacattacattaagaattactaaatgaaattcgaatgtttgggatattacatcaagaattacataataaaaa

SEQ ID NO: 1006 - DNA, 5095 bp, Aedes aegypti
agtgtgatttcgttcgtcatcaagcaaagaggttcgccgtgagaaagccattcgcgagttttattgtttcggttcgtccaaattcccattagtcacaaacggtaacatcctttctccagaaacaatttgttcgcgaatttttttcatatctagcacagcatcacgcaattgaaggaaggaaaatagtgaaatccaaatcccgttgtgaagtgttctgaattttcgattgaaactcgcaaagtggaatagcgagaaagagtgcgagtgtgaaataaaaacgcagtgaaaagcaaaaaaaatcggaaacagttgcagcaaaagcaaaattattgtgtgccagcgagcagccttctacaacacacgcaatatctctgtacatagatccatcggccagagcaaaccaaccaatcatccagaggtgcagcattgaaagtaagcaattaaacagcaagcagcaattcacaagaaacagagaagaagagtggttttgattttctacgaggtcaagaattttgcgttacacccacccaccaatcaatttaaagaacaacattgaacggtttctttgcggagtctgcctctgccaggagtaagctagaaacttctctgcattcttttttacttttcggtttacttctgttgtgacacgactcgcaatgttttaccgttgactgttaagtgctcctctctgctttttagttgtttgccagttatgactaaggtgccgaaatcgtgttgaaaactgagctgagtgttattttcttttcaattcccatataaataaccacccacatacgttccagtgtgctacagagtggtagtgtatcagtgttacaattaagccgaagagaataagtttcctgtgacagcgaaatcagaaaattgataacctaatcagaaaaatcgtgagtgtatcgtattattggtaccgtatagcaaacactatcaactgcagcattagcagcttaaataatcactagagagctacaatacctacaacgtttgcgccatcccataaccagtagacgaccttagcagcacaatcattccatcacgatgaaacgaaacgacacgcaaatgaatgtcgctggcatacggcgaaacatcaaaaatcttgcacacaactattctgatgctcaggtcaaagtgcgggaggcgacctccaacgatccatggggtccctcgtcgaccattatggcagaaattgccgatctaacatacaacgtggtagccttctcggagattatgcaaatgatttggaagcgaaccaacgaccatggcaaaaattggcgccacgtttacaaggcactgctgctgctggagtatctcatcaaaacaggcaccgaaaaggtggcacaacaatgcaaggaaaacatatacgccatccagacgctaaaggatttccaatacgtggaagagggcaaagaccagggaatgcacgtgcgagaaaaggccaaacagttggtgtcgctgctgaaagacgacgaacggttgaaaaatgaacgtgcgagggcgttgaaggcaaaggaacgcttcgcccggacggccagtggattcggttccgatggttccatcgatgggccaaccaccagagatgctcgccctccgaactggggcgaaggagaaccaaccggtcggccggtgtcggaaatcgaatttgtcaggccgcagacggtgggagaggaagaactgcagcttcagctggccatggctatgtcgcgcgaagaggccgagcaggaagaacaaaaacgaagaagcgatgatgtgcggttgcagttggcactgagccagagtgagcaggattttaaacatgatactaaaccagccgatagtgccctggtcgatttgctggacatttcgtttggggcagccagtatttccagtccatcacagcagcctggtccttctacgagtaccgatccctggggattaccggttgccggaggatcgaggccacagacttctgacccatggtcacggacgtcctctccgccggtggtcgatccctggctgaacagtgcttcggcacttccaccacccgcatcgagaccaccggtggcagccgccggcgtcggattggatgcttgggctccggcgcgaactcactcaccctcggtcacatcgggctcatctgtggaaggttggctccagaatggaaccggtgccggagcgatagcccccgctggaacaaatggaaacgtcgatccgtggcttaagacgtctgctcccagtgcgagtgaaccgtggcaggctaaaagaactacaccagtgcctacggctgatccttggcaggctcctagctcaaatccagccaaacaagatccatgggcaccagtgggagatggagctttcccgctgcctgcacatcgaccatccccagtgggagctattacctcgccagcctcggacctcgatgagtttgatataatcaccaaaaggagtaataacagcaatgcagtcaacaacaatcttaacaacaatggtttatcgttactggacgacctggacccgctatcgtcgagcaacacctccagttcagccagcaattcaactccctcggcaacagcgacgacaacgaagaaaacacctgcctcgttcctcggcgaaaactcctcgctggtcaatctggataacctcatcaaaccggtgacgacggcaccgggggcaggagcgcctggagcgccagcctacaatcccttcggtgatgcagcgcctgtgcagaaaaacctgttccaacagaatcaaccacaggttccgtccataaatcagctgaaacagtcgccgttcccagtgacgctcaatcaggatccgtgggcaccagttaatcctgctactgcggcgcaaaacaacatcaacaacaatgccccctggatgaatccgcagtcatcgaatccattcctatcgtaagactaatgcgccaacactatagcagaaccatagaaaccaaccaatagcaattttactagatccgaaacacagacaactggcagggaacaacataagagcgaagaatcgtgtagtatcacgactgaatacaacgatagaaagcggaaacccaggttacttattacgatgcaaaatgaaaagcgtatatccgaaaaaatctatgttgatcagagtaaattttagtttccaaaactgtagatatgattgtaaatcaatagtgactaaaaataaagcgactttctttgccctcaaactcttcaaaagcacactacctacaacaactaggaaaaaagagccctgatagaaaccaaaccaaactctcgtagtaaacagctaaattactaatagaacagaaaaccgtggaaaatcataaatgccttactaagtgttaaaatgaacataaggagaataaaattagataacctaaacgactgttgataacaaaaaaagaacaactaattgggatgagctctagaaactcatttctgacatttttgagctaacaagcccaactacatacaaagataagaagtgtatgtgcatatatgtaggcgcacttctggtgtaatgaaaaaaaaagtttttacggcttatcataaaactcaattttgaaccttttttctaacaaaatcaaataaaaataaaatatacttcttttgtgaatgtgatatctgttaccacacatacatgcagttgaaaaaaaaactgtggaattaaaaaaagaaaacaatttgctagaaatttgaacactatgagtagaatactctgtttggaaataaagagattaggtatgtgaacctttcagtgctgcccttgacgatatgcggtaatcggctacctacaatcttcactccacaaacgtggttacaaccaacaataccgcgaggaaaattgcaatagctaattaaggttaatcgaaacacccgtatctgccaatggataggcatcataggggcaacatttgaatagcacatatgctatatttcattaaaactccaacaagagtagagattttgtgcgtcggagagtgtcaaatagaagttggtactatttttggatggttttctattttaatagtttcaatcaaaactaatcccatagtaagattttctacgtatgtttctgatgatggtttcaactggattaattgctttaaacttgtggaaaaggtcgtgggtagtagaggagatagtaggtatttgaatttctgcgttactttatcgggtggatcaaagtaggcttcgcttttgtgcctgtaatgtctcactagaggaaaaaggggaataaatcaaagtaaccatttgagctttagttgtaaactacagaaacaaatacgaggacgtcgaagttagatgagaatgctacgaatactggttatcatgaaaagtattgtgacgaataaacgaatgagggatcattatatttctgtttacttgtactgtgggaatgtaagcaacatttactgctactatttatttgaaaataatatagcaattattaacgtggtatgtaaagtatacaagcatcattcaaaccaatcttgatacaaatattttttttttccaaaaaaaactgctttacttgtaacaattaataggttttttttttattacaagaaaaaaacaattctaattttgaattggacagacattatgcacatattacataatcctgaaattgacattttaacttcccccgtttgtaaaactcttcggtgataatgcttgaacaattgcagaattacgtaatttgtgcccgatgacttttctacgagtaaagatatacacatactctgctgaacagatgaataaacaaccgaagcaatagttttttttccgttggcatctcgttttttggtttccatttcgtctcttgaaactaagcatcagataggcttggagttgtaacaaaacaaaaaagaaacaaggtcagaggtttattttttgcttactgcaattaactaattctaagagcagcagaacacacatttcaatttcgattgaacactgagacgacacccaagaggaagagataaaactggaagaatgtatagagttaaaagattatttagaacggaagaatgaaattatatatattttataaaataaatcgaactgatttcaatacatgtccaacggacagtacggca

SEQ ID NO: 1007 - DNA, 3995 bp, Aedes aegypti
cattacgatattcaacatattttttatgagttttttttaactttcttcaaaactgaagacaatattcaagccactaagcttgaatatgcatgtagcacagagagaagcaaaacattatggtatatcaaccatcaaccaagcgcccccattagtttgccatattgcaaggcggcgcatgttcggtaatgaaatggatgacacacgcgatcccctccagtacggctatcagcgtgtcaacaccggagaaggatctctttccacatcgaccacgggcaccagcttggatacgatcgtgttggatacgaacgccgaagacctgaacagtacccctcgggtgggagcccagcgcaccttcagtcccatcttggaaacggacgacacgaatccgttcctggatccgccgccaccgggccagaagtctccgccggcagtgggcgaagcgaaggccaagagcaaatcctcactcaaggggtcgcgggtttccttcgaccaggaggaccggttcgatgaaaccgatgagggctttcgcaagcagcgggagcacttccagaagcacaaaagccacagtacctccgagcacaagaatcagctgattaaggagctccggcatctgctcgctgccgacaaccgccgccagttccagggcaaaaagcatgtttccctggacgtccaaagttccaaggtgctcgaggagctgctgaaagcgtcgtcctccgaggacgacttcgagggccagcgcaaacagttccaggagcggaagcacaagagcctcgacgctcgacacatttcgttcaagttcgagaaggaaccgacgccgtccagcagtgaagaagacttcgaaccgtcgacctcgttgctcaagatagacgccgatatcacaaagcccgttatcatcgacttgaaagtaaaccgagcgcagtccgatcaagccttgacgcaatttcaaaaaaatcttgcccattttcaggacctagaatcgagcgaggacgaagattacatttcctcgcggaaacatttccaacaggcgaagtcgatgagtaccgactcgcgcaaaagcaacaaaagcatacgtttcttcgagatggaaatgggcactaaggaagaaaatattcggaccgccgttcccttcgtgcgacaaatcacggaggacggcaagccaaagctcgaagtgtaccgaccgaccaccaatccgatcttcatctggactcaggtcttggcagcactatcggtatcgcttggttccatggttgtaggattctcgtcagcttacacctcgccggcgctggtgtctatgaaggatcgcaacattacgtcgttcgaagtaacggatcagtcgggttcatgggtcggcggaattatgcccttggccggtcttgctggcggtatccttggcggaccgctgatcgagtaccttggtaggaagaacaccatcctggcaacggccactccattcatcatttcctggctgctgattgcatgtgccacccacgttgcgatggttctggtcggtcgtgctttgtctggattctccgttggtgttgcgtcattatctttgcctgtatacttgggtgagacagtgcagccagaggtacgaggaacacttggactgcttccaacggctttcggtaacatcggtattcttctgtgcttcgttgccggaaagtacatggactggtcaggattggcgttcctgggagcggctttaccaataccattcctgttgctgatgttcctcatccccgagacacctcgttggtatgtttcacgaggacgtgatgatcgagctcggaaggccctgcagtggctccgaggtaagaaagctgacgtagatccagaactgaagggcatcatcaagtctcatcaggatgcggaacgacatgcatctcaaagtgctatgcttgatctaatgaagaaggcaaacttgaaacccctgctcatttcgcttggcttgatgttcttccaacagctatccggtatcaacgccgtcattttctacaccgtgcagatcttccaggatgctggatcaacgatcgatgaaaatctgtgcacaatcattgtcggtgttgtcaacttcatagccacgttcatcgccaccatgcttatcgatcgattaggtaggaagatgctgttgtacatctccgacgtggccatgatcattaccctaatgacgcttggtggcttcttctatgtgaagaatagcggacaagacgtttcacaagtcggttggttgcctctggcagcattcgtgatatacgttcttggcttctcgttaggatttggtcccatcccatggttgatgatgggtgaaatcctgcccggaaagatccgaggatcggccgcatcagttgcaacggccttcaactggtcctgtactttcattgtcacaaagacgttcgcagatatcatcaatgccatcggaacgcacggtaccttctggatgtttggatccatttgtgtgatcggtttagcgtttgtgatattctacgtgccagagacgcagggcaaatccctggaggacattgagcgaaagatgatgggccgcgtccgacgaatgagctcggtggccaacatcaagccgctgtcgttcaacatgtagaaatatgttaccactctcagtgagaatgatcgcggattagtcttcaattgttagtaggataatgccagtcggatggtacgctcgagatagggataaatcagaacccacgaacagccatagcaaagcatgctaattgctccttagtaaaccgtgcctagaatgttcaactttagcatccttactcggagggttaaaattgcgagatttaagattagacaaacaaacaagagattttttgtgataaaaccaagagaacgaaatccagacagtgtccctcatagaggaatggttgacaaacattgacaaacggaagtaacataaatcacgcaatagttcaaaactaatcaacgttagtctagttgctgccggcacaaaaatgcatcatatgatgattgatagatggatttgcgaaaacttattccgtgttttacacggaaatcactaaaatttgctagatgaaaataatgagattgagaggcagctaggaacgaaagtagtgaagtatccatgtatatatttttcaaacgatagaactcagttccttttcgaagataatttctttatttttaactatgtaatgcttggacgctatagattaataaggtagacagaaaaccgcttcatgacaaaattggtaccaaaaattaggttatgatttaaacatttacgtcatcccacggaaggctagggaaaatgttttccctgctcgattccaaaagagtgcaagtggtagagcgctggtagacgaatctcaaactgaacatttcgctttgtctagctaagtgatgatttcattattttaatttcatacattaagcataacgaatagcataaatcttatgtatgacacaatgattatttaatgtaaaatattatattgaataaataataatttatacgaataattattgattgcgttattactttgaaattgtgttttgccaaaatcattcgctactgccacatcatcatatcattgatctatcctgagttacatgaaacatgggcgtgaccgggaatagcgaatctcatgctatcaattttcttgttcaataatgaattacacctcagctttgattctcgaactcaagcctaaattactcaagtccgaacatcataggcccgcatagaaaaacttgaatgccgctgctgaatgaaagctgcagcaaactagcatgaaataatagctaactaatagattaggtgagtgggtgctatagataagcatatttgaaatttaccatacatgtcttaggggtcgtcgataaaccacgtgatcattgaaaaatggaggggggtgtcggccaaatgaccacgaaaagccacgctgaagggaaatgggtttagcaaggtcaaccacgtgagcgaaaaaataaatcaaagaaagtgttgttttggc

SEQ ID NO: 1008 - DNA, 5323 bp, Aedes aegypti
tgcttctatgcgggcgcgtttattttctgcggaatctacaacgcattttatttcgagtgtcggaactcgtatctcattctcattctccgatacggaaatctcacgtataacttcgatcatcgatgacatcacacacgcacacttttgcgcttttcattcatgaaactcgactgaaaatcactttcttgctgtgtgtgtgcatgcgtttccttcctttgttgcgtcgcgacgcgcccctcgccccatcaatgatgtgcaccgatgacgatgagaagattttcgtttcggtcgggtcggatgacggaaccaatctccgagcactgattttagtgtgtgagttgccttcgttcggagcagtagtcagtaaataattcctctccctctgtgtggaagaggaaactcgctcggccataggtttagagagggtgcaaaaaaaatctttatctttagcaaaacggagaaacacgcaatagaataagcagctcggtgctcggtcggaagtttaaaactttttcgcgagtgaaatcctcccggggaggatcggaaaagtgcagattttggctgccgaaggctggaaaaatctggaatctggacagacctccagcagcggagtggaaattttcagctccgtgtggctgctgaaccagtcccagtaggcctgagaaaaaaaaacggggcgtttacgtggtgatctagtaagccgaactttgggtgcaggtgaccgtcgtcgagggctacagtgtggtcggaggaaagtgcttccgtctcgttgagtacctgcagttgaggatcattgggcccgtttcccggacggaacttcggttcggatcgaaaaggctgaaaaagaaagatgggaaccttggtggccgataatggtattcatcagacggaattgttgtctatcgagtcgttggtgaacgagttctaccatccgggtacgtccaatgccagaaaacacacgatcgaaggtcagctacagcagtttcagcgatcgccacatgcatgggctctgtgcctgcagcatctggttcagtttaacaatcagtacttttggttcttcaatgtttctaccgtggaagtaaccatcagccaacgatgggtatcactggatgaaaacaatcgagcacaaatccgggactctctatggacgacgtatgcggggttttcgcatgacattccgggtatgcagcgagataaggtcgcacagttgatcgccttgatcgggaagcgacagttcccggaagagcatccggattatatgaaccaggtactggagctgctgaaaagcaagttcatcctaggcgtaaccctgctgcgatcgacgtccgatgaaatcaccagcacaaaggccgacatcacaagcgatcgtcaaaagtacctgtcctattgcgtttcaatgtatctcccgtcggtgttcgaaatcctcgagaagtacgctgaactgtgcatcacacgaactagttgtaagaacggaataagcttggcacatctgccgccccctttcggtgacgatgcgcgtgtcgagcaagccaccatggatcttctgctgtgcgttcagcaaatcttctcctgggcacccctcgacaacattacggagccgcacttcttccagagtttgttcatgctcgcgcggtggaatgaggcgttcaacgatgtatccatctcggctttgacgacaatctctgagctattctaccggcagaaacctctaccgttgccgacggtcatagctaccggggtgattgatctcctgcagcagccaacgctcaagttgtccaacgaactgtatcaggacaagctaaccgaactgctgcgactgttcacctcgcagcagtggtccaagtggagcaaggatccccacttcccggccatgtcctatctgaattcgctcttccagtacacgttcttcggctatggagcgttggcatttaccgagcggttgacgatttggacgccgattgtgcagagctttgctgcgatggctgagaacggtgcggtgagcaagcatagcgataagctgatatcgcttgcgtccggaaccatgaagcggatgttgttccagtacgactttgatcagcaactggagatgttggacaacgaggagctggatgacgataacgaaaccgagctgcagcacttcttcaaccagtgcatcgacacgatcgccctcatcgcggagatcgaacccatccgggtgtacgatatggcgttctccgagttcgcatccgatgccagcggtccgtacggccaagtgctgtccactattggcggcatgttgctaaacgggtccagctacatttcacctcggcccgcccatccgctgctggacgaagaaagccgatccgcgctgcggtgcaagttccgtgatttcatttcgctgtgccaaatcattgctcgggttagcccgttgctgcacgaacgctcggagaagatcagcgcctcgatgggacggttgatcgaggatctcgtcaagctggtggagatggtgtcgagcgcctcgggtgatccactggagtacttcttcgtgaacttgcaacccctggccggggagctggcggatgtgatcggacagacgctgatcactttgcgaagtctactgatcgtaacgcacattccatttggggaagccgaaatgatgcattttctcggttgcattccgaggtttttgtcacctccgcagaaggtcaaacgggaccaactgaagacgctgaccagtgcagcggcacagcttttgctcagtgtcagtgccaatctgcggccaaagtaccttgtccagctgatcaaaccgctggtgcatagtgatttgaggcatttagagcgatcgacagcgctaacgatgcggctggccatttgtaattgcttcgtgctaccatgggcggggtgttcggcagcggagcagaacttcgaaggtcgagctgcccttctacaggaatacattgcatttatagccggtgatttgattaggttagatttgggccatacgtttagcagtagtaatccatcgttggactacgggcaggaggagaagatcgtgacggtagccacagtcgtacttagcactctgcgggatctgctggagtactaccaagagcaaagcagttccgtcaagcagatgctagcggccgcataccgacctgtgatagagaaaacgttagccatttacagtgcagccagcagcaagaattgcgtgttgattgagaagatattcgagttttgtctgggaattttgaggaccttacaggtccagttgggccaagtattcttgaagaatattatcctactgttcctggggaagaccaaaacggaacagatcagttcgcagcgtttccgttcgctggtcattttgctcaaaatgttccttctaatcgtagaacaaccaggcaatgcttcgctactgccagacatattgaacttttcgatcgatcacgtactgccgatggtattctcaaacgaattcatgtgcaaaagtgaacaaagtggccatgccgacgttagtttatcgctgtatcagctgttcaacggaatactgctgcaacggtggcagtacttctacaaatcgagtgtgctaaaacagttgactccgagctcttcggggaacattcagcagccacagtcggcgctggaacatccggaacagtttgcggccattatgaatgcttacggtcaggcgatcgtatgcggaaacgatcctcacataacacgtgccactctgcaatcgttggaagcgttaaacgaccggtggaaactttaccagcgggagtttttccgcgagaatctgctgcaatcgttcgaagctgccatcatcaaggctctggtggctccggagggaatattgcactacgagctgtttctggctgtgctgttcagcatgggtcaggtggagacgaagcgactgcacgagacgttcaccgggatcggctttccggcggaatcgcaacaggtcgaggaggtctgcttggcttcggactacccaacctttgctcaccgtatgaaccagctgatacaggacaccaaatgctgccagctgaatggttccgcatcctaatcacgaaacgccatcgccagcagcaaatagcagcgtcgtcgtcttcgtagccattgccgtcgtaattctcgtcacatcgtcgtcagccatcggaacggactttaactttattacatctagaactactaactctctatgtctcattcacatctcccacaaagaaaattttcaaatcaaagtcaagaacaagaccacattggttgagagaaccaatcttttagtcggatgagaaacgcgtggggcagaactgaaattcacgaaaattccatacttttttactaatactaataacgatcgcaacttaagcaaattaaaaacaaacaaaaaacaatcgagagattagagtaaaacgcgcgtcccaggaaaattctaatataataaaattatctaaatcgagtagcgttaatggaatcgaaacacaaatttatcgtataccagggtggtgaaaagcatgctcttctattcgtgtatttgcaaaacacacacacacaaacgccgagattcgaattaaaagttgcgaaagagatctacaaatctagcaagaaaaagcatctatttatgtttcttttaagttgatatttgcttttgaagatcaggtaaaacttgtaaagcgtttatgtcgcgccagctatgtctgcggtagggttagaacacacaatacaccacacacacatcgaggaggtgtcgcaaggccgtgctaattctcctattattgaagcatctaagtcgtaaatatttgatatcatattatcaggattttatttttataataatcaagtgtaacatgtgatattcagaaggattagtttttatggaaaaaatacaatttttgccctagtaccgtcaatcaaaaagagatatgctttatttcgtttcgttttgtcttttcagtctatatgttcgtttgtggcagtttcttcgtttagttctttgtatcaaatctgtgcacaagctttatttatattataatcacaaattttatctctaaaaccgattctttttcgtgctatcaaaatggaattctaatgcgagggagaaggcgaaacaatacagatacatcaggaagtagtattatacacatatggtttcctagaggaatgataaaacaagagaaccacatataaacgagttccccttccccctttgaaatagagtgttagagcataatgaatatattccgcgtaatattttccattgaagataatttccaggaaacttatagcatcctacttctagccgagcaataaaaccaagcggaagctgcatcaataagagtaa

SEQ ID NO: 1009 - DNA, 1980 bp, Aedes aegypti
agcgaaatgttgcgattgccatcgctaatggccaagagcgccctgtccgcggctcgcggactgtcggccgccacgtcaacgcagcgcggattgcatttcaccgtcggccagaacaatgccaaaacgaacccgggtgccatctcgaaggaatacccggtggtagatcacacgtacgatgccgtggtggtcggtgccggcggggccggtctccgtgccgccttcggtctggtggccgaaggcttcaaaacggccgtcattacgaaactgttcccaacccggtcgcacaccgtagcggcccagggtggaatcaacgcagctctggggaacatggaagaggacgactggaagtggcacatgtacgatacggtgaaagggtcggattggctgggagatcaagacgccatccactacatgacccgcgaagccccgaaggccgtcatcgagctggagaactacggtatgccgttttcgcgtacccctgacggtaaaatctaccagcgggcgttcggtggacagagcttgaagtacggaaaaggtggccaggctcatcgttgctgctgcgtggccgatcgaactggacattctctgttgcatacgttgtatggccaatcgttgagctacgattgcaactacttcatcgaatactttgccctggatttgctgatggaaaacggacagtgcgtcggagtgattgctctgaacttggaagacggtagtatccaccgtttccgatccaagaacaccgtgctggccactggaggatatggtcgtgcctacttctcgtgtacctcggctcacacctgtaccggcgatggaactgctatggttgctcgcgctggactgccttcggaggatttggaatttgttcagttccatccgactggaatctacggcgctggttgcctcatcactgaaggttgccgcggtgaaggtggttacctgatcaactcccaaggcgaacgctttatggaacgttatgctccggtggccaaggatttggcatcccgtgatgtcgtgtcccgttcgatgaccatcgaaatccgtgaaggtcgcggctgtcctgaaaaggaccatgtctacctgcagctgcaccatctgcccccagagcagctggcccagcgtctgcctggtatctccgaaactgctatgatctttgctggagtcgatgtgacccgtgaacctattcctgtcctaccaactgtgcattacaatatgggcggagtccccaccaactataagggccaagttctgaccgttgactccagcggtaacgatcacgttgttcccggattgtatgcttgcggagaatctgcatgctcgtcggttcatggcgctaacagactgggtgctaactccctgctggatttggttgtctttggtcgtgcctgtgccaagaccatcgctgcggagaatcgtcccggagaaaagattgccgacatcaagccgaacgccggtgaggcatcggttgccaacttggattgggttcgcaatgccaacggagctgttcctacctcgaccctgcgactgaacatgcagaagaccatgcagacccatgctgcggtgttccgcgaggagaagacactacaggagggtgtccgcaagatggccgacatctacaagaccatcaaggacgttaaggtttcggaccggtcgctggtgtggaactcggatctggtggaaacgttggaactgcagaacctgttgctgaacgccaacatgaccatcacggccgctgagaaccgaaaggaatcgcgtggtgctcatgcccgcgaggattacaagcaccgcgtggacgaatacgactacagcaaacccctggagggccagcagaagaagccagttgaagaacactggcgcaaacacacgctgacctggatcgatccggagacgggtgccgtcaagattgactaccgaccggtcattgatcagaccctgagcgaggaatgcaacaccgtgccaccggccatccgttcgtactaa

SEQ ID NO: 1010 - DNA, 2475 bp, Aedes aegypti
atgaaccacctgccaggatcgtctccgcggtcaccggcgccttcgcccgatccggatgtggacgacggtagcagcaagaagcaagccaccagggttttcaaaaagagctcctccaacggcaaaataacagtctacctaggaaaacgtgatttcgtggaccacataacgcacgtcgatcccatagatggcgtggtgctgatagatccggactacgtgaaagatcgtaaagtgttcggacacgtactggccgccttccgatacgggcgcgaagacttggacgtgctcgggctaacgttccgaaaagacttgtacctggcctccgaacagatcttcccaccgcaggaaacggaccgaccgctgacccggctccaggagcggctgatccgcaaactcggccccaatgcctacccgttctacttcgaagtgccgccacactgtcccgcctcggtgtccctgcagccggcacccggggacaccggcaaaccgtgcggtgtggactacgagctgaaggcctttgtcggcgaaacgcccgaggacaaaccgcacaagcggaattcggtacggttagcgattaggaaaattatgtacgccccctcgaagctgggcgagcagccatcgatcgaggtcagcaaggagtacatactgaaaccaaataaaatccacctggaggcgagtctggacaaggagctttatcaccacggcgaaagtttatcggtgaatgtacatatagcgaataattcgagtaaaacggttaagaaaatcaaagtgtctgtgcggcagttcgcggacatttgcctgttttcgacggcgcagtacaagtgcaccgtggcagaagtcgagtcagaacaagctacagtaaggatacaaacatctaaagccacaaccaatcaggaaccagtggtagaacttcaacccaggattagatccttgactttgatggacgtgattcggacggagcctcaactctcaggaagggacgagttagcaacggagctacccgggcggtggtctcgcaacatggtcgatggaaaatatagaatcgccgatccttcccagcgagagaacctcggcattatcgtgcagtataaagtgaaggttaagctgtgcattacaccgttgggcggtgacctggtggcagagttgccattcatcctgatgcacccgaaaccggacgacgacgaaccgctgatagggggagaacgatcgccaggccgaacgattggcaactcggacaagctgcatccgggagcgggaggggccggcggtggcgcgggaaccggtgccagtgacctgaacaagaacagcaccaaccggggcgacgccagtaaagaggacggccccaatctgatccaactggatggcaaaaaggctaaattggtaatcgaaacggatacgactcaattgtaacacactgacctggccccgattcaaaaccctgaaaccgatcgaaggaaaagaaagcgtaatagcgtaaacaacagccaccattccctttcaccaactatagctatgcgatgtgtgcagtttgtgctaaagctagttctcccatcctgcttcatcctgaccacccacacaaggaggatagctaggaaccacatcacacacaatgcgaggaatgcaggaatcgtcggatgaatcgactaaaacagcataaggcaaattgaatcgcggtgccgttgctcctgccagagataacgatgcatatccgccacaatgggggcggatggtctcttttgcacgaatgcagcagcaagcagtagcaccatccctattagggcggttcaaataattaaaaagtttgaaaattacatctcacatatcttctttacagttcttatgagaaaaatacaaatctgtgaaattttcagaattttaggattggaagttatggaggcctgaaaacgatgtttatagaaaaacagctacatatgaagaaatttcgaaaaatttatcatcgcaaattaaaaactcattctttaaaccaagcttattgtgagattaaaattcagtaatcatagcttgagtaatgaggttcgataattaatactagcatcatatagtagttttatcagcattaaaagttctaatactctagtttcctcatataaattttcataaaaaccttcaacagctttaggcaattttcaaatcctcaacaaagcagctaaaaatttgatagaaatctatttccttaaatatagtaaggaagatatgggaagttgaatgttcaaacttatttgcaagttgaaccaccctaaccatttccacccacacaaaatttgatcactttgaaaattacaccagttgatgcatctgcgtatactgcacttccctgctgttgactgtccttgcattggtattcgatgactataataatcacgttcgtccgtccactctcacgttccgtagctagatacgcattgcgcacattcaggattagtcttcgttgtctatattatgccatcaagggtacat

SEQ ID NO: 1011 - DNA, 5406 bp, Aedes aegypti
atgtcgcaggctctcccgattcgtttccaggagcatttgcagctcaccaacatcaacatcaatccgagctcaatctccttcaccaacctgactatggaatccgacaagtttatctgcgtccgagagaaaatcggcgaaacggcgcaagtcgtcattatcgatatgaacgatgcgcaaaatcccattcgtcggccgataagcgctgattcagctattatgaatcctgctagcaaggtcatcgctctcaaagctcaaaagactcttcaaatttttaacatcgagatgaaatcaaaaatgaaggcccacgcaatgaccgaggaggtcgtcttctggaagtggatcacgctgaacaccttgtccttggtgactgaaacttcggtttaccattggtccatggaaggagactcgaccccagtgaaaatgttcgaacgacactcatcgctgaatggatgccaaatcatcaactatagaaccgatcccaagcaggcttggcttcttctagttggtatttctgctcagcaaaaccgtgtgatcggggcaatgcaactatactcagtggaacgcaaagtgtcccaggcaatcgaaggtcacgcagcgtcgttcgcgacattcaagatggaagagaacaaggaaccatctacgttgttctgtttcgccgtacgttcggccaatgctgccaaactgcatatcattgaattggtgcaccccccaactggcaacactgctttcacgaagaaagccgtggatgtcttcttcccaccggaagcgcagagcgacttcccagtagcgatgcaagtttcgccaaaatacgacgtcatttacttgatcaccaaatatgggtacattcatatgtacgacatcgaaacaggcacatgtatctatatgaaccgtatttcggcggatacaattttcgtaacggccccacacgaatccagtggaggcataattggtgtcaatcgcaaaggtcaagtactgtccgtaacagttgatgaggaacagatcattccatacatcaatacggttctgcaaaatcccgaccttgctctgcgtatggctgtccgcaacaatctttccggcgcagaagatttgtttgttcgtaagttcaaccaactgttccaaaacggtcagtatgccgaagctgccaaggttgcagctattgctcccagaggaatccttcgtacccctcaaactatccaaaaattccaacaagttcccgcccaacctggaactaactctcctcctttgttgcaatacttcggtatcctgctcgatcaaggcaagctgaacaaatatgaatctcttgaactgtgtcgccctgttttggcccagggtcgtaagcaactgtgcgagaagtggctgaaagaggagaaactggagtgtagcgaagagctgggtgatctggtgaagccatcggatccaacattggccttgtccatctatctacgctcgaatgtcccgaataaggtcattcaatgcttcgcagagaccggccaattccagaagatagttctttatgcaaagaaagttaactacagcccggattatatcttcttgttacgctccgttatgcgtaccaatccggaacaaggcgctggattcgcaagtatgttggttgccgacgaagaacctctggccgacattaatcagatcgtagacatcttcatggagcaaaacatggttcagcagtgtaccgctttcctcttggatgctttgaaaaacaatcgtcccagcgaaggagcacttcaaacccgtctgttggaaatgaatttgatgtcggctcctcaggtggcagatgctattcttggtaacgctatgttcactcattacgatcgagcccacatcgcccagctatgcgagaaggccggattgttgcagcgtgctttggagcattatacggatttgtatgacattaagcgtgctgttgtccatacgcatctgttgaacggagattggctggttggattcttcggtacattgtcggttgaggattcgttggaatgtttgaaggcaatgctaactgccaacattcgccagaatttgcaaatctgtgtacaaattgcgaccaaatatcatgaacagctaactacaaaggcgttgattgacttgtttgagagcttcaagagctacgaaggattgttctacttccttggatcaattgtcaacttcagccaggatccggaagtgcacttcaagtatattcaagcagcatgcaagacgaaccaaattaaggaagtcgaacgtatttgccgcgagtccaattgctacaacgccgaacgtgttaagaacttcctcaaggaagctaagttgaccgatcaactcccgttgatcatcgtttgcgaccgtttcgattttgtccacgaccttgtactgtatctgtaccgcaacagtctgcagaaatatattgaaatttatgtgcaaaaggtgaatccatctcgactcccggtcgtcgtcggaggactgctggatgtcgactgttctgaggacatcatcaagaacctgatcctggtagtgaaaggtcaattctcaacagacgagcttgtagaagaagttgaaaagcgcaatcgtctcaagttgttgcttccgtggctggaatcccgtgtccacgagggttgtattgaaccggcaactcataatgccctggctaaaatctacatcgattcgaataataatccggaaaggtttttgaaggagaaccaattctacgacagccgtgtggtgggaagatactgcgaaaaacgcgatcctcatttggcttgcgttgcctacgaacgtggacattgtgaccgagagctgattgctgtgtgtaatgaaaactcgctcttcaaatccgaagccagatatctggttcgtcggcgtgatgcagaactgtgggccgatgtgctatcggaatcgaacccgtacaaacgtcaactaatcgatcaagtggtgcagactgctctttccgaaacacaggatccggatgacatctccgttactgtgaaagccttcatgaccgctgatttgccgaacgagttgattgaattgctggaaaaaattgtgttggattcttcggtgttctcggatcatcgcaatctacaaaatctgctcattctcacggcaatcaaagctgacagaagccgagtcatggattacattaaccgtttggacaattacgatgcacctgatattgccaacattgctatcaacaacgaactgtacgaggaagcgttcgcaattttcaagaaattcgatgtcaatacttctgctattcaggttttgatcgagcaggtgcacaatttggagagagcaaatgaattcgccgaacgctgcaatgaaccggcagtttggtcccaattggcgcgagcacaattacaacaaggcttggttaaggaagccatcgacagttacatcaaggccgatgatcctagcgcatatatggacgttgtagaaactgctagcaagaatgaatcgtgggaagatttggtacgctatctgcagatggcacgcaagaaggctcgtgaaagctatatcgaaagcgaattgatttatgcctacgctcggactggtcgtctggcagatttggaagaattcgtctccggaccgaatcatgctgatatccagaagatcggtgatcgttgtttcaatgataaaatgtacgaagccgccaaattgctctacaacaatgtcagcaatttcgccaggttggctatcactttggtgcatttgaaagagttccaaggagcggtggatggcgcgagaaaagccaattcgactcgtacgtggaaggaggtttgcttcgcttgtgttgatgccgaggaattccgattggctcagatgtgcggattgcacattgtggttcatgcggacgagctggaagatttgatcacttactatcaagatcgaggtcatttcgaagagttgattggactccttgaagcagcactcggtctggagcgcgcccatatgggcatgtttaccgagttggccatcctctactcgaaatacaaaccagctaaaatgcgtgaacacttggagctattctggtcacgtgttaacattcctaaagtacttcgcgccgcagaacaagctcatctctggtcggaattggtgttcttgtacgacaaatacgaggagtacgacaatgctgtactggcgatgatggctcaccctactgaagcatggagggaaggacacttcaaagacattattacaaaggtggccaacattgagctctactacaaggccattcagttctatctcgattacaagccgcttctgctgaacgatatgctcctcgtgctggcacctcgcatggaccatactcgttcggtaaacttcttcacaaagcaaggacatctacagttggttaagacataccttcgttccgtgcaaagcttaaacaacaaggcaatcaatgaagcactaaatggactcttaattgacgaagaggactatcagggcctcagaacttcgatcgacgcgttcgacaactttgacaacatcgctcttgctcagaaactggagaaacacgaactaacggaattcagacgaattgctgcttacttgtacaaaggaaacaatcgctggaagcagagtgtggaattgtgcaaaaaggaccgtctcttcaaagacgccatggaatatgcggccgagtcacatcaaggtgaattggcagaagagttgcttggttggttcctagaacgtggcgcgcacgattgtttcgcggcatgtttattccagtgctacgacctcctgcgcccagatatcatcttggagctggcatggcgtcacaatattatggactttgcgatgccctatttaatacaggtgacacgagaatacacatccaaggttgataagctggaagtggccgatgctgaacggcaaaaggaaggagagaactccgaacacaaatcaatcattctgcccgaaccccaactcatgttaaccgctggtccgggaatgggaatgccacaatacgccccgcaatatgccggaggttacgtgccggcgcaaccaaatatgtcaccatatccgggatatggtggtatgtaaaaacacaacccacacacacgttcgaacatgcatcgtagttctgaaatcgtagtttgactgtgctatcgatagacactaaaatcatttattttttgtcttcttaattacgactcgctcgctaacgtgcagcgttcagctaaggtgaacattactggagttttctgtacatctccaaaatttgataaacatttctcgaactggcacctcaattttggccagtttgcggtgagaagagagagttcagatttgatcaatggacaacgacaccttcgacataaacagacctcgtgcatcaagatggctatgcagtaaaaataatcaagtataattagacaattcatctttatgtttaatataatgtttgtttttctt

SEQ ID NO: 1012 - DNA, 4294 bp, Aedes aegypti
atggccgaggaccagggcaagcgccggagggacggttccctcgatgagctggtccaatatgttacgttgcacactccgaaccatgtcctgctgagtggaagtattctgccgtttatgatggtatacgtcctctggggctatctgtgggtttatgtgtacggcgtagaggaccattgggaggcgggattgctgacgctggccgggatcggattcgtgcagattctggtgtgcctctgctgcttctggagtgtccatgtgcaggtgttcctcaactgccggaaggcaaacagtcccgagaaggcaaaggtagttaaagtggtccccacggagaacaacggttcatcggagctggtgaaactccatcgcgccaaagcggacgaaaccgatgttgccagtggcgatggatcgatctactggttcctgttccagaagaccaaatacgtatgggacgcaaacaagaaacagttccgcagtgtcgagttccccatccacaagacgtacgaggagtacttcgaatccaaagggcaccaggaggacagcgacgtgcagctggcggagcggacctacggcaacaacaacatggagatggttgttccggagttcttcgagctgttcatcgaacgggcaacggctccgttctttgtgttccagatcttttcggtgctgctgtggtgcctggatcagtacatgtactattcgctgttcacgctggggatgctgatttcgttcgagtgcattctggtccagcagcagctgcggaacatgtccgaaatcaggaagatgggcaacagaccgtacatgatcaacgtgttccgcaaccggaaatggcgcccgatcaagtccaatctgttggttccgggagatttggtgtcgattacgcggtctcaggacgaaaacttggtaccatgcgatctgctgctgataagagggacttgcatcgtggatgagagtatgctgacaggtgaatccgttccgcagatgaaggaatcactggagaacaccgacgagcacaagaaggaactggacatcgaggcggacggaaaactgtatgttctattcggtggcaccaaagtggtccaacattcctcgccgagtaagggagcaatgcgagccccggacagcggttgtatcggatatgtcctccgaaccggattcaacacctcgcaaggaaagctgctgcggacgatcttgttcggcgtgaaacgagttacggagaacaatctggaaacgtttgcatttatcttgttcttaatggtattcgcggttgcggctgcggtgtacgtgtggatcaagggctccgaagatccggaacgaaaccggtacaagctcttcctggagtgtacgttgatcttgacatcgatcatcccaccggatctaccaatcgaactgtcgctggctgtgaacacctcgctactgcagctttccaagttgtacgtcttctgtacggaaccgttccggataccgttcgctggaaaggtacaaatttgctgcttcgataagactggaacgttgactagtgataacttggtagtggaaggagtggcgggtttgaagaaggacacgagtattacggcaatcaacgaaattccggaagctacggctcacgttttggggtcttgccattcgttggtacagttagatgatgggttggttggggatccacttgagaaagcgacacttacagctatcgattggaacttaaccaagggtgattcggtggttcccaagcgaggaaagttcaaacctctacgtatctatcaccgattccacttttcctcctcgctgaaaaggatgtctgtcttggcaggacatctcgttccgttcagcaacgagacgtgctatattggcacagttaagggagctcctgaggtggtgatgaagatgttaaagacagttccggagaactacgaagaaacgtatctggaatactctcgacgtggtgcacgtgttctagcactggggtacaagtccttcggggcactcgataacgccacggtccgcgaactgaaacgtgccgatgttgaaaaggacctggaatttgccggattcatcatcatttcctgcccactgaagccagattcaaagtacgccatcaaggaaattattcaagcttctcacaaagtgatgatgatcaccggtgataatccgctgaccgcttgtcacgtagcgaaggaacttcgattcaccaagcgaacgatcgttgttcttacgagagacgacacggatgattcctggtactgggaatcgatcaatcgggaagtgaggatccccctcgtagaaaatcgaacggttaaggaactgtacaaggaacacgatttctgcatcaccggcgaaggacttcaatatctggacagcgagaagcattcgtacttgctgaagctgatgccatacgtcacggtgttcgcaagattcgctccaaaacaaaaggaagtggtcataaccaccctgaagcagctagggtttcacacgttgatgtgcggtgacggaacgaacgatgtcggagccctgaagcacgcaaatgttggcgtttcgctgctgagtcatccgccgaccaagtccgagaagcgtcacttgcgagccgtgacgacacccgatggggaagtggaaaagaagaaagacaccgcgaaggatgaacggaaagcactgactccgagggaacgggccatcatgaagcatcgggacaatttgagttccactcaggagaggctgcagaaggttctgaaggagatggacgacgagcaggtgcaggttgtgaagctgggtgatgccagtattgcggcgccgttcaccagccgatcgtcgtcgatcaattgcgtgtgtcacatcatcaaacagggccgctgtacgctggtcacaacgctccagatgttcaagatcctagccttgaacgcgctcatttctgcctactgtcaatcggtcttgtacatcgatggcgtcaagaacagcgacacccagcttacgttgcacggtttgctgacggcagcatgtttcctcttcattacccgctcgaaacccctcaaggtcctgtccaagcaagcgccactgccgaacatcttcaatctgtactcggtgacaacgatcctcgcccagtttgccgttcacttcacggcactggtctatctcgtgcacgaggccaacttgcgatcgccacctagggaaggcaaagtaaagctcaatctggatctggaaccggacgagaaggaggagttcgtaccgaacatcgtcaacagtacggtgtacatcatcagcgtgacgatgcagatcgcaacggtggccgtcaactacaagggccatccgttcatggagagcatgcgggagaaccgactgctgtcgtatgccatcttcacgtccagtgcgatcgtgctgtgcctggcgctgggcattgtgccggatctgttgaccaccttcgaagtgatagatttcgaagcggatttccgaaagattttggtcggcgtcctggtggcggacatgctgctcgcctatctggtcgaccgggtttgctcgttcctgttcggcgagatgcgaaagaagacggacatcattgcctagaccccctggggaagcaggaggagcgcatcctgggagatccagtgcaacacaacaactaaggtatccttagcgtcgcggcacacattaaaacctattataatattagagcaaattatgcacgaagcgcagcgcgaacacttgtgagaacagggcaatggttattttaactatattattgtgaatctacgattagagtgaccatcaggcaggttaagcgtgtgatagagtatttcatttttttttctgaatcgagaacttcaaaacgatacgaacagaaatccgaaaaagaaggtcgggtgttttctgttccgttcaatgaagggttggtatattagtgggattgatgttgatgttggaattaatatagtaaagaatttggactagcaaaggcagcagttatcgtcgagttgcatctagactaccggatagtagagagagaggtaatttcttctttatgcgaagaacacacgatgatgaaagtgagtttgtgttaggatgtccataatgctgagagaaacgtaaaatgccgcaagggaacctagatgaaataattcaataaaataaaatgaataagcagggaacgaattggaaagcaaccattgaaatctgttcatagcaaaaaaaacgtttacttgacttatacactttatataactgtcttacgaagttttttagttgagggtaacgttgtatggttcgtcgtatggagaaaacaaaaacctttaaaatataaaacgatatattt

SEQ ID NO: 1013 - DNA, 3310 bp, Aedes aegypti
tcatgattggcggcacaatttgctttctttttttactttttcgcttaacccgctgttcctctgcttttgccactttgtttgtaccactccttgttaagtcaagtataagatactaacaatcatttcttggtggaaatttttacatctctcactgtttggcacgcttcatcaaattactcattttgtcttcgactagtgccaatcacgtcctacacctttgtggtcacagattcgtagatatgaacccacgagctgtagacatctcactccccgtatctacagtttacattattataaacgatgacctaatgatacccaccattctatgtagaacccgtggatgtcctttttacggtttttcgtctacggatagtagcgcggctgtttgtagattttgtgggtttcgattaagtcgaaattgtaacctacctaattttttgttgtgttatctgaggttcacccgtagactgaggttgaccaatggtttaacctgtaggtacttctcacatcgctaccacaacagagtaatataatgataaacgtaatctgagtcaatactcgacgcatatgtagacactcattgatttggatccgttatcatactattcacaactgatagacggaaagtactgcattcgcacatgttaagtgctgattattcgcttcaacaataccagcgaacgaacaagtggcggtatgagttttcattctggaacacaaatgaaactcgcagcatatacaatactggaatgagcacttgacgatctcccgacgtctagattaattggcagttgaataacacttctcgaagaccccactcgggagaggaaaccccatcagttgattggtgactcgtgtggacagttgtcatccattttggatcgggagtgctgttagtggatggaattttcttgggcgttgaaggattggctcggaccatgtgttagataaaagtttcgctgaagctgtttatctcaattttactattgatttaagttgtgcggtgacttggtgaggattaagtggcgtcaggatgaccgataaaagcaaaacgactgatagtgatatagcatgcgaggaagcgtccaggttaacggccgatctacaggacgaggcgtcacctgaggatgacgatggaatgtgtgaataccatgatatgccgccaccaccggatggcggctacggatgggtgattgtgtttgcgtcgtttatgtgtaacatgatagtggacggtattgcgtataccttcggtgtgttcctgaatgatttcgtggagtactttggcgaaggcaagggtacggttgcgtgggtgggtagtttacttagtggaatgtacttaagtgctggtccagtggtgtctgccctggcgaacaaatatggctgccgggcagtctgtatagctggtagtgtaatctcctgcgtggcatttgctctcagtaccttaagcccaaatgtgaccgtgatgatgctgacctacggcgttatgggcggtatcggattcgggttcatctatctgcctgccgtcgttgccgtcggatattactttgaaacgaaacgttccttggcgacgggcatcgctgtctgtggctccggagtgggaacttttgttttcgctcccctggccaacatgctgctggcgaatttcgactggaaaaattccactctcatattagctggtctaatattgaactgcgcaattttcggtgctatgatgagacccctcacctatccaaaggaagacaaagtcaagcctttaatgcagcgaatgtacgaggaaaaacgtatgcaaatggagcgtggttcaatcggtggttcctatttcatggtgcagttaccggacggtacgatggaaaaaagactgaaggctcctctgaatgccgatccgggcgtacactcgagcttggctctggatcagctggctgcacaacagggtatgacagcggtggccactttgcctaccatcacggaagccaaggttcaagagcagaacggcaactccagcaattcttcatccgagtccggccagatcgagatcaagaaaccactgcagaggaagcgtaccgccaactccgagtccgatgccaacgaatataactctaacaacatgccgcgcaatgcttcgcaacctgctttcaccagtaatcagtcgggtattccaaagaacggatccgtgccaacttttgaccgtgtccgtaagcactcgacaggtgaaagatttaagccatccttagctgcaattaaagcaagctctagaggtgatgttggtagtaacggagatgtacgtaaaactatgcatttaaaacttgtcatgtacacgtcgaaggcctccctgaaggcggatcgtccgcaaatggtgcgcccgctgtcacgtaaggatatcttctactcgggatccgttaccaacctgaaggagttccagtcgcagaagtcgctcgccagctatcgcaactccgtcatttcgttgaccaaattcgaacgcgagcacaggggtgacgttgtccgtgaagatttggagaaaggggcggaacagtacgatctgtgtccgtgcctggtgcttcccgaatccttcaagaatgctattggggctatgatggatgtgagcttactgcgggatcctgtattcatgatgattgccatttcgaacatttttggcatggcggggttgtacgttcctttcgtgtacttagtggacgcagctgttcttgatggaattgaggaaagcaaagccacgttcctgatttcgatcatcggtattaccaacaccttcgctaggattttgtgcggttacgttgccgatttcccgaaagtggacgccttgtttatgaacaatatttgccttgtgatctctacgtttgccgtatcgctgacaccgttctgtcatagttactacgcatatgttgcgatggcaattgcatttggaatagcagttgctggctacatctcgttgacgtcaattattctggttgatctgctgggcttggataagctgacgaatgccttcggtttgctgattttgttcagaggagctgccaccatcgttgggtcaccactggctggagcactgtacgacgcgacgcagacctattcgattccgttcttcgttgccggaggtctgttcggtctgtcggcgattttcagctttgctgcaccagcaactaagagattccgcaaacaagaggaagcgccggtccacgtggaggtgctgaccccgatcgatgaggaaccatcggaagacctggccgacgatgaccagcccatcacaatactaccaaagattgtccaaaccgcaccgagtccatccacggaacaa

SEQ ID NO: 1014 - DNA, 6551 bp, Aedes aegypti
gaaaaaaaataatcgaaaaataataaagaaataaaagtcacataattgaactacccatcaattcaattttaaatttcgaagagtttacatctgtaaaacaccttatgtgccagtctgtcacgctatagggggcaccgattcaccatcgtagctaatcacaaacatcgagctgccgcgccggttgttcttacattacattgctacgtatgtgaaccacgacgcgcacgcagagagaaccgacgaatactcaaagctaagcgattggcagtgacattcagttattcgctggaacttgccgcgaacggttcaatccctcgattcgtccattcccccaaaagtgtaagtacaatatagcaattcaagccttataaccggcgatctacaattcggttgacccaaaggaaacaacgccgaccacgagaggaaattcaaatttcaaagttcgaaaacggggaatacatattcaaggggagcattaattggtggaacacgcagaacagcgccagaagataactactaagtaaggactgagaatgcggctgagcggatgattttcagcagcatctagacttgattgattcgctagtagtatattacgtaatcggtcaattgcatcgccggcgaatgtaaatatagaagcccgacatcgtttcagtaggttgattgaagtgattcggagtgattattatttttaattagtgacgacccttaatggaatgacccgtttgtagggtacggaattttatagaacggaccataaatcgcgttctattcagcatgttcataaaagtgtgaccctggtggatgaagatagcgagttaaccgtgcgaactggaaaagaggcaaatgagagtcgaaacaggttgtttagtgactgttttttttttggaagaagagaccaataaaatgagaatgagttgagatttgaggaatggtgacgtgatgctgttcatttgaccaaaaccggattctcttaatttggtgcaagtcacaagccgcgaattccgagcacgagtttatgattctgaaggcgtgtgtacaccttacaaaacccaaaaataagcggcttactgtttgtatacacaaccgaatgcgttgggattggtgctgtcgacacacacttgttgctgctcagccgaaggaatccgaacagcaagcagccactcagccgagaagagtgacgcatcgtaatcggcagcaaagatggaagcccatccgatggacgagttttgcggttcccgattttgggacctaaatctaacctggtatacggaggatccggatttgacaccgtgtttccaacagaccgtgctcgtgtgggcgccctgcgctttcctctgggttttctcgctgatcgagctgttttacctgcggaacagtcgtaaccgcaatgttccctggagcgtgttgaatatcacaaaactagctatcgttagcgcgctaattgtgctaaccattgtcgatctaatcaaagcaatctcaacagacggtacggtggcgccggtctacttttacaccccggtgataaaaattgccactttcgcttatgttgccggtctaatatatttaaacaagttctacggaatgcgaacatccggcttgatgttcctcttctggggtctcttggttatctgcagcattccgcgctgtcgaacggagtctcgtgcccaccaactgcgccaagaaactgactcgtgggcagactatcattttgtcagtttcttcattttcttcgccggttcgtgcctgatgttcctcacgaacttcctcatcgacaaaccgccccagcaaacaaaatacgaaataacagataaggattgtcctgaactgtcagctactttcccgtcgcgactggttttcgggtggttcgacaaactggcctggacaggattcaaaaaacccctggtaaacgaagatctctggaatatgaaaccagaggatgcttctaaagaagtgtctcctctattcatgaaatattggaacgaaactctggagaaaacgtataaaactcgagaggtgcacgacgtaacaagtactgctagtttcaaaaagcaatcggctcgtgtagatttcaagacgatcaagacgaaaaaaattgcgtcaattctaccggctctaattaaagcttttggtcctacatttgcttttggatcatttttgaaactagggcaagatgtgttgacttttgcatctcctcaaatcctgaggctcatcatcaatttcgttggcggcgaggaacccctgtggaaaggcattttctttgcacttttactgtttttggtagccggaacgcaaacactatttttggcacaatacttcaaccggatgttcttcgtcggattgcgaatccgtacggcgctgatcagtgccatctaccgaaaggcattgatcatttcaaacagcgcacgaaaaggttcgaccgtgggtgaaatcgttaacctgatggcggtcgatgctcaaagattcatggatctgaccacctatattaacatgctgtggagtgctccgctgcagattggcttggcgctgtttttcctgtgggaaattctgggaccgtccgtgctagctggactggcagtgatgattatcctgattcccgtcaacggtgtcattgccaataaaatcaaaacgctgcaaattaagcaaatgaagaacaaagacgaacgtgtcaaactgatgaacgaagtgctcagcggtatcaaggtcctgaaactatacgcttgggaaccaagttttgagcagcaaattctgaaaattcgtgacaaggaagtcaaagttctcaagtcggctgcttatctgaatgctggaacatcattcatctggtcatgcgctcctttcctggtttcccttatcacattttccgtgtatgtactgtccgacgagaaaaacgtgctgacccccgtgaaagcattcgtttgcctcacgctgttcgatatccttaaacttcctctggtgctcttacccatgttgatcgtgtacatggtagagaccagcgtttctgtgaaacgtatcaacaagttcctgaaccaagaagaacttgatccagacaacgttacacacgacgagaaagaatcttgtccgctggtaattgaagatggtgtgttctcatggggtgaagaagaaaccaccttgcgtaacataaacattaaggtgcagaagaatgaactggcggctatcgtgggtaccgttggatccggtaaaagttcggtactgtctgcattccttggtgaaatggacaaaatttccggacgggtcaatacgataggaaaaatagcctacgtcagtcagcaggcctggatccagaacgctactctgcaggataatatcctgttcggtaaaccgatggataccaagttgtacaataaggtcatctcggcatgtgcattgaaacccgatattgaaatgttgcctggtggcgatcagactgaaatcggagaaaaggggatcaacctgtccggtggacagaaacaacgtgtttctttagcccgagctgtatatagcgatgcagatatatacttcttggacgatccgttgagtgccgtagattctcacgttggaaagcacatattcgaacaggtcatcggagaaaacggattgctagcgaagaaaactcgcgtactggtaacgcatggtattacttacttgccgaatacaaatgtgatatacgtcatgaaggacggagaaatttcggaatctggctcttaccaggagctgatggaaaagaaaggagcgtttgcagacttcctgattcaacatctacaggaagtaaacgaagaagaggaggacattgatgagataaaagcccaactggaatctaacgttagcaacgaggaactaaaacacaaatttgaacgtgccatcagcaaacgatcacgaagcggcagcacgtcatctggaaatgaatcgttctccaggcaaaactctgaaataagtggaagccaaactagtttgagacgacgaactcccgaaaagaaacttccagaagagccacagaagaacaagttgatcgaacaggaaaaatccgaaacgggaagcgtgaaatgggaagtctacaaacattatctgaaaagcattggcctaacgctttcagtggctacagtttttctgaatatgatattccaaggtttttcgataggatctaacctatggctgtccagatggtcgacagatgaatcagccgaaaatgataccagtgttagagatatgtacttgggagtgtatggtgctttcggtgctggacaagtgttggccacctttgccgcttcgatatcattcgcactgggtgcgctcaaggcatccagagaaatgcacatccttctattgcgatacgtactgcgttggccgatggagctgttcgatacgacacccttggggcgagtgttgaaccggttcgccaaggatgtggacgtcatcgataacacattgccccaggtggtgcggtcgtgtctcgtgatgatttttgcggtggtagccacgttggtggtcatcagtatctcgacgccaatttttgccaccgtaatcctgccgatcggtatcctgtactatgccgtgcaacgcttctacgtggccacatcgcggcaattgaagcgtctggaatcggtgtcccgttcgccaatctactcgcactttggtgaatcaatccagggagcacaaaccattcgtgcctacggtgttcaggatcggttcattgtcgaatcggaatctcgcgtagacttcaaccaggtctgctacttccctagtatcatcgccaatcggtggctggccgttcgtttggagatggtcggaaatttaatcattctgtttgccgctctgtttgctgtgctcggacgagaaacaatgaacccaggtttagtgggtttgtcagtttcgtatgcattgcaaatcactcaaactttaaattggttggttcggatgacatcggatgttgagacgaacatcgtagcagtggaacgtattaaagagtatggagagacgaagcaagaagccgcgtgggaacttccgaacagcaacttgccacgagactggccggaacagggccgtgtagagttccaagacttccaggtgcgatatcgggaaggactcgatttggtcctgaaaggcatctcttttgcagtagacggcggtgagaaagttggaatcgtcggtcgcactggtgctggaaagtctagcttgacgttggctttattccgaattattgagtctgccggtggaaagatcgtaattgatgggcaagacatttctaagctcggtctgcatgccttgagatctcgattgacgatcattccacaagatccagttctcttctcgggaacgatgcgaattaatctggatcctttcaatgtgcatagcgatgaagatatctggaaagcattggaacatgctcatctgaaatctttcgtgaaaggtctaacggctggtatcaatcacgaggtcagtgaaggcggagaaaatctgtccgttggccagcggcagttgatttgcctggcgcgagcattgctgcggaaaactaaagtacttattctggacgaagctactgctgctgttgatctggaaactgatgatctaattcagagaaccattcgcaccgaattcaaggactgtacggtgctgacgatagcccatcgtctcaacactattatggattatgataaagtgatcattctagataagggtcaaatctctgagttcgcttcaccaagtgaactccttcagaacaaatcgtcggctttctatagcatggccaaggatgctggattagtgaaatatcactattaacttacgggaactccgaagaagactgcctcttgttaaatattaaggtcaagttattcaataaatacaacattgatgtacgatcagttcattcctattatgtttatattttcaaaacttcttctcaatttacctgattcttctgctgcgcttaacacattacataactagggagatttacgatatcggtagcccgagttttctcggttatgaaactgatcaattacagatttgttcagaataatcgtagtaaaagccgattttcattcaaaatactcaaatttggcatgattcaatgattttttacaattatttattacaaactattacaattttggaaacacctgctgaaaagtttagcatcaagtaaaattactcaaagtaatagtagttttaataattcaaattactatttcagattggtattatttttgctcatcatttgcacatgtttacctaagttagaaatgttttaacaagtcaattaaaaaaatgtatttggatttttttttcaaatagatcgccgtctatttataacgtaaggtttaatgggggaggggtttgtatagtacctataacaaaagatatccgattgaaaagcttgtgagtttttttttcgtaacaaaacgcaggaatcaccatttttctgttttgatgctgccacgtagaggaagaacataaaactaccattttaaatgtggtattactaccttctcatggatcttatatcgatctgtttcttttaaaagtttttgataactttccgcaggatggccacc

SEQ ID NO: 1015 - DNA, 5431 bp, Aedes aegypti
ctaaacaaaagaatttaaaaaatgtaaagcttccactaccggattcaaaactcggttcggttaaccctagacagtgccgcggatgtatgtatcgaaggaaaattaattgctctacaaatgcgaacgcgttgctgctgtctttgtcgtcgcggcgttgttggttgcgcgagtgttgttacgaatggcgggtgaagtcagcagtcgattgcccgaaccctcacgcttaaactaaaacatcgccaataacaaccaacaacgaatgcgaatatacacgcctgatgtgttgtttgatgcgacgacagctagccgagaagggtattggtttgtttctcccgaaatgactgttcaatacgtcccaagagcttgtccgattcggttcaacggaagcatccctccgcggtggaactctcaagcaactcatcagttttccaccatcatacgagaaaagcagacagtgaagacgacaggagaagattgcttgcacccgcttagaaagggggtggtgactgttcatttcacgcagaacaaagttgtcgaaaagattactggcgtggaaaaccaggtgaagtgattgtatacggtgaccttaggaagctacgtttcctgaaatggtgctattttaactcaaatctaagtgtgatttttatactaaagtgtatgatctttaatgttcttgctcaccgtggagtagtgttgcacattttggaaactttttaaatgggttttgagtgtttataaaaaggagcccatttcaaaatttcaaacttactaaactttacgtaagagcacaaagcaccgctaaaaacccacaataaacttgattgtatcacacagttagtcattttgacgtagtgcagaccagtatcatttgtgtggaaattcgtcttagtgacagtgttattacataaaggatagatgtaaagcgtcacatccgcggagaaacgaggccatttgcggaggtcgagtcaatgaaatcgaggatttagttcagtgaaaaatcattgagtgagtgtatctttcaaaagaggaaaaaaaatctgcgttctggtttcctttcccacaaagagaacaaaagaacaaaataccacgaaatccatcagacgacgaagaaaaattacttatttaccagcagcgaaggaacaactgcggctgttttgttgatacagaacgagagctgtagaacacaaagtgattcacgacgtcagctgtctgcctcccgttttggtggcgtgtgtatattgcggcggtcggtactcgaagattattgacctccacggataccagtgcatgtagtaaaacgcggaaaagctcggatatatagtgactagcgcgctgggaactattcaacctatcaattagcagtgatatcaacccatcagcggttcgttgctcaccagcagggatccggattgatttacaactgtcagccccaaggtttttccgatgtggctgcaatagatagtccagggcatcacttctatcagagtgtgactaacttgttcaagcctaaatataaaaagcacgcacactacttatggttgactgcgtgatactggcacggagacggacttcggacgtggacgaggacgccgacgacgagtggatttggccttcgtcgggcgcaaaactgtcgatggtggtgacgcgaaattgattctatgaggaacgccgaagctccaccaatttcgacggttgattgacaacagaaagacccacgcaacagtcatcgccactcatccacaatgggcgaggaaagcgtcgagtgtaacgagggcaagctgatcacaaagaacggtggatacagtcccgtcaagcagctggaaaatggcgatctggttaggaatgatagccagaaaaagatagtccaattcgacaaggcaacgaatggcaacaatcataataatgtgaacacccgtgcctcttaccccgaaaaaagcgatgaaaaatcaatgcacaatggagttgcatccgccggcggagatcactccgaaattaggactgatgaggatcccgacgattatgaaatggttccacccgatggtggatggggctggctcgtgctggctggctcaatgttagttaacattcttgtacctggcacaattaaaagctttggcgtactatttgtggaatttctcgaagcattccaagcctcaccatcgaccgccgcatggattccagcattgtgttacttcttgtacagctcactaggtcccctgtccagcatactttcagtcaagtacagctaccgtacagttaccattatcggtggaacgtttgcagccgttggaatgatcattacgtattgggcgacttcggttagttttctgtacataagttatggagtactggtgggaactggagctggactctcatttcctccaacggtctacatcgtcacatcgtacttcgtgaagctaagaggtttggcgaatggattgtgtatttctggcagtgcattgggttcgattattttgccacccgtattgagatatttgctggtgaactttggatacagaggcgcttgtttaatcatgggtggtatcactttgaatgtatgggttgctgcaatattttaccaacctgtagagaaccatatgaaaagagtaaaaaagaccaaagatatagaagaagagttagttggtaatgatacgattatggaagagtcggaaaccaacgatgatctagaagagggtctgaacattgaaaaatctgcaatgaaaccaaagtttatgatcacaggcgacgacacaccagttgctacgccgactctagagcacaagtctccggacattttccgtttcaatcccaagcatggacttattgatagttttgctagaagtgtatcggctgcagcagtaccagcttcttaccataaagaagaccacggccatagacaccggaagatcagtactcccataaaagaggagcatcgaaaccttacttttactactcctctaaacgaatcacagggatcacatttccgattgaatagactgaactctatgcgcagtggacaaagacctccaagacgatctccatctaccagcagcttccaatacatcagtacaccataccacggaagcactctatctgctctacagcctaaagaatttgcctctcatctgtcgctgagatcgattgcggacagtttcaagcctgcatccaaacatacaggggacaaatcagacaaatctacggatggtcagaaatactttgacctatcattgcttcgagacccgtcgtatcttgtaatactcatatccaactcaaccaacgccattggttacactaattttataattttgttacccgcatacgcaatctcattaggattcgataaaagtctcgcagcctatctgttatcgattgtttcgacattggatctggtggggcgtattggaggatccgctctgtcagatacaaacctcattcccaaaacgtggtactttgtcggcggtctctcgatttcagggttggctttggccgttcttccgttagcaagctcgtataccatggttagcgttttttgcgctctatttggtttagcatctgggacgtatgttggtattactgcagttatcatggcagatatgttgggaaccgaacggctcacatcatcctatggtatcagcttgtttgttaacggaattctacaattagttggacctccaatttgtgggcttatattcgaacatattggtgattatcgacccctgttcactgcacttggttttatcctactggtaggttcctcactatggggatttatgccttttatacacagaaataaacttcgcaaacaacaaaaagcagctgaagctcaacaagatgtagagaaaagtcttatagcttaaaatgtagcatgatactaaaaggatcaatcggggaatgaaaattaactatttcattcttctaggtagatactgacaatgattacttataaagaatatggacaacaaccagatcattcattgcattgctcgaacatggttttacgggttgcactgttaaatcaaatgaacctgtggattttacttttaatgtaattttcacgcccaaaacaaattctgtattaaacatttacctatatatggataaaatcaaatgtttaaatacaaacatatataaaatacttacattttatgaattacaatctaatgacttatcatacatttcttgcagaattagtaagcattgtgctaaaattttgcagtcgctggttggatacatattcaaattatgtttgctcctttttgattttactaggaacgatataaactatcgtttagttttatatccaatggaagctgcttctgttggttgtctgttatctttataagttattcaatacctactgataaaatgtgcagaaaacaatctatacaagattttaatcctcgattctgtagtacgcgaatcgatgatgatcgtgatatgacaattcaaaactgatttctttcatgatatgcaggaaatttaaaaacaaagtattttagtgcacatgagctacaaccaaacggtgcaaaaccgttgcttacgatgaagcgtaatacgcaaggtactattattaagctggtagttggaacaaaaaatgagaaaggagaacaatatgagtattatatttttaggtattttacaaattgcgtgagctgaaatccaaactgcgtgagttgttttttttttgtgtatgaatgattaggttagatagtgtaaatctaccataaaacctttgagatccctatacgaatgatctggggagggggatttaacttgaaacgtagtttaatgaatcctcaagtgaatgcatgtttgaaatcaattttatttgtgtagtgtttgaactctagttctaagtcttagaaattatgactacaggagaaagaaccatttcaaatatttattctacttttacagtagttctttcgcttaaggggaaaatatcaagaatatcatattcagaatattatgttactcgagaggtagaatacagcatttggaatggacaacaataaatggaaaataaaacaattataactattaatgtaattcataatcatccgaactccaaagtggtatcggccatatgccgattagcatcatcctgccaatctattttgtatttgtccaagaagctctccaaaagttccttcaataattacaagtttatgtcaaataacattttacaagaatttcacgatttctttaagaatcacttcgctgatgctgtatcggacaatacatttgcaactttttagattttccatacaacatcatcaactttgaccagatggatcttagttatttatgaacaaattttcacagcgtattagacataacttgaattttaataaaaaaaatttggttgattttcagccacgagtttagaagtaataccggttggactaaagggaaattcccgtaacgcggg

SEQ ID NO: 1016 - DNA, 3360 bp, Aedes aegypti
cagtttcgttactgattacaaagtgccaaataaaatcattttaaaagtgtgttaaaatgtacaaaacgtttcaattacaacagaattgtttagttatgacgtattataatagtttgagaatggttttctgaaaagtttaagattataagcatcttatttgtcattatgaaaaacaaatgaaaaaggtgtggcatgcgtagttttcaattagagcacatacagtagaaaattaaatatgaaaacttattattggaatttttacagtataaaacactccattttacaaaaaataacagttttattattcattgaggtcaattgcttaaaaataggcttgtcatatatatatatatatatatgaaatctagaaatggagcgcaaagtgttatctttgctctgcctcttttttattaacgtctctgcacaacggccagggggagattatccatcgtttttcaacattggaggagtattaagcaacaatgacagcgaaacccatttctcgttggttattgcccatctgaacttcgatcaaacatatgtaccaagaggcgtcacatattacgataaaacgattagaatcgataagaacccaataaaaactgctttggacgtatgcaaacatttaatttcacgaagggtatacgctgttgtagtatcacatgaaccaaccggggatctttcgcctgctgccgttagttatactaatgggttttatcaaataccaatcattggaatttcatctcgggatgcagcattttcggataaaaacatacacgtttcatttttgcgaacagtgccgcctttctaccatcaagctgatgtgtggcttgaaatgttaagccatttcggatatacgaaggtgatcgttattcatagctccgacacagatggaagggcaatacttggacgatttcagaccacatcacaaactaactatgatgacatagacgttcgtgctactgtcgagagcataatagaattcgaacccaagcttgaaacgtttacagaaaatttgatggagatgaaaacagcgcaatcaagagtgtatttgctgtatgccagtactgaggattcatatgttatctttcgtgatgcagcgcagaacaatatgacggaaaccggacatatttggattgtcacagaacaggcacttcaagcaaataatacaccgattggtgtacttggactaaaactaaacaactcaaatagtgaaaatgaacatataaaggacgcaatatatgtcttagcatcagcgattaaggaaatgataacccataacgagaccattactgaagcacctaaagattgtgatgatacaggtgccgtttgggaatccgggaaaaagatgttcaactacttaaaaacaagacacataaaaggagaaacgggacatgtggcattcgatagcaatggagatagaatatatgctgcatatgaagttattaacgttcagcaaccaatgttatcgtctacgcggaagaatgttaaggttggaagtttcttctatgatgaagagaaaggccgaatgaggctgaaaataaatgatactatgctggtttggcctggaaacaccgaaaaaaagccggaaggaataatgattcctactcatttgaaagttcttaccattgaagagaaaccatttgtgtatgtacgaaaattactagatgacgaaattgattgtgaagatgatgaaatagcatgtccccattttaattctactgatggaaacgaaaaagactattgctgcaagggatactgcatagatttgttgaaagcattagcgcaaaggataaactttacttacgatttagccctatcgcctgatgggcaatttggtcactatcaacttaaaaatcatactacgggcatcggcacaagtgtcaaaaaggaatggaacgggcttattggtgagctcgtcgccgagagagcagatcttatagttgctccgttgactatcaatccggaaagagcggagtttattgaattttcaaaaccattcaaataccagggcattactatattggaaaagaagccgtcaagatcaagcacactggtatcatttttgcaaccattcagtaatactctgtggatattagtaatggtgtcggtacacgtcgtagcactggttctctaccttttggatagattttcaccttttggacgattcaaactgactaccaatgatggaacggaagaagatgcgctaaatctgagttctgcgatttggtttgcttggggagtcttgctgaatagcggaattggcgaaggaactccacgaagcttttcagcgcgagtactaggtatggtatgggctggatttgctatgataattgtggcatcttatactgctaatctggctgcttttcttgtgttggagcgaccgaaaacaaaattatctggcataaatgatgcacgccttcgtaatacgatggaaaatttaacttgtgcgaccgttaagggatctgctgtggacatgtattttcgaagacaagttgaactatctaacatgtaccgtacaatggaagcaaacaattatgacaccgctgaacaagcaattcaagacgttaaagacgggaagcttatggcgtttatttgggattcatctcgtttagaatacgaagctgccaaagattgtgaactggtaactgctggcgagttgtttggacgaagtggttatggtattggtttacaaaagggttcgccatggacggatgctgttacgttagcaatattggattttcatgaaagcggatttatggaatcacttgataaagaatggattttccacggaaatattcaacagtgtgagcaattcgaaaaaacaccaaacacattgggtttgaaaaatatggcgggtgtatttattctggtcggcgcaggcattgttggtggtatagggttgattataatcgaagttatttataaaaagcatcaaataaagaaacaaaagaaactggaaatagctcgccatgcagccgacaagtggagaggaactattgagaaacgaaaaaccttgagagcatctctagcaatgcaacgacagtacaatgtaggattaaattcggtttccaaatccatcagtcaggcagtagacaaaaatcgaaatccaaaactcaatcccttatcgagagctccagaaagagcatggcctggagatcacgaaattgcgcgcaatcgtagaaataatgatcaaacatacaaaccacctcctagatacatgcccacatatgctacagatgtatcacatttagtggtataaataaaataattaacgaatactatattactaaacatattaatgtattttacctccttaaatatataaatgttaatactgtgtttagattcacataatcc

SEQ ID NO: 1017 - DNA, 1643 bp, Aedes aegypti
atgagtaacaatggaccgggggttacaaaccccatgctgtacgatcctccggagggacaggcctccaatacgaagctgatgcagtttgtagctggcgttggagtgtccatcgccgccatcagtgccggaaccgccctcggatggacttcaccagttctgccgcagctggcacttgctgaaacaggaaacgattccacgacggcaaccgccagcagtaacaacaccgatgccggttcgggtttctatctcacagctgaccaaggttcatgggtcggagcgttcctggcggtgggtgctttctgtggtgcccttcctgctggatacctggcggagaagatcggtcgcaagtacaccaccatgtctctggccctgccctatctggccagttgggccctgattatctttgccagtggagcggagatgctttacgccggacgattcgtgattggtattgccactggagcttcctgtgtggtggccccgatgttcatctccgagattgccgagacttcgattcgtggtgcgctgggtgcattcttccagctgttcctgaccgtgggaattctgtttgtctacgcagtcgggccgtacacgtcatggactacgctgagcgtcctgtgtgccatattcccagtgttgctgattgtggccatgtttattgtgccggagagtccgacgtatctggtgaaacagggtcgccgaagtgacgccgccgctgctctcaagtggttctggggaccgaactgcaacacacagaacgccgtggaaaccatccaggccgatttggacgccgtcaagggtgaggccaaagtgtcggacctgttcaccaaggccaccaaccggaatgcgctgttcattgctctactgctgatgttcttccagcagttctccggtatcaacgcggtcattttctacaccgtgccgatcttccagtccgctggaagtaccatggatccagccatttgcggaatcgttgtcggagtcgtgcaggtgttgatgacctttgtttcctcggtgttgatcgataaggccggtcgtcgaattctgttgctgcagagcagtttcatcatgggttcctgcttggtcgtcttgggagtgtacttcaagctgcagaacgacaaggctgatgtgtctggaattgggtggcttccgttggcttcggttgtcctgttcatcattagcttctcgttgggcttcggaccgattccatggatgatgatgggtgaactctgcgcaccggatgtcaagggattggcttcggccttggcagtcatgttcaactggacgttggtattcttggtcacgaagacattcggcacgatgcaggagatgatcggatccgactggacgttctggttctttggcttctggatggcggtgtgtacgttctacgtattcattaaggtgccggaaaccaagggcaaaaccaatgccgagattcaagcgttactcggaggaaagaactaaatcaagagactggcagcactatactctacatatagcttatatgctattacgtgtaataccctgtactctcgacataacgagagagggcgctttaattgtaaaatatgtatgtcttgagggccggccttgcgcaatctttgtgggaaagaattggcttgcaggaaaagaaaatttat

SEQ ID NO: 1018 - DNA, 948 bp, Aedes aegypti
atgaccgacccgttggtggtgaacccggagatcgaactaccccagttggatatcagcaacaactatacgacggactgtaccatcgagtactcgacggggaacttcacctgtctggcggtggtgtttaacttacgacggcgtctgggttaccatctgttccacacgtacatcccgtcggcactcatcgtcgtcatgtcgtggatatcgttctggatcaaaccggaagccattccggctcgggttacgcttggagttacatcgcttctgactttggccacccagaacacccaatcccaacagtcgctaccgcccgtttcctacgtgaaagccatcgacgtttggatgtcgtcctgttcggtgttcgtgtttctctcgctgatggagttcgccgtcgtcaacaactacatgggaccggtagcgaccaaggccatgaaaggctactcggacgaggacctctcggaggcaatcgatttcaacaagaacggcttcaacaaaacgcatcgatcgtcggaccttccccagtacgatacgttctgcaatggccgcgagacggcactgtgcatcgataaattttcgcgctttttcttcccgttctcgtttttcatattgaacgtcacatattggacgaccttcctgtagaaacaggaaccgatcaggggcgaacccgttcgcttttactattcgtaaagctatctatcgtttaccgattagttcgtaagattgtttcttccaccagtcagtgcttagtatgtaattttgacttagctgatagttcgttttaagattcaaataaaggctcgatatctaaaggaaagaatgtaaaaataacttaccgctgggttctttttcatatcggtgaaagtgaatcctcggggatcgtagtaaggatcacgactcatggcgcgtgatggaacggtctaaaaataaaataaaacatcaatgaaattg

SEQ ID NO: 1019 - DNA, 902 bp, Aedes aegypti
accgccgtgatcacactgtcagatttcagtcatctcgaggcaagcgactaaagttagaaggaaaatcctccagaattcgcgtagaaaaatggctgcatcgggaaaactttcggttttggctcgccagctgagcaccagttcggctgctgcccagctcgttaagccaccggttcagatcttcggactggagggtcgttatgcctgcgccctgtactcggctgcccacaagaccaaggccctggaagccgtcgagaaggacctgaagagcctccagagccagatgcggtcggatccgaaggtgcgcgacctgctgatcaacccgacgatcaagcgcaacgtcaaggctgctgccatgaaggaggtttcgtctcgggtcaagtacaacgccgccaccggcaatctgctgactgtgttggcggaaaacggtcgccttggccggctggatggcattatcaatgcctatacgctgatcatggccgccgagcggggagaggttgtgtgcgaggtcaagaccgccaagccactggatgattcgcagcgcaagcaactggagagcgctctgaagtcgttcctgaagcccaaccagagcatccagctgacggccaaggtcgacccatcgttgatcggaggaatgatcgtctctatcggtgataagtacgtggacatgagcgtcgccagcaagatcaagaagtacaccgatatcatctccgccccagtctaaggcgtctggatctccggaagaagggtatcggagccgggggccggtggaacgtgttggcattgcaaaaagatccgcacgatggcgacacttcctccagtgattgtttttagcaagggattccttgtagtatgatgcagtacatgtgtaatatcgaaagcgaataaaaatggtaaaatttact

SEQ ID NO: 1020 - DNA, 1590 bp, Aedes aegypti
attccaaacatgtttttcacgttgcaacggacggattacgattggtcctatttcaccgaaccttcgaagcagtactgcgctagtatgccccagggaagcttttggccccgcggcaagttacttggcggaagtggagccatcaacgccatgctgtacgtgcgtggaaatcgcagagattacgatcgctgggaacagaacggcaatcctggatggggctttgacgatgttttgccctatttcaagaaatcggaaaataataagaatcccaatgttgccgatttgaacggggggaaatatcatggcaaggatggatacttgaacgttgaatatttcccaaccaatagcccacttatagacgacgtgttcgaaggtgccaaagagctgggatacaaatatctagaggacatcaacggcgaagaacatgttggcttcggacgcgctcaaggaacgattgtcaatggaacacgttgcagccctgcaaaggcatttttaaaccctgtcaaggatagaccaaatttgcatattatgaagcacacacgagtcatcaacatagaacaagataaaaaaggggtatatcgatgggtgaactttttgattgacgaagaacatttgcgggcagcaaaagctggaaaggaactaattatttccgctggggcaatcaatactccgcaaattttgatgttgtctggaattggacctaaacctctattggagtccgtgggcattgaagtggtagcagatttaccagttgggaataatttacaagaccacgttgttattcctctgtatttccaaattaacaaatctacagcaaaagctgttactttacaagatcttgctaacagttatcatcaatacattctgtacaaagagggattcttagcatctcatgatgtgacttcggccatgggatttataaatacagtcaatttcaccgatgaattccctgatatacaattccatcattttgtgtacaaggctcaaactcctgatttcgcaacaattcaaggtaaatttggtttggaagacagtctgctggctcagatcatcgacctgaataaagaagcagagatcctacaggtgttcgtaacactgttgaatccaaaatcttctggtaatatcaagttgagaagttcgaatccatacgatgccccaatcatcaatgcccactacctggatgatcatcgcgatgtagcaactttgattcgaggcattcgcttcttccgcaaaatgctcggcacgcaaaatttcaaggaccacgaaattgaagaacttcacctgaaaataccggaatgcgacaaactggagttcgaatcggacagttattgggaatgttatgtgcgctacatgtccacaacgatctatcatccagttggaacggttaagatgggtccggagagcgaccccagtgctgtactagactcaaggttgaaattgcgaggcttggagggactgcgagtggtcgatgctagtattatgccaaacattgtcagcggtaataccaatgccccgaccatcatgattggcgaaaaggcagctgatttaataaaggaagactacgccgagaagcaggaacatattgagctgtga

SEQ ID NO: 1021 - DNA, 2699 bp, Aedes aegypti
tgctcattcacttatccacatagtattgcgtacctaccgtacggaggcgtgctgatgacctgtagacagttttcttgatgcaccgcgagacaacacaagacagtttatttgcaaaccatcgtcagatcttatcaaccagtgcaatgaatgaaagcgttggtttgatttgatagaccgtctggagaggaatccgcacaaaacggttctggagtagatttgaacagagaccgaggtgaattcataacctagcatttttcttggaagtgagacatgttctcgttgaagcccatttcttggggatctcaagaaacacattgaaatagtttaattttgcactgcatttttttcttattgccataaatggcaacagcacggttcagactactggctagtgctataaacttaatcgttcaacttgggattgcagagatcagttgttcgacaagtgcccatgtgtgcggatgtgtgattaaattattcaacagatctcatcagcaagaaagttgtgttccaaagcaaatttatccaagtcaaaatttgctatggataatcgaacgtacgttgcggattctcaaatcgatctcagtgctgtggcccaaagtaacaactcgttggatgcagcagctacaaatggcaatggaacggtggccaaaaaaccttctccagtccgggacaaatggggcaaagatgtagagttcatgttgtcctgcatagcctattcggttgggtttggaaatgtgtggaaatttccctacactgcactcaaaaacggcggcggagccttcctgataccgtacttggtggtgttgttcctcgtgggacgacccatctactatctggaaatggtgatgggacagttttcaagccggggagttgtcaaaatctacgatctcagtccagccatgcgaggtattggagtgggtcaatccattgccatgttcatcgtcatgacgtactacacgccgatactggcgatcaccttccgctacttggtggcctcgttcagtgccgtcctgccctgggccaagtgtgatccttcgtggcccaattgtgtcgattccgatttcgttggacagattgtgaacaatgcgagtattaaaccaaaggcttccgctgaactctactttcaaaactctgtgatgcaccaaaacgcctctctgtacgaaggacttggcctaccggattggaaactagtgctatgtctcctcttcgcctggctctgcgtggcaactatcctaatcaaggggataaagagttcggggaaagcttcgtacttcctagcgatcttcccatacgtgatcattttgattctattcgttcacgcatgcacgctggatggtgccttcaatggtattatgttcttcctaacgccccagtgggatcaactgctgaacgttacggtctggtatgaagcggtaacgcagtgctttttctcgctatcagtttgcttcggcgggattattgcctacgcgtcgttcaacaacttttccaacaatgtgtacaaggacgccataataatttcctggctcgacaccttcacatccatcattgccgggtgtattgtattcggcgtgatcggaaatctggcttacgtaaccgagcagcaagacatccaggctgtggtcaaaagtggcgctggactgaccttcatgacctatccggatgcaatcgccaagtttgactggctgccgcagctgttctctgcgcttttcttcctcatgctgttcattgttgggttgggcagcaatctgggtgtgacgaccagtattgtaacggccatcaaggatcagtgccctgaactgaagaactggcaggttgtgtcagcagtggccgtagctggattttcattcggtatcgtgtacttgacgcccggtggaatgcatttactggatattttggattactatggtgcgaaatatgttacgttgacatttgccgtactggaacttgctaccttggcgtggatatacggagtggaccgtatctgcagggatatcaagttcatgcttggcatcgaaaccagcctgttctggaggatatgttggggggttgtaacgccgttggtgacagtggccatcctgctgttgagcttcatcgattacgaagcgttcgtggttcctgtagggtacaatgttctcggctggttcatctacattgtggccgtgctccaattgcccggttgggcattgtatgccactacacgtagcagttcgaaaacgattgactcgtggtggggttcgctgaagaaatcgttctacccgctgcctgaatggggtccagaagatgtgccaacgcggctacgctaccaggaagaagtggaacagcatgaggcaacggtgccgcgagatcgcagtctcatggatgtcatcaagcggaagctgctgagttgatagatcgctggagtaaaggagtaaaagggtgttgatttttttacggtttttatttgttttcaatgtgataaacttatttacattaaagtttaataaacaatgttacaatatatgaagtaaaattccacattttatttatgatctcaactatttgttccctgaatggactatttgtaacttgatgtatttcttttgacttcatcaacttttgtgatttgttacgcgaccctaatataactgtataactcaatattttcttaaacgaagcaagaagaaaaaagtatttaacaacattttgattcaaatgcc

SEQ ID NO: 1022 - DNA, 2112 bp, Aedes aegypti
ttttgtccggttctgattccctgacgccgccgatcaaaaataatctggcgcacaggtcagtctagggtaaatcaccaatagttaaacgaactaaaatctcgttaaccgttatgtttgacaaggatttgaccagttcaacgattggcaaataaccctttcttatcgaagcccgccgtacagcagattgtcaatcgcgaatcgttaacggttttataagagcacgattgtgacccaatacaactgtctggccggttgcaaccgctctatctgtctgctcccgagcagcttcaatgatttggccaaggcattgtctgtggtctgtgacgcgactcacgagtatttatgcatggcgaaaatggcaaacgcaaaaagtgtgtcccaaaaccttgatatggagtaaacgcacaccaaccaacttgacttggtattgagtctttggctgtgcgaaaatcgtttcagtctccagcgccaataactgaaaagtatgcacgattatgaccggtaatacgggtactagtttgtgtttatacatcaagtgaaacggttgtcttaaaacagttattgtgggttatcttcggaccatgccaatcacggtagaaagtttagaaaagttcgttgagattcgtatgccgtaatagacaagaattttctaatttgaatactgttttttagaaaagatgcagaggaatacgatccttttgcgcacaggcaaattaagaagccgaacacaaccatcggaagcttcattcatctggtgaaaggatctttgggaacgggcatcatggccatgccattggcgttcaaaaacggtggactgctatttggtacgattggatctatagtgatctgcatcatttatgctcattgtgtgcatttgctggttggtacatcacaaaaactatgcaggaaaactcaaacaccagttctagattacgcagggacagcacacaaagcatttgaaactggaccgttaaggataaaaccgatggccaaatatgtatcgtatgaaaaatcctccgttccttagtataacctagtataatgcacttttccttctagcatttttatagactggatgttggtgatagatagtatactatctatttgtctgtacattgtcttcatagcagaatcgatgcaaggcgtaatctacaaccaacaaggtttagattgggatactcgaatgtacatcttaatactaatgattcccatcgttatcatcatgcaagtccgggagctgaagcaacttgtcccattcacggcagtagccaatatgctcatcatcgcatcggtgggagtttcgttatactttatcttcagggaaccgatatcacttgccgacagaaatctttggccgcaatggactacctttccctcattcgttagtacggtcctctttgcaattgctggaatcaaaacggttcttccgatcgaaaacaagatgaagcatccgggagatttccttcgacccctcggagtcatgcagagtggtctcgggatcctgacggtactttacggagtaacggggttctttgggtatgcccaatacggagaaattaccaaggggtcggtaaccctcaatctaccaagcgatagcggttgggcagaaacgacacgactactatccgccatcggtatcctagtttccctaggattcaccctatacattccgatggagatcatctggcctcgactggaagcgaagatccccctcaggtggcacaatgtgggacagatcagtatccgaaccgggttggcaattgcgatggttggattcgctcttgttgcacccaaagtggaatcgtttatcggactgttgggatcgtttgggacggcagtgttgtcagtattgctgccggttaccgttgatacgctctaccgatggccaacggatttcggttggtgccggtggagattagtgaagaactcggtgttgatattgtttgggctttttgtgcttacagtggggacgtactttgggatattagatattgttgcaatatatcagtgaggaattgtgtcgttattgttatttgtgttaaactataaaataagagctgagagtaccaaataataaacagatatattgacatttttactcagaaagtaaca

SEQ ID NO: 1023 - DNA, 1557 bp, Aedes aegypti
gcgtgaatcagtgaacccggttttcgctcgataagttttcgatctgatccgatttcgcctgacgtttggaaaatttgtttacatttaatcgccgactggtgtttactccgcgacacgccacagaaacggaacgaaggtcttagccgtctgacacagacaccgcaaagaaaaaaaaaaaagaaacggaacgaagccaacgaatcacagattatcttctattgattaaactgtagtcaatctgttgatctttcctttgaataagctctcccattcgtaatgtcggacgaggaagtgattcgacgccgcttgcaaatcgatggcgatggcacaggagacgaccgccgtttgaatgatctgctgaaaaccttcgtcaagtggtgcaattcttcggacagtccagaaaacagtcaagccatccacgatcgattgctcgcccagttggctcaatgcgaatttgcaatgaaaaagtcggatttctctgcccgggtaatggagcaggagctgaagaactatgccacaatctccgacaccatcgaatcgggaatcgaaacagctaaaacacaaatcgtccagagcaaacagaacctggtgttggccaagaaaatccgcaaaaaccgtatggagtacgatgtgttggccaaaatcatcagccagcagcctgaccggaagaacacaatcaaggagctggaaacgctgaagcaggaaatggatcaactgcaggagaagaaggcagttctcgagcgcaagctggaaacaaagaagaaggactttaccgttctgatgcgatcgatcgtcgagctgcagaacaagctggacgcgatcgaggaggattgccaagatatcgtcgaggacaaaatgtcgtgcgacgatgaaccgattattgtaagtgatacggttatgatcgacgatactgaaaacgaatcgccgaggaagagttgagttcagctggtattataggaatagtcgttagggtaaaacgtcctcatcaaaaataaacgaatctaaaacaattttattttcatctgagacgtttttggaagacgccgaaaagtgaacgaaatgcgagttgttcgttcaagaatatcgtcgagtcaaactaggtaacccacttaaaaaaaagctatattgcagtagaatatacattttcatctatcaaattctgcctttttttaattaaaaaaaaaaaaaaataaaaagaattttaagcttttttttctggataaacgcatagagcttgagatttctgtagctaacttttgagaaatgtattgaaacgtttctgtaaaaatccttaaaaggaatacacgaagaaactctaaaagaaataccaatgttagttctttcaggcatctactacaaagctcatgaacatttctagtgcatcggaatcagttttgaccaactttattaatgggatctctggaaaagttgctgctaaatccttgtaaacaattatgtatgtggattttttttgagattttacgataaaaatccatagcaaattatttatatttgccatgtctacctatgtatatcaagtaatagtcattatactac

SEQ ID NO: 1024 - DNA, 966 bp, Aedes aegypti
atgatggccgagtcggacaacacggcggaagcgacgagacggctcaacgtcaagaagcaaacgctggacgatgcctatgcgattccggccaacttcctggagatcgatgtggtgaacccgctgacgacggtgacggccgggaagaagcgctacaccgactacgaggtccggatgaggactaatctgccagtgttcaaagtcaaggaatccagcgtccggcgacgatacagtgacttcgaatggctacgaaacgaactggaacgcgacagcaagatcgttgtgccgccgctaccgggcaaggcgtggaagcgccagatgccgttccgtggcgacgacggcatcttcgacgagaacttcatcgaggaacgacgaaagggcttggagcagtttgtgaacaaaattgccggtcatccgctagcccagaacgagcgctgtttgcacatgttcctccaggagcccaacatcgacaagaactacgttccgggcaagatccggaacacacaagtcaaggtagtggatcgtcggcaggccaagctgttccacatgggttatctgtatcacaaaagtggtcccgttcggagaggagtcgtctactaccgatgttcgaaaatgcgcctcctgaaatgcaaagcgacgctatcgctgaacagcagcaccggggtgatacgattgggggctcaacatcagcacaaccatccaccaacacctgcggctggacaacgacagaacgtaggaccagtgttgaccgatgaggacccattccaagggaaaaagatgatgtaccaagggttctacttctaccggaatggagcgtcggaacgtcggttgtactggcgctgcgccaattccaacacccttgggtgcaacatgcgactgcacaccgatcgccagggccagatggtggaggtcaagcaccaacatctgccccattgtgaagccttcgcactccatgggttagcgaattga

SEQ ID NO: 1025 - DNA, 2838 bp, Aedes aegypti
caggcgtcgtccggcttgaagatggcttatagctatgtaggtagatagtgccttctaatgacacgagactttgactcgcgcgagttaggacgaagtctggtcgagctgcaagtcgcattgttggataaaatccgcgcttcgcatatatacgaaattgattctagcacttggtggacattcgtcgctcgaccgttgaaatgataagaccgtgagttccgcgagataggtgaatgcgcgcgtgatcttggccagttttctctcgtgaaggtgtttgattttgattgattttacgacagcggggagaagaagatttgtgcaaatacggttcgagtgacttgccaaacgtcaatcgataaggatttgctgtgaagtgtatcgagttggaaaccttcaaagaaatgataaacagtgtttaggcagttcaggaagaagaaagcgaaatgaagttcgataaaagcaacgcacaatcacccttagtgggtgatacggtcatcgaaacaccgcatgaagaacccgaatacaccagaagctcaaccgttattccgacagtagttgttagttgcatatgcttagaagatagccgtaaaaaaagtgttgaaaaggaacaaagggagttacaaaacctagaaccgttggagaaaacacaagatccgaagaacccaccgacaatattggcatcattctatctagatgggaagctagaagagctggacgagcaatatttgcaacagaaggaggaagctgacgacgagaaatttcattctacggtcaagggagttttcaatcagtgtctggtgacatgtgcagttctggtattggcggcagcatgcgggatgccgattggatactcggccgtgcttcttccccagctctacaacgtcagcgagccgctcttcatcgacatcgagatgggctcgtggatcgccagcgtgcacagcctagccacgccaatcggttcgttcgcttccggtcccatcatggaccgctggggtcgcaaaccggctctgatgcttgcgatcgttccgctcttctttggatgggtcttcctggcgactgcgtcatcgcacttcctcatactggttggacgagttgttgccggtatagccgttggattgattgccgcccccgcacaggtcctgctggcagaaatcgctgaaccacatctacgcggactgctcatcggagtcccattcgtgtcctactcgttgggcattctgctggtctactttttaggaagtttccttcactggagagaggtggcctgggctgggacagttcttcctgcagtatctttcctcgccatagcagtgatgccagaaacgccggtctatttggcgcgaaacaaccagctccagaaagccgcaaaagccctgcactggctccggggatgcccgatacaggccaaacgggaactggtccagctgatcattcgattccgcaacgagacactggaaggcaacaacaatggcatctggaagtcgttggcggagatttcgctgatcaaaccgctggtaatcatcaacagtttccacgtgctccagatcctatccgggacgtacttggtggtgttctacgcggtcgacatcatctccgatatgggaggcagcgatatcaatacgatgcaggcagcggttttgacagccgtggtgcgactggtgttcacctgcttgtactgcttcctactgttggcaatgcctcgccggacgatggtcattggcagcggaatcggttccggtttgagctgtttagcgattgccattttcatgtacgctcgaatggacgcgttgaagacttcgatggacacctacgtgatggcggtgttcatcttgatctacatcggggcgaatacggggttcatgaccatgccggggatcatgattggggagctgctgccggcgaagatccgcggccagatagcaggctatctgttcaccatattcaacttgctgttgttcggggtagcaaaggcatttccctacgtaaaaaaggtgttcaaaactcaaggactgtttttgatattcggggtggcttcgtttggggcgtccctcttggtgtacctaatgctaccggaaacgaaaggtaggacactgcacgacatcgaggactacttccagcagcgaaactggttctgggtgaacaggaggataagtcgtatgaaaggggatacgggggtagaagaagaggggacgccattgaaggatgttaaaaaatgagtcacagataaagctggaatcatgaagttggtcaacttataactttacttgtacatttttgtaaatataagtgtaagaataactaatatatttcgttgaatgtgaaactttctgggcctctattggatgaaatgtgtattcagaaatttagagattataattatgtccatttcaaatttcaataaaattttttgacatcacacgacatacaaaattgtttcacgatcaatgtttttgtaaggaatttcaaggaattatcgttaacactcttctattctgctctgttctatttttcctcattccagaatttcttgttttttaagagattttttgagaattcattcaccattttgtcaagacattccttctaattccttctaaatgggcttgctttctaaaatgtgtaaaactacttcattttcaaaaaagtcgctaacattttttaggaataaatataaaaaatccaataaatgaacaaaactaaatttatatcaagttcaaacaatgttgtggacaacaagtttaagaccaatcacaatctcgctgaatcattcattcctgagcatgaattttatacaggagaacaattataacaaacatgaagcagatctaaagtcagattaat

SEQ ID NO: 1026 - DNA, 6994 bp, Aedes aegypti
gcgtcataatctgctggctttgcataatttgcggttaacgctcgtactagcatcaattctagtcggcatctgtgaggtggcccaacatagtgtgatcattcatcatcttggtcagctggaagcggaaccttcgaatggaggcggccatattccaaggcctaatgaggatgccggtggtcagggcggtttggaagatggactgcccgaagctgaatcgaacaagaatgcacaccatgaagagctaaattatggggtgtccatggaaacggctgttatgggcctgtgttctttctgcctaggaatggtttcgattattgtgggagcagtattcgtgcgagtggtggaacttaaagatgaatatggactattatatatcaccatgacggttcaaggcgctcaatgcattgtgaagtggtgccaatttgaatacatctatggtgtcacggacagcgtaacggcgctgtcgacgtcgttgacccttggttcgtcgctggtgctggcagcacttgccattgccgatggtgttacgctgtatcaagagcgaaactcttccggtcgacggcacatatcgttgataatgtcaaaagatacggcgacagcgccgatgacgggtaagggccacaagtcctcttcggtgccgttcctgtcacggatcactttctggtggataacaccgctgctttggcggggcttcgtcgagccactggagctggaaaatcttggaaaactccccgatggggacaccagtcggttccattacgatcagtttctatccatttatcagcgcttcaagacttcgacccacgccctctggcgctgttacgtgttcaactgctggcaaatgtttctggctggtggcgtttttaagctgctgggcgatctatgtgctctggtgggaccactttgcatatccaatatcgtcgattacatcgcaaaacccgtgacatcttcatcgttgacattgaccgttggcagagggggcggagaaggaccgggaaacggtgtaattccaaaggatgactcttcgttaccggcggagtttaatcttgggaatcaatcacttttgacagatggcaccaccatactgggtgagaaggttcaattgggtcctctgacctggagcgaattgctagccaatggatggtttgtcgcagtggtggtcctggtggcctcgttagcgcaaggaaccttttcccaggcgagcacccatattatggatatggagggcatcaagctcaaaaatgccctacagggattagtgtataggaaaactttgctgctcagtacaagctgtttctattccgacggcgcccgcgaatcacgaaaagtttctgaccagaacaccgccgatgatggaaaggtggcttcgaatactaataaaggcgagattgatgattcaacaagcggtggaagccagcaaggacccaaccgcatctcccattccgtgcctcctgaaatcgataccaacatgtatcgtaccgctgacgtaaatctgcctgatactgacatcgataccaaggacagcagcagcgggaatgcttttgcacccgaaacagatgtttctaccgcaacaccgccggtatcggcaccggaatcgacgctattcatccagcaccgacaggaggagaaacagcgcacaacggaaaagaccaaagaactaaagataaaacatgaaatacctgatgccatcgatgataccgatgatcagcaacagtttgacagtgcctctggtgcatcgcagcatcgtccttgctgggcatcggcgtcaaggatgcgtaagcgtgatctatttctaggctgcatcggaaagcaggcgaatgccgttgcatcggaagccgcaaaccaaaaacaggaacaaccagaacaggacgacggaaaacggaagaactcggcgaggcatcccggcaagggagctccggataatcgacagggttgtggtggcagcgatggtggtaattctgcagcgaccaccgatgccggtaccataacaaatttaatgtccgatgatgcctttaacgtgatggcattcgtgaagattgcacattacgtgtgggctatcccgctgaagattggcgtagtgatgtaccttctctatcgcttgctgggtgtcagcaccattattggatctttcgtatgcatcatcacgatgactcctctgcaatttgtaattggaaaatatatgtcggccaactcaaagaaaacctcggaatgtacggacgagcggctcagacggatcaatgaagtattgctgggaataaaattaattaaactcagtgcctgggagggggtgttccgggagaagatttccaaagcccgtcggaaggagcttaagcatctggactgggactcgtgctattggacaatgatgatgctgctcacgcatatatcctcggtgttgataacgttcgtgacggtggccgttttcatccacttggagcacggcggaagttcggcggagtcttcagccggagacggaaggatcgaatttaccgctgcccgtttgtttgcttcgttggcactgtttaaccaactgacggtgccactgtttatctttccaatcacgattccgattatcctatcggcggtggtaagcaccgggcgtctggaggtgtttcttcgcaggccggaagtacgaacgatggttgcgcggccgtccggtcgtccttcgctggatgtggttcgaagggaaagcagcgggatgcgaaatttgaaccggaggggcaaacaaccactactgggcaaagttgccgtaatccgcgaccgggaggataatggtgatgagagctttgcgaaggatgtggtgctcgacgaggaggaggaggtggtggaggaggaggaagaagacaccaaatgggagcaggaaggtgctatgcacttcgagtgctttgatctaccggaatgtgcaaccatccagtcagaaactccaaaagctgacaacgagtgttcggaatcatcggaatgggaaagtgagattgagccagatgagcaattacggggaactgaaactttccccggcatggatggcgcagtgtcaacaggtaaaacggcattcagatacaccggtgtcccttctgcaaggcgaagtgaaaattcacagacgattatcgatgacactgatgataggtctgaaatgaaccgcagaatgaattcacaaacgaaggttccccgaacgaataaaagccaattgtttacctgtccacgattgagggaaaaacgcctacgacgaaaatcgcatcatgccgagttgacaaggaatgatgatgagagatacgagccggttccgaaaaacgacgacggtgcagaggaacccaataattgtgctccggttgttatcgtgcgagatggccgtttccagtggggttgcaataatgaccgaagtgaaaattcccagaactctggaagcgtccttgtagttaaccagcttagtattcccaaaggaaaactcaccgttgtggtaggccgcagtggcagtggtaaatcatcattactggcagctttattgagggaaataaatcatctgtccggagaagtaatttggagtcaatattcaacaattgcttacgtcccccaacggccctggcttctgaatgccaacgtgcgagaaaacatcctgtttggtgagccatttcggccaaaacgctacaaccgggtgctgaaagtctgcgcactcaagcccgatatcgaactgatgccggatggcgatatgagcgagattggcgaacggggaattaagctgtccggaggtcaacgccagcggatcgtgattgccagggcactctactcgccggccagcgtggtcattatggacgatccactttcatcgctggacaacgaggtcgccaagtttgtgtttgaccatgggattcgccggatgctgacccggcaaaggcgaaccgtcgtgatggtgacacagatgttgcagctggtgtacagcgcggacaatataattgcagtggaggccttcgccgtggaagcaacaggtacattatcggaaatcgaaaacaattactcacacattctgcagaagtgggatgcaattatcgccaaggagcagcagtccaaggagacgcaattaagtccagggagaacagctcgggagcgatggaagttgttcaaaaatgtgtcacgaataagtttcttgagaagtcatgccactgaggagttctatgagcctccggacgcgccactgctttatcgaccgagtgctaagcagcgccacagctccagcagcttatttggatcacgttttcacacacacgatttgccacttcccatcgatgagtgctgccacggcgagaatgtccaactgcgacgtcactactcgaaacggtaccggagtggtggtggtgaaagtaatcgagtggtccgggggttcagcgatggagttgcaacagcggcagccgcagcgaaggacaactcccaatcggcggagcgtgatgcattaggcaacaatatcgttcgatcccggtctctccaaacaaagcggggcatttacagtcccaaccatactgtcgatggtcgattgctcccagcatgcagcgcccatccgccgcagtcaccaaccgaactggaccatcctagtccttcggaaccaacctcagcggttgcagccagcgacaaacttggctacgaaagattccgttactccgacacttgtgaagatttgcacaaatttggctttcggcaatttctccgaagaatgagcaccatcggacgtgctcgccatcgacatcgtcatcggtggcgggtgtcttgctctcctaccagggaattatccaccgccatcggctccgtgaagagtccagcgaaggaaactgatgccgacctcgaaagaagtttatcacatcccaatcaatcgctccatggaatgcacaatcctctgaagaggctcttctcgaatatttcacgctacagtgaggaaacggatgatgatgactgggaagaactcaacaatggcgagcaagtctccaatcgactgatctacgacgaggagcgcaaatatggaaagattccagctcggatatattggctgtacttgaagtcatgcggaatggacattgtgaccacgttcttccttagtgccctggcccagcaagggctccgagtgtacactgatttctggctacaaagctggaccgaacggacccaacagcaatcgttcgacactaatagggttgaaccggcagaagttgactataacttccgggtgtatgcagtactgtcggtcatctgcattctcctgtctgtggtgtgtttccctgctgggcagaaagcaggaagcaatgcccggaggcgactacaccagcagttgattggagcggttctgaaaaatccgatccatttcttccaaactgttccacttgggcgtatcatgaatagactgagcatagacgtctccgtagtggacaagaaaatcgctgcaacaagtcaaaagctgctgcagtttatcctactgtgcctttgtgccgtgctcataaatagtgtcgtaacgccgtatttcatcctgttaacaataccaatttgtggcatttactacgtcgtgcagaagttttaccggtgctcctccagagaactccaacgcatcgaaagcatcacctactcgcccatcatttcgcacttctcggaaacaatcgacggtgtgacaacgattcgtgcctaccagcaggagtcgcgtttcaccgataccttgttccgtcgcatggaagccaataacgttgcccaggtcatcctgaactgtagcaaccgatggctgggaattgctctcgattacctgggggcattaattgtgttcattgccattctgagtgcactgataacggcgagcttgagtccggaatcgacaagttcgtcccttattgggctggccatcaactatgcattgttggttccaatctacctgaactgggtcgtcaaactggctgccgagatggagatgtacatcggagcagttgaacggatacagttctacatcgaaagtagccaggagcgaatcagagagaaaagcaaacggaaatacaaacctgtaccgatatcatggccccagaagggagacatcgtgtttgaaaacgtttcgcttcgatatgagagtcaaaaggacaacgtaatcacaaacttgaatttgactattccggctggacagaggattggcatatgcggtcggaccggcagcggcaaatcctccctggccctggcactgttcggtgtgctggaaatcgtcggtgggcggatattgatcgacgacgtggacatcggtaccattcacagcgatgaattacgctgtcgactctccatcattccgcaggatgcgatgctattcgggggaacactgcgggaaaatctggacccacgggggcactttagcgacttggacctgtggaacagtctggagatggcacagctgaaggacgtcgtggtggcactgccggacggattggacaccaggctgggcgaagaatcgtccactttcagtgctggccagaggcaattgttctgcctggcgcggtccgtcctgcgagggtcagtttgcttggtgctagatgaggctacatcttcactcgatacggaaacggagaaattggttctggatgctgctgggaaagccttcaaaggaagaacggtgctcacaattgcgcatcgattacactcgttgttcgattacgaccgggtcatcgttctgaagcatggcaggatcatcgaagacggttgtccccggatactacggagaaaggtagattccaagtttgccaccatgctgaaggcctcttcaaccgagaatcgcaaacagccgttgttaccgaaacccgagcagaaacggcagcacaaatcatttatcagtgaaaaagaggaaacgcagtgcgatgagggagaaacaagtgtttagttgcagtaattggttgtgttttatggtcatgtcatgtaaaataaatcaaaatatcttcggaatatgtgcctgcatgtcttccataataaattcactttggttataatgttctga

SEQ ID NO: 1027 - DNA, 810 bp, Aedes aegypti
atgaaaccgccaactgcagaggactccgctacgccggtcaagcctgagatgtcgacttccggcacgggtagcggaacgcccactacggtggcgtccacatcgacgcaaacacaatcacaacagacacccggcggaggaaccggaagtaacgcctcaaacgccttcgggacggtaaaatatcggatcaagccgccatcggcagcacatgcgcaatcgtcctcgacgaccaccggaccacccaacgctggatgcttcatcaagccttcgctgtcgctaaactcgctgccaccgcaagggccccacgaggggtccgagatggcacaaaacagactgagaatcgatcggccatacaatagcttaaagaaaaagcgcgactcagagcgcgaactgtggcgccggtcgtggggcagcgggcacagccatagctcctgcagcttgcagagcagcatcacgaccggcatcggcaaggacgacttctgggcggcactgcagaccaactacaattttatcatggacacgaacctgctcgacagctgtcgggaagcgcgaggcgaaatcgaagggtccgttgtgcgacccagggaggaccacatggactactatcggagggccatgttcaaaccctctccgatgcagacgttctacggagatccccgcctgctgcggcagtggatcagggagatggagattcgcatttcacggattccttcgattacggagacgaagaggttgaacacggagcagttgctgaggctctctggagaacattcggtgagtaaatcacagcaatctatttttgaacgacgctga

SEQ ID NO: 1028 - DNA, 2253 bp, Aedes aegypti
aactgtggggtgactgtatatgtatttaaaatgttcatcgttatactgatctctagatttacgtctcataaatctgttagtgtgttagctatcttattacttttatttctcatatttttcttatgttgcccagtgtttatcttatctttttccaacacattctctgaacacataatgcgcattcgctccacctgatgttcgctgttttaacccatcttgatgaaaattccataaacaaccggtttgaaaggtgtcctttttctactgttgatgttgtacccggtcaccaaattgaagttctgtcatatctagctcctgcctccctctgacacttacattttttgaacactaacacttctctaagtccggtatgcgagtgctcttcgcataccatggagctgtcctccgttccctctgctttcggtatcggaattactctacagcaagttttccaatggtatctgttattattttcactgcagggaagtacactccaaaccgcttagtacgaccctggagtcagccgtggaatcatctagcggcgcatgttcggtttgcccgtgggactccccaccgacctccaaagctttggtccctgtcgaaaagaaatccgcggctgccgagaaggaagctcaatcgtccgtttctgtatccgtttgtccttgggatgatggcgatgcaaaactaccttcagacaggtatctttctggaaggagtatttaaaggacagtttttaaatgcatttcttctcagttctagcaaaacaaaagctctgaatgccatccgttcatccaccgatatcagcgaagtttcggaacgcatgaagcgatcttgtgggcttcggcagaataccttggacagcgactttcacagtacaaaacggctggtaccggttgtgacggaacaaagacgagcttccatgacaattgcaccgaggttgtccgatttacaattttccatacgtgcgaactcagctggaagtgaaaccgttggaagcagtgcatcactacaacagcagcattctgtggactactctcggaatatattgcaaggatcgctgtcaactagcttcgaggaacgggaagatgcgacgggaactccgaacgtatcggaggaaaatttagtcaagataaagaaagatagtgtgtcggagttagagcaagatcaatcaagcattgctacaaacagtgttgttcagaataaacctactgctcaagtgaacaaaaacaatgaacgtacttgtgtgtgtgccacaatacaaacagacattactgcagtgggatatagtgtgaagcaagaagaaacaaaacatattacagaagaaaatgtcgctgaatctaccaaggcaatgcccaccgccgctggagctcaaaaaagtgaagtaatgggaggggaaaaattgccacccacaatcagtgtatgctttgcaaacaactcctcggaggaggagtaccgtcgaaaacgatcattagaacccagcggcgagaaaatgttcgacgacgagcaggaggtacgccaggaagtggaggaggtatactttaccagcgaggaaaatgatgaagaaggtatcggacccgggttgtaccaccgaatgccagaaccgccccaggatatgtctcctctggcggaagatgacaatttctccgaatctctctcccaaccaaatcagtcctcgctggagcaggtcgagtacgacatcctgatggagggagacaatctggcaccgggatgtgtggccccagctcctacgcctgcaccgtctatcgcaccgctggccgaagttgagatggatcccggtgatgacgaaccggaaacggagaccgatcacaccgaaacggtgacagtgcacgtgaccacccgggagaaacaggaacaggaaccggaagcgtccgccggggcaaccgtagtgatcatcgaggatcaggtgaagcgcaggaaacgtcgagaacgaaaggataaggatggcgttcaacagcagaaaagtgaggaagacagtagcgaaaagaaggggaacgccgtgtgcccctgggatgacgaagatgattctgctacggatgatgctccatatgtgaaaacgtactccactctaggttatctgtgaggattttaaacatgaactacaaaaatcattcgaagcgtggatccggaaaacagtaaagttatgctgaaggtggagttattttttgaagaaaatgtattgagtgtgttccttgaagtactcgtttatgataccgttaagaatgatgtatcgtc

SEQ ID NO: 1029 - DNA, 285 bp, Aedes aegypti
aacgtgagcccaaaagaggccaatatcgccaagaaacctgcagacgacgactcgcgcacttcccgtatcagtagcagcagtagtagtagttcaatcaaaggcatcctgaaaacttatcctagtcctacgcttatcaacgacacaatactactgctaaagcaaaaataccggaacaaccaaaacttcgtctgcagacgaccaaacttgatcgtgtgtcctagtgtgttgtgcatgtgtgtatgtgtcgcagtgaaagttaattttgtaccgtctcgaagaagctaa

SEQ ID NO: 1030 - DNA, 6753 bp, Aedes aegypti
gtgttttcaaattttggttttgaaaattgtttgaattttaaaaaatgtggttccaaggaaaccgtttggattgttatctttgtaagttaatatttgttgaattggtaagttaatatttgctctttttcaaagagatttcagtctttcaatttgtttcagtcttgttgttttgttttttttttttttcaaataacgtgtacaaatgttttgattgtaaaattagttttacatcatttccttagagaatacgaatggaataactcgcaaatcgagtagaaaaaagtttcagtgaagtaaggtaaatcagttgcagtgaaaatgtgactagttcagaaaatacgttccttggagggaatcattttgaaaatcgaataaatccttgacctagacgatggaaaagctagttggacgaaacgtccgaaactctatcaacctcagctatggaagattctactcgaaacaaaaccagaaaaaaatccaccggaaatccctcgtggctgtggtctcttctcgcttgccgcctgggcaccgtccgtaccgtcaggctcttctcgctggccaaccacagttgttgtcctcatctccgcctccgcagccgccgcatccttcgatgtcctgtccctccgttggatcgtgctctcttctcgcttgccgcttcgaccgctcgccggcgatcgaagctcttctcgcttgccgagcacgaccgatggtccctccgctaccgcattccctattgttctcggcccatcttctcgcgactttcagcctcctcttcacgcttgcctgggccacctgtctgaaatcgtccgacgtcggtcgacccgtacccgcgcgtcgcgtgtcgttcgttttcttccgtgccgtcgtttcgtttctcggttgtgctcgtgtcttcttcgttttggacagttgtttttaggaataggaagagaaaagatcaatttctcgaggcactcttccgggcgtccttggttggggcatccaggctcaaggtaaaaggccgcccggctcgcttagccagctcggccagtattggaaacaaaaacaaaacccataaacggtcgtcgaaggttatataatagtagaacagctttcgcatcgataggttaaaataggaagaaaatgttgagttttcagatatgtgcgttttctttttgtttcttcttgttttttaaatattctggaaggtctcgaaggaaggaacttgagtgtgttggtttttcatacgtattattctgcatccgacgatgatttcgatgattaacgcccgtcgcctaatcctagaaatttgtttgcccatctattttggagtagtggataagtggtggttttgagactcgtaaacgccgtccaaaaacttagttcaaccacaggaagagaaagccttttcgcttggaattggcttgacggcactttttcaacttgtgacggcgtttgagaatgaacccattgagcgcggtgttcatctctgaagatctcgtagtttgcaaactttttgtatgatatcactttcacttttaatgttctataataagtccatggatggaaacatgcttttcgtattataaatttaccatcttagaatttttatcacattatcacgctctttcgaatcgtcctttgtggagaggatgaaccccattttgcgagggaattcacctcattagagcggtagttttaattttgtttcaggctaagaaagccttttcactaaagctgactccgatcggtagtagtcgattgcgtctttactcgatgaactttcaatctccttcggtgttcatttcaggaaaatttacagattactttcaattttttacatttctctacactgctgctgcagacgaactagaatgaaccccattggacgcgggaattcacctcctgttcacgacaaactgcattttgggatgccgtttccgttgccaagctcggatgagctggcgggcgcgcctggaagtgaaccccattggacgcgggaattcaaatccggcattccacgagaatgaaccccattggaggcgggaattcatctcggcgccaaaaaaatctgcattgacgttttcacgttgttcacgggtgaacatttgcgggtgaaccccataggacgggggtattcatctcgatatttggtattcactggtcacgatgaatcccattgggtgcgggcattcatctcgatcaaatcgcatcaagattctgatcatgttttcgaattctgttgaagatgctgaccggcgttgaaaggaatgaacccatttcatctacattgcatgagaatgaacccttcggtttgagggatggaattcatctcagcagttgactagaatatcacacgttagatgtttgatcgatgggaaaaccgtagcgattcaacgaagatgaaaccattgacgtttggaattcatctcgtaaacgctctcttaattgattgatgaactcgttgacttttcaatactaggggaaaggccccttctacgttgcaattggtttaaatcactctctcgaaatcgcatagcgatgtttcctagcagacgatgtactatcgctcgttctaatgatgaatcatgtgttgatcaaaatcaggaactctctctcaaaaatcagcctccacaaacgcatcaaagccctttggttggctggtcgaaactcatttggtcacattttcacttttcctcaagggtgggggttgcaaagctccgtctcatcggatggaaaaatttcctctcatctcactgttcactctcacttcactgctcctaaacctcgatgccctcaagtaaggggggggaatttcctatcactgctccacgtggggacattttcctcgtcaaaaaaatcggcctcatcggatgatccactccaagggagggacgaacgatgccaaatcggtgacgcagccatcagtacgtagccatagtagtacggatgatgccacggtcgaaaaattcggaaaatctcacaaacaccactgagccaaagcctacttcatggaaaggggggatgattcggcgtcgaaaaccctcgaatcgttcaatcgatcgtgtacccaagttacaaggaacccaaatctctcgcaagatatgcgtgtcaatcatagatttagtgaagaggggggcgacaatagcccatctgaaaataaaagaaagaacccctcttccctcccacaaggttatgtttaaaaaaaaggaggggcgttaccgtaacgttttggtctcgttctctgcttgatattcggagaaaaccctattcgtgtggtcactgttcggaaactgcgctgaaccgatcccgtttggggtgcgtttaggtcttcttgcggtgcgtgcgtgcggtggatgacatccatcatcaatggttgttatcgaaaagggggggatgcaacagacggaatgtatttcgtgcaaaatctgctcggcctcgttgctcgtggggatgaaccaagtatgtgaggaagtagtgtagcactagtaatagtagtagtagtagcggtagagggtgttcgcaattatctctgcgccaaaccggaaagaagatagaagcggcgatgtgcacaggggccacggccacgtccttgcgcgacggccggcttgcttggatgaatcacttgatgcttgcgggcggtatgtgaatggttggtatggtgtgtatgtggtctacttgctttttttacgtaacgcatgctccaactttatacgatattaatatataatatacacttggtttgcgaatgtgaatgtgcactaaatggcattacaatacttcagaacaatagaaatgttataaatgggggttacaatttcaagcttgatcgaaatcacatagcattttggggaaaaaactaacggcacttctttgtagcttcacatcactatacaatttttgtttagattttccgctcgtatcgagcaatgcggataaacatttcaatgaacattaaagaaaaacatacaatttctagaacttcaggttcaaaatcacaatacaaatacaatgcaatggcttttcggtttctatcatacaatgaaatctgttggcacttttcaaaagcatattacaataaaagaaacattacactttgaaatcacaaattttcaactctcgtagctgttaaaacacactaacactagtgtaaaaacaagttaaacaataaacaattcattcgttgtcaactgctaaaaaacactgggacaaatcacaagggtaaaacggtacaaactttcaacttcttttttccattttcatcttttcagcgctgggcaattcacagaacaccgagcacaattttcattttataaagcataaattttcaacttctaatcattttgctactctacatttatgaggggggtgctggatgcccatgggacaccgagcgagtagccacgtcatttacactccgcaaatttcctatccatgctgggcgctgcagagcaacaccgagcgaaatttgcctcgcttatttgcacatacttttcttctaaactttgctctcttcgcataactttcattttagggcgctgggaacttcaccgaagccgcagcttttctgttttctacaatcacatttacaatacattcagtaagcttttgggttcgcttcaagcgtagcgcaattcagcttcaatcttctgatttcatttttttcatgtcacaatagattttcttctggtggggtttcatttgaaaatttttggtttgcaagcacaatagaaataggcatattacatcgatcagtatatgtgtgttagttatgcgatagaaatatgaacaaactactacaagtcagtcactgcttaggtgctaatatatcttcgattccgtacacatttgcacttggcggaataatgggattacatattttgttcagtgctcttaacacacaaaagcatttctagatggaggataataacttattttttcttgatagaatatacacagtagaggttaagcataacactttctaaaaatagaaatggaaccacgtatgtgcgtaaatgtaaatgtatataatatataaaaatgttacataaaagcccaaaacatagccttagttcaagcgggttgtacaaattttccagtacttctaactcttaaaatgtaatttcacagccagtatacagtaaaaccaataaacgtataaccacttcaaacactagtagtaaaattagagtgtagtaacaattgccgttctttttcgcttctgtaaaatagataaattacgtgtttaatcataaaaacaaaccccgctggccgactgaacgccaaccaagcggttaacttctaccacaaagtaaatcactaaacgcactacaaagtgaattattagatcggtttaaagacgtaaaaaggtagagtaaaaaaagttacaaaaatagagtaaacaaaattagcatagctaccaccacatgctctcccaaactcttcgggtattggggctttcttccgaatcgcagtaggcgatattcgtttccacacttaaaacaccatctctctctctctttctacagaggtgaggcactaaatcccgcgttagaagaagcacgcataacacgacgcaattgctgaacgtcacaagaaaagccagatgtatctgctgaagaatggtgttggtggtggtggtggtgggaaggtggaccgccaaaaaggcctaacacgcacacgcacggatctaaccttggtcgcacaatttcggaaaaacgccacacgagttcggtcgcgatgtaactacgtctcagatttcgattttctgcaaaagactaaaattctggttgtcgggggaaatatttcaacactggtttaccgctcgttccaatttagagtgtaccgtcgtcgacgtgtcgcccttggcaactgcgcaatttcttggcggcatggcctgccttctagatagctagttttgtcttccgacgcaatttgttccatttgtggaaatttcaaaagctgcaaagtacgaaaattctggttgtcgaggaaaaaaagacatttgcttacgttcaacgatgaaccgcgcgctccattcacaatatgtagctgcgatgcgtcaaatttgtgttctggttggcaccaactcggtcgctcgaaatcgccgtttcccacattgttttacaattttagctgcaaaaatttccaaattctggttgtacgaactaattcggtaagcttacggtttccgtggccgtccaaaacaggtcgctccttcgtttcgaatggatggaatgcttcctttatcctctaaagatggaatcgattccccccttgcggagcaaagaaaaagacaaactcacaagacgactcgttgggctcaactgcaaaagaaaacggagattctggttgcgaaggtatctgttgtcaaggttaccgctaattccgtcgtcgccctggtcgtagccgtgtcatacaatgcctactgcatcgtaacgacgtgctctgcctgccgatctcctctcgttctgtctctgtcttgggcttttacatgccctcatcttctgtctccctgagtacttgttaactctctctctctctgcctttcctatctgtgtgattgcttttccaactttttacggggagggtatgtttgttatcgtgtttcgcaagattgcgtattaggcagcagatgttaaaaataagagaaaaacaaaagaaaaacacagaaactcggctggttatgagagccggaccggagttgtgaaagaaaagccgggcctttgggcggacgttttcccatccgaatccgatcgcgtccatttccgggaa

SEQ ID NO: 1031 - DNA, 867 bp, Aedes aegypti
cgtccgccaaagtcacgacggataacgagcgaaagtgttgtgcgaggtttattcgtgaaaaaagtgttactgatggcgtctggagtcacgtacgcgcacgtaaagccctggtgttgtttttggtgaaggaaaacagtgcgtcccggtgacggaagtggccgaaatccgacagggaaattgatccgccggaagcggtataaccgagtttaacagcacacgcggaatcagctaagcaagaatcaataatttcctgagtgaagaagtgggaaagagaaaaaagtggaaaaagtgcaataatattatattttctgtgtaatcaaacccctggtcgttgaaacagcttgggcatgaaaacagtccaaacttcggaagaagatagatagtgacggaggaaaaacgagtgtgaagagagaaaaaaaaactcactagatgagcaaattttttgacagaaaacaagttacccgagtattgggaggataaaaatacgtgccagtgtgaagagagggagatagttaaagaaaagtgtaaaaagctaaaaaaaacgagatcattgtgtttccatcttgttttctctgcctattttttttttttgtttttcggggctgtacagttaattagtgtattaagatgaaccggaatttggagtgttcctgctgctttaataccaactatcgcaacggttgctggtgctattacttcaatacgaaccaagcccggtgtggttcgtcgtcgtcgtcgtcgtcatctcaccatcatcgtcatcagcatcccaaaggagcagcaaccgtcgttagctcgttgttgtcctcgtagggaaccatcgtagtcgcaaaacccacccccaattctcgtgcatagcatacacac

SEQ ID NO: 1032 - DNA, 1103 bp, Aedes aegypti
attaccatttggtactgtcatgcgaacggaagtgtaccgacagtgccggtgctttttgcttgttaaatataaaattttttagctgatatagttatagaagtgtttgaattcgattagcagatcggtactattataagaaaatggggcagaccagttccagatatcatctggacgccaaaagtcctttcaatcttacacggtggtatcaaacttgctggaaacgcttgaatttctctcaactgaaatcctggggattcatcgatggcagcctgaagagcagcatttgttcaaattcaaactgttcaagttgctttcaaaatggagaaccgtcagcgcaaaatatctcatcggcgatagacaatcttgtgtccgtgattggaaacgttggattccaattggctgtaaacagtcttgagatggagaacctcgagacagcgattttccatctgaaactgggcgcccgtcacctcaatgccagtgctgtattcaatttaggaatctgttacgaacttggaattggcgtcaagaagaagtcaaacatggcgaaaaggtgcttctatgtggcatcgaaccttggccatccgggggcaatgtacaatcttggcgtttactatgctcttggtctcggaggactgggccacaatcggaaaatggcgaagatgtgtttcattgcggctgcggttttgggccaagaggatgccattgctgttttggaccaaggctatccgcaaattgtacggcaagtgaaggatttagaggaccaggtttcgccagataatttacttattatggcaatgcttgttgcattgatgacagtaacaatagcagccacatccatttctcgtttgattgttttcgaaaaatatcacgttaagaaggtaatacgttcatgtaaaatacattacaaaacagttatgttccagcaaaaacgccaacgtattttccaaccaagaaagatgaccggtgggttgaaacactggatgaaaactcgtcttttggaaggccaacacatcgtcgtatgttaaaaatagtatcatatttatatcgatcaaaacattactatgaattagataaataaatatttaaacacgtttactacacct

SEQ ID NO: 1033 - DNA, 3176 bp, Aedes aegypti
taatgactttgaacgcaactgttcttgacaagatctagctttagatataaacatcttaccaaaaataacgattttgatcatttttctatcataaaatatccaaaacccgaatcaatatttgtggaaccttacttgccagtgcacttattgcggttttccttttccatcccttaaaacatgaaaatcaccaacgcttcaatcccccccaacgaacgcttcaacccttaaagcactcgcgaacgaacgcttcagcgatcgtaaacaacaccgaaatgcgccaccagggagctttggcttggcgcacatgtcaaacatcgcgtaaaaaagaagcagcagaatcagaatttttgcatccgttccagacattcactggcagctgcatcatctgcggaaaatagtgcacttttcgtagatcttttcctctggtgggaaacttaccgagctgaggtgcattgtgataaattgtgtgatagtgagcaagttggggggaaaagtccaggtgtcgaaaatcgtccctcaagcaatgagtttgcccagcgcggaagatccggaattcgtaccgaaataaagtgtgttactctgactagtggactctctgaggggccgttctggtgaatgtgctggttgcattcgagatgggttcctgggcagaatccggcgggacgaactctccggccgtctatcggatgaagacggaacggaaactggtcgtctattacgtgtttgtttacgtcttctgtctgcagatcattacgacaaatactcgcacttcgaccctgtggaagttgaattcggaacagggcaagattgtgagcgttccggccggtggcggaggtgctactggaagggacgattccggatacggtgaggatgatctatccgccagggccgattccttacacccggaggaactggaggaggacgaggagtccacgtttaccatcataacgtcgacggcggccaactatcggcacaacacgtggaatcggggcgagggcacgacggaggaactgctgcgacgactggcagaggaacccaatgaagcgtaccttgcggcagcaaagtcatccatcaaaagtggaaatggaagtagcagcagcggcagcagtggcaccaacagtggtcctcctgtttcttcgcctcaatcgtctagtcccgtgtcgcagccagctagtcccccggaggatttgctaacctgtggcaaaccggtcaattttacccactacgacgatctggtgggcgtggctcagcgctacgaacacaacctcgctccggaaccggaagtggcgtatctgttcctgaaacggaagaccggaggccaatcgttggagcacttcaatatcgacgccctggaaaggcggttgcgccgggccaagaaggaacaaccgcacacgatccagctgtggaaccagatcgggaacttttggcgcatcaagggagatgccggccatgcgatcgagtgcttccggcgtgctctgtccatctcgcccaccaatgcggacacgttgctcaacctggcgcgggtactgttcaatctgcagtacctggacgatgcgatcagtttgacaaagcgatcgctggaggtgcacccgccggaccggagcgcctggaggcagtactttacgctgggggagattttcaaagcgtacggccagctgtcggactcgatactgcacctgaagcaggcgttggcgttgcatccgcactacgaaccgatccgacggctgattgccgaaacggagaagatcgagttcgcgtccaacacgacccggatgcagttctacaccggactgatcatcgtggtgctgtccctagtggtgctgctaatggtgacggtcatgctcaaggccaggacttcgaaccacgggcactgcggaggatcatccctcagtatcgccaacctggccaatggcgacggtggaagagacgacggcgatggcgacaccaacaacaacaataaccacccaaatggtcggttgggacccatcatcaatgggttctcgttggcaagcttccggccggccaagcacttcaaccgggctcaggcgatgcgttccttacgaagtgtggcctttcgctcatttcgaccgttccgttatcgtaagtaagtaaaagggcgcaacaaagccactccctatcgctataatattggataaccgaaagaagcacacttacaaatacggaagaaatacacacaaagctattacttaggcattagtgagtggaaataatgcgaaactgcgctaaataactgaacaaaaaactatttattatttactatacgattgaaagtaacagcactcgtatcattatcaaagaaatcagagctgaaaggcagcagctaacaaagtcgcattcgcgtgttagttttagaggaaaaccgaaaccaagtcacaaaaggaaaactcagaatactccctttttattagaggtatgacttagattttaagcgcatcgagccggagttacggccgctccacatacaagacgagacatacacacagaatcctaaaattgcgcgcttcgttctagccggtttgtgttttgtcgccactactaagagaactgagtcggatttacttaacttaccttacttatacttacgtaatttaccccaaaaaacgaataacttcagtggaagttttcatttcaaacgtgaatggatttagtgctaggatttgatgttcaagtgcgtgccatcggcacccactatacggttgtgtaacgttcggttctccattttcgacttaaatgtgggtagaaatttgttcgtagccatcggtgaaattcagcttccttaactttaacccgtttgcgtaaattgtatgtgataacgaatatatcctttttgaactgctagagagctaccttttacctattggcgctggtactcccaggagtggagcgcaattttaatgatttgttttagaaatcgtttcctatatatgattgtagcttttgttccgcttattatgattattatttttgtcgcttagtattagagtgagagcacaaattttgttgcgtttatttttcgaatggaaattctcgaattttactttaagaactgcgtttttttttctcggtgaacaaaatcgaatttaggtagattctagtggtaaaaaagtgagttctgctgaaattgattgaaataaacatgaatcaactaaactgaa

SEQ ID NO: 1034 - DNA, 1734 bp, Aedes aegypti
tagaaaaatcaaaaaccaaatttgataaatttgcgaataaaaataattaattgtcctaaacgtgtttagattgattttagatagcaaaaaatgatacatagatcgaaaaaaatgggtggtagaggtttaagtagaagaatttttatagatttgttttactataatcagtaaatgtgctaacaacggccccctctgggccgctacgtccactctccagccacaaacaatggccccatttacgacaaaagtgattcaattataaagagcactcatattcatggttaaccactttcttctctcttctcctttgcaggtaatggtccaagcggaatatcgctttcctacatgttggcaggcaattggccatattggtcagcagacaaaatccagaggcatccggacgagttgctgagggcacgactgaactactacgattcgcaaaagagtctggtagagcatgacctcttcagtctagcggatggactagaaggtcgcagcacaaacccagtgtcactgttgctggacagcctgcagcatccttgcgctgaccttgggatggatttaccctgcatggtggaatacaaataccacccggagaaggaaatcgaccatcttgttctgggtcgtggtcctccgggtggctcctggcaccgaatggatcccaacctgcgcaccctttcgctagccgcgtggatgtccctgcctggattagccttctccgagtgggaacacagcagcagcaaaaacagtaacaacaataacaacacgaccgtggaaaatcaaaacttcctacggcagcagaataacagcattgcgtatgaagaacgcaacggtaaagtcaacatcaaactatgcccaccgaggcgcaacctgtcgctgaagcggcaactttcgaaggaggtggaaacgagggcactgatctcacgtgtcgcgcaatactacgccagctacgtggacgagatgaatctggccaaattcgatcgcttaaccaacaaacaattcacggtggtatgcaagaacttggtgatggcaaacggagcctcggatctagccaaccggttgggcgtcaagggcgaaggtctcgagatgccttgggtgacctacgagctgccccagttggagcatgcgctggaaaagatcgacgacgaggcacggtcccagttgaaaccggtgctgattgtgggcgcaggactgagtgccgcggatgctgttaccatttgtcggtcatctggcatcccggtaattcacgtgtaccgcaaccgaacggctggcctggataagatgttaccgggtaacgtttaccctgagtatcacgaggtgcataagatgatgaaggactcgaaccggaagtacgatttgtacacacctttgcccgagcatacgattgcagacctgacgcagacggtgagcattatcgtgcaacatttgaagacgggcgaaaagcgcgaactagaagtgtccttctgtgctatactaatcggatcgcgtcccgatctcagattcatagcaggacttacaaagggatcatcaacgatgcaccatgatccaaccaaaccgatagactgtaaaagtaacccaatcgatgtagacaagtataccaacgctgtgcttcggtccccttacaagggattgtatgcgatgggcccattggttggcgataattttgttcgattcatccccggaggagcactcagcattacatcggcgctgcataaactgaccgagaacgattga

SEQ ID NO: 1035 - DNA, 2199 bp, Aedes aegypti
atggacggctatcacgtacaggctcaggacggcagcaacaacacaaacacctattcctatcaccaccatcaacagcagcagtcccagcagcagcatcaccatcatcaccaccatcaacagcagcagcagcagcatcatcagcaaaagtacagtcatcagaatcatcacttgcatcggcaccacagcaacaactccaacaacagctacacgacactgaattatgccgcctcggatgcgggcttcgtatcgccaccgccttcgccccgttccaacagttcgctagcttcctgttcgtcttcatcgtactcgtcagcttcctcgtcttcagccgtatcgtcggctgcgtctacatcgtccggactgtcatcggctgggtccgagaatggatcttcatacgaaaatctggacaattcagctcaacggctagcagtgctgtcgttcgagcaggtcaaaaagctgaacgatgtgatgaacgaacccgttgccatccacggtcgtggaaacttcccgaccctggaggtcaagctgaccgatctggtgaacatcgtgcgggagaagttggaggccgacattggatccggtggggccggtatgatcgtgaaggatattcgcctgaatggaggcgccgctagtcacgtgctggcttcagaagcacagccatacaatgatctggatttgatttttgctgtggagtttagctcaaaccgacactttgatcgtgtcaagtctgctgttttgtcgtcgcttttggacctgttaccagagggtgtagtcaggcggaggataacgcagtgttcgctcaaagaagcctacgttggcaagatggtgaaggtgaacaacaacaacgatggtgatcgctggagtctgatctcgctgggcaactccccagggcacaagaacgtcgagctgaagtttgtcgatacgatgcgtcgacagttcgagtttagcgtcgactcgttccagattgtgctggactcgttgctgctgttctacgactgtactgagaggcccatgatcacggagaatttctacccatccgtcgttggagagtcggtgtacggcgatttccaggaagctctataccatttgcagaagaagctgatatcgacgaggcaaccggaggaaatccggggaggaggactgctcaagtattgcaacttgttggtgagaaactatattccagttgatcaacagaagatcaaaacgctggagcgttacatgtgctcacggttcttcatcgactttccggacattgatcagcagaaaatcaagctggaaagctacttgaggaaccacttttggggtgaggtggaagaacatctacagtaccagtacctgatgcatttatacgatgttgtcgaacagagcacagtctgtcttatgggtcacgagcgtcgtcaaacgctgatgttgatcgaatcgctggccatgcaggtactctaccgtgaccatcctcaaaatccacagacaaccatcattacaaccacgagtacggtaccgcagcacaccgcaatgtcgctgcaaccacttcagactcaactctcacaactgagcttacagcctcaacaactctcaccagttcagcagactgtcatccaccaccaccatccgcagggtgtgccacagacgcaaaccctacagctccagcatccacaggccatcatgcaacagcagtctcctcagcctggacaagctcaaccgcagcagcaaaccatctcgcttgctccacaaccagccggtctactctacgccaacggaatctactacgctccagtcatcccgacgacgctctgcacgtgcaacgccacgtggctgacgacgtgatcggcgcttacggaacccgataacagcaacaacaacatcaactgtaccaatccggcggcaccactactagtgggatcaatcatcagcgtcaccactacaccgatcgtggccacgttcgaaccgcagtcgcatgcaacgtcaccgtcgacgacgtcatcgtccatctgctgcagtagcaactcctacaacagcaacaacatttacaatgcagacaacagcagcaacaatcgttactttactaatattttagtgtcggatagatgattactagaacagtaagcatgatacacgttttcctctccacagctcaacagattcaaaccatgtaaaccacacagaacactaacacaaattgcgtccgttcgaaatcaactg

SEQ ID NO: 1036 - DNA, 2822 bp, Aedes aegypti
ctccatcgtatcgaaaacgagattgtgcagattttccgttttttaattatcgcgttacggcgcgtgtcgagtccggaaaacggtgttccagtgtagtggaaaacggttccacctgggaatcgccagaaactagtgaaggggaccgattttcgaagtgagggggataaaagaaatttttctcctcgagtttcggccggacgcaaaggaagcagggagcaaaacgcgttcctctggtcagccaaaagaagcgcccatcgcaataacagcagtagccccactgggtggaagagaaaaaaaagggcattcgaagggggccccgtgtgttttctatcaatcgaatatggaagtgttttgatgtgaatgctggagtagcccttacggtaaccattcctgcgccagatcaccagagcacccaaaagtctggactgaaacaggaagacactttccatttccagagtgggattgtcgtgacggaatccggacttgagttgcaaggagcagcttcagtatcaactatagcactcaaaccctacagcagcaggaagacgagaacagatcatcgagttctctctccatcaacacgggaagtagcgatttctacctccgctagggactcgagggcatgttttccactttcatcggactaatcgatattcaatcatggtgggaggtgccctacattgcacacttctgttcgttgtttagtggctcctttcagttgccggatttcgacatcgaggatctggaagaagcgcttctgaccgatgtcgacaccgagagcgagattgatataaaagtgtacactcgtctgctgccggatctcatcgttgctctgttgaagggttgtgacgcgctcagccagatcgtatcacacatcagtccgagcaactatcagatgttcctgagacgactgtttcgtcaaaaatgtcaggaatataacatcaataaccctttcaacgaggatacagattttgaaaagctgccgcttcgtaccaagatcttgattttaaaatatctatgtgactttcgccttgactcagttgacgtatacagcagctttgcaaatcttgaagctgacagtttacgcgtggaaccattaggctacgatagtaaaggatctgcctactggtacttttttggcactagactctaccgtgaggatttcgacgttccttccggcaagggtagcaaatcgtcaaagcgatccgtttggcaagtgatttgcttcaccgaggaagattggagtaatttagctggcaagttcaagcattcaaaaaacgaaaacgagcgagcattattgctgcagttggaggaaaatttccttccaaatataccaaaaatcttccgcgataaagaacgcgagcgaagaaagaagctactagagcgccgtacatcatctcgcatcaaaatctgcgaagaacgccgtctggctgaattattccgtcagaaggaaattgaagaagcccacaacgccctgcttaaagaacagcgtaggcttaaggcaaagtgcgaacccaaaccggaggtctgtcgatcccataaagaaaggctagccgaagacagagctaaacgcgccgaacgacggtcacgttcgaattcggtctcaagtatagtatcaacctatgccagctcgccagaaccagaacctctcacaagtgattttatttttcagccaaaagaaaacgaaagtcaattttttagtaaacattcttctggcggtataaagcacaccgcaaccgtaatcgttagtaatccaccagcttccccatcttcagagctaggttccgagccgacttcttgtgcagacattgatgtgtgctcgggcactttcaagcacaacccggggcaagtgttagaagaaaataacgaagcaaacgacgacgaagaagaagacgaagaggacagtgcaagtgtgatagtcgttgatcaggtgaacaataattttatcgaagtaggatcgagtatcagtgttgttagtggttctactactaccagcagtggaatcagcagtcgtgagcaacgtgataagacactttcgccacctccaacgccccctccactgtctttgttgcaaccagtggaagaaacctcacagtcagcggaaccagtgaaacgaagatccaaacttagtgctgagatcgaagggttgctgcaatacaacagaaatatggctccaactacgaccaaactgcccgggaggcaaaccaacaattcgttgtcgtcagttaccggcccggtgatcctaccgttcgccgaaactccgccgaaaaccacgactggtggaagttcgggtagcaaaagtggtgactccaatgccggtactggcggcggtgcaaccggcaccagtggaaggaagaaaaagagcaaagcttcggaagtgtgagtttttatagaagtgtaattgtttttttggcattttgcctccatttgttcatataagtgtgcttggcttacaactagtttttgaaccttaattttgtctaactcaaagtagatatgttctagctaggagctaatatttttttatactttttgatttttaacacaatcgtttattacatatgatttatcacctatttcagcctttcttaattgccttgatcgttccgttgtgacgtacaatggcagtgtgctataaatacatatcagtcccttgtgcttttttgtcatttttgagatcacctattaaaatgagtgtaaatttctgtatcataagaaaattcctcgtgctcgttccaacaagttctagaaaatttctctcttgctctttcccacgttactgacaaataccgtaaaatggggggttttaagggattgaactt

SEQ ID NO: 1037 - DNA, 1542 bp, Aedes aegypti
accagctgcacccctaccgcctcagttccgggcactgatgccaccgttcatgtatcgtggcaacggaggcggaggtggaaattctgtaacgccgccaccttcttcgaacgaggatatcaatcgtggcaatactggaggcggcaatggtggaagcagtggaggtggaatgcgaagcaacaacagcaacatgggctacaacagcatgttgccaagctttgtggctcctccaacgaatcatcatcaatctcatggatcaaattattcgccaacacagtcgggtggtagataccgagactcgtattcaggcggacgccgtggacagatgcaaccgcctcgtcttgccaacaggcaacagcagcatcaaaacgatgatcatcgctctcaaacggctgctccagcttatgttgaaccggacatacttgtgcagcgaccgattatacgagatgaagaacttcaacgcattgaagcgattgctaaagacgaaggatgggccaaggatgatgaaattgattataaccagaaattacaattctcggatgacgaattggaaccaagtcccccaaaagaaattccaatgtccgttgttaagcaagagaaatccccttcacagatacaacagcaacaacagcaaatgcaacagcaacaattgcagcagcagcagtctcaacaggaagatgacaaacgaatggcttggagtcgagaagtggaacgggaacaagagaggcttgaacaggaacaaattgaacgtcttgatcgtgagcgccaggaaaaagaaagagagcagacgaatatgcgtccagtgcaacaaaatgggcatataggaggacgaggcttagatgcggaagcgaaggaaagattgaagcaacgtcgagaagaagatcagaaacgagaaatggaacggaaacaagcggccgcaagaaagctgcaagaacttgaacaaaagttaagtcagaagaagaacgaagacaacgttgttggttctgttacttcacctgcaactacgaaagatggcgaagatcgtgatctagtagtggcaggttttaacgaatctggtgaaagtaaggaacgcagcagttcaagtgttcgtggcggagaccgagaaagactagattcgaaagaatatagagaccgcgatcgagatcgttttgaatatggacgatatgatagagattaccgcgatcgggacagaggagagcgggataggacagagcgagatagaacagaaagagctagaggcgaacaggatcgtgagcgtgatgcttggggtgaagtaccgccctactctaaaaatttccagtccaatttaccgccacgttttcagaaacgtaaacttgaacgaaatccatcgggaaatagtttacagggaagtggaagctacattactagagatcagaacatcactcgcaacagtagcactgccaatcaaggatcgatgatgtcgcagtcacaaccacaaactgagaacaaaagtgttccgttcgctcaacagtatgatccacgattcatccatagccaacaaaattttggcaagagtcaatcatc

SEQ ID NO: 1038 - DNA, 441 bp, Aedes aegypti
atggatccagggtcatcgacggtacaaccaccagctgcagtagtaccactgcagcaacagcagcttcaactacaacaaccgcaatcccaattggaggaccatcagcagcgacagactccggaggaagcacagacggacgagcccagcagcagcaagacgggaggcctcgttcaagggagaacaaaacgagtgcgcaagatgcgaatggaggtggactggacgctgctgctattgccaccgtcaccgaaaggccgccgcaagaagcggaaaccaggacctaaagctaagccgggtccagcggaacaggtgaagcagaagaaaaagaagagcgaacaaggaccgctgcctcaggaagagacgtcgatggaatcaaaggaaaagcgaccgaagaagcgaaagcagcaacttgtgcagcagaaggaggatgaagagaaagcctaa

SEQ ID NO: 1039 - DNA, 1700 bp, Aedes aegypti
cggaagttcgacaacaacacgaagaagtttgctttcctgtcccaacccacgataccggactacaggccccaagcggtaactaacattatcgaaaagagtcagaagacctcaacgaaccagagtacaaagtttcaccagctgcaggcaatcttcggtcagcatcagacggccaaccacaaggacattgccaacctgcagaacaacctgctgagcaactcgaggaacagctcgcggaacagttccctggagaacatcaacctgttgaactcggagaacgagctccgaaaagcgttcaacaaacaggccgaggaaatcaagagtctacgaaagtccctcaacaattccgagaaacgagtgcgggagctagaagcggaagtcaaacggttacagctccaacagaagcattagaatcgataaccacgtggtagatgaaatagtccgtaaccgctacggataattcaacttagtaatacttacactattaatcctcaattactgaacaatacacttaccactttatatacatattttcgtcgctctccaaaaccgcaattgcttaatccgctaccactaaacttgtacaaccatttcaatacgaagcaggtaattcgtatttacagataaaaaaagacgacattcattacgattgtatatctacttactacaacagtttagtataatacgtattatgggaacgtcagtctatgttgagcgaaaagagaaaatgcatttccagtaccactgagcatttcatagcgttacaaagaaaattttcgcatctacaggaaaacagtccgataaaagtaaccgataagacttaatcatcaacaaatgtacacttaaacaaccgcattaaaaccagaggaatcaacataacaaccaatatcaatagcaaaacatggccaacataaacactcccaaactaagacagagtgggtgcgctatgcttttttgattcaactatgcgagatttttgtttcaatcaactgccgtgcgcttaatgtggcttgtaattgcagcataccatttgggaatgcttggaaccggtacccatattatcaattgtgaatggaaagcaaacaaccaatttgggaacgcagaggaaaaaaaaagcaaaagacatgtgatttgtgatttactaagaatagtgagtaatgtaaacgcagtagcaaatgagaaaaaaaacaagccgtcaaataataatataaatgtagcttaagactagtggatagcgttgtaagcgtatatatatttttaagaaacctatttgtaagtaaaataaaaatgaaacaaacgcaaagacaaagtcgggtaagaagaatcgaaagaagatcgccacacatacaaaagcaaaaagttacaaatagcaaatgcggacaaataagaacaaacaacacacacaagaagactagttaccacgcatacaaacccacgtcaacagaaaaaggggtggaacaaagaatagaacattagtaatcgaacgctcacatgacacaaaaacccagcttcaagattggaaccaggagagtattatgatcgatgtatttgcggattcaaagtgctatgtgattttagttgtccatggtttttaggtcgatgtgcgcaagttgagttgtaagaattgatcgttttattgaacaaattcgttttctcagcccttcagtgtaggattaagtttgatattttgtttttattgtctc

SEQ ID NO: 1040 - DNA, 2593 bp, Aedes aegypti
cgaaaaggacaggctctgagtgaaatcgggtgtgcgcgcctgccatcagcgccagacaggcttggcctctcctcgctttgaagaccttcgagtcgtgtccgttcgagtgtgcttgtgtgtgagagtgtgaccaccaccgaattgtgttcgtggacgttttgtaaggatttccgattcatcttcagccaggacaaccatcaacatcatcatcaaccacaatggaggaagtttatctgtatctctacatggaatgcaaactgagaaagcgcgaagaatcgtccgtgagtccagtgacggcgaccaacgtggaagctgcgccaccgtcgtcgaaccacaataatcatcataatcatcatcagaacaacaacagcagcagcaccaacaaccatcatcacagcaatcatcatagcagtagtaataaccacagcagtcagctggagaacggctactccgtgccaactccggtggcgttccggcaaagcccgtccagtgtgtgggtgtttcctccgctaccgccgcagcctaacctgtaccactacaacgccaatagtcaagacgcgttagtacacaacgagaagaccggcttcaagggactgaagcgacaactgtcgggccgcttcaagcggttggtgtcgcgaaaatcgcacgaacccgccccggcgataccgcccgagctgaagccccagctgaagaccatctacgtttattaataataacacaaaacacaaaaagagaagcaccagcagacgtttactaagctactataacactttactttaagaggacggatatttgtagacagtactaactatattagagatcagttcatttttttttcgatttatttcgagtaggagcgtactgctaattgtgagattagtgttcgaggtttctatcctgggatttttttttttgattttatgttcaagattgagaacgattgagaggaagagttcatgagagtgagaataagtgatagattttcttatacgagcgatagggacccattttttccaggatgtcaaatttcctatgaccaagatttcaaatttttgtaccacgaagaaaaaacgaaggttgatattaaaatcagattttttttatgagaagaatgttttccgcttgtactcttcacagttttcggaggctccaacgccaaccacacacgattgatattgatccgccattccagtttgtcgatttttgtagggagtgactagcccgtctagtgcactaatgtccaggagaaccgcgaagcttaacgatacagaagtaattattattattagtaaacctagaagaagactgacacacacatgaaatccattttttgttttgttaggcatgcgaagggacaacgttaacatataacatacatacaaacacaaatgagaggagagccaatcgcgctcagccgctctgaaggctcccttctttcagagactggattcgagcgtctgtgttaaacactttcatgtagttctgctagatttctgtatttttttcctataccaaccacaaagaacagaaagtatttccatcttttctactctttaatttaacgtagcgaaatatgttttcattagaaaagaatgcttcaacataactaaattagataaaaaaaaagaaaacgaatcaaaataaaagcaatacaagcaaatttttctagtgtattaaaagcatggacagcagaacgaacacagcctcacggcacctaacgctagcgaaagatatttattattttatcgtgtagtcaatcagctccactcccattttgtgtttaggcagctcaaaatacttagaaacaacccatcaaaactgcattcaaagccgaaaacgacaattatattgatgattatgatgatgatgatgattataattcttaaaatgcgcacacttccaccttaatgaactaaattcaggacaaaccatgcgcaaagaacaaaggaaacacattgtgtaacatagtagctaaagaaaatcaagaaaaattcctgcgttgcttagagatcccaacaaaacgcgccattttgttgtgttgaaacgtcaacacacgaacacacaggaaaacaaaaaaaaatctgagatgaaaataggctatttaggtgattgtaggcgaagaaacattaagaagaaaactcggagagcaggaaagttcactcacattgagtgccgccaaaactgaaaactgaatccccacacaaacacaccattagcaacacggaaaaacaaacacccccacaaacatacaagcacacagtttcacagaggcagagagagagagtaacaccaggaagaaggccacggagaaagtcatcaccgcccttctcggcgggtcgcagttcccggggtgggaccgacacaatagagtcccgccaagcctcaaggatcaggtgacccgcgggagggtttgggaaagggtgatgggttgcagctggcacagtggcaccacgcgatagccgtagtgcagaggaagagactcggtgtactttggggtgtgcaagatttactgcaagaaaatcaacaagaacaacagctaacagggcagaatacagttgtacggaaattgtaatttaaataaatgcgataattt

SEQ ID NO: 1041 - DNA, 7041 bp, Aedes aegypti
cgaattaataaataaataattcaatatgagcaaaacgtcattcgaaacatattgaatcgaaaacgatatgaaaagcaaatgctgagctccaaatcgttgttgaaaagtgaccactttcgacgtgtaatatatttcaattgttctcacttcttgcaaattaatcttccaagaattatcgcgaatgttcttttgattcaggtaaatagagattgttgaaaattatgcctatgaaaaaatatacgcttttgagtggcatcagcaccatacgtactttactgcttactaagttatcaccttctcttcaaaattacgttcataaatttagccagcagctgacctgaaacgtcttgtaaaatagtctgcattttatacactgtctgaaaaacttcagttacatagaataagatgcatatagtataagtcataacaatgacgtcatgttgatttattgtgtgacaccaacaccatacattcctattcccacctagtagtttcactcttgtcattattgtgcgctgtcaaattgtacaaaagatattgtcaacataaaaaagacttgaatgtatcaatttcttcatgtatagcattcattctcttcggtagttttgatcgtatgcacttatgcactacaggatcgcgtaatatctaggtgattgcggatcgaaaaatgaagtcgatgttagcttcattggccgtcaggatatagttttgctggtgcttgatactgcgagcgtatcgaatagctttcatagttgaagttttaaaatcctgtaaatgggattgttttggtgtcattatttgagtttgaaaggcaaggaataaaagaggagaaacctcaacaaaattgtgcgaatttaagtacgaatagtaagatatttttttttgatctgtgtttctgtggaatgaacatgaagaagttaatggtcacaagttgccaaaaataacacaaaaatacgatcccaagatgtagtatgtataaaatcagtgatagcgaaggtgaaaaatatctttatctggcctcacacatatagctgcaaaggggctctgtctgcttcattgtacgacattcaatgactaacgtaaatatgaagcatgaaataatgacatcagtcgcaaacctcttttgggcacagtagaaagtgcacaaaaatttggaacatgtagttacgtttcgacagtattcaccagcaatggatctaattaaggaagtgaagtgcaatatcgataaaagtttggaaggaaattctgctgaaatggaatgtgaagccgagcccgaaaaaaatgatctcagtccagaaaattcaaaaaagagtgataactctccattggatgaccgaatttccaagccagttgaagaaaaagatgatggagaagaggcgaaaatgcaatataacaacggtagtttcaatagcggaataagtgataatagtaatgtaaataaaagcatctcgatgcaagaaattgaaaaaagccaacgcagtgtcagtgaagatccggatgttcgtaatgcacttgcttttacgattgaattcagtgaaggccgtaagtcagttgacactcagcgacatgagaaaatgctggagcggttccagaacagacacaaacggggagtttccttgtcaaaattagaaagtggggtaaatactccggtgggaaaaatgaggacccctcaaagtgttaatttacctaggaaaaatcgaattgaacaaccagaaattcaagataccgcagttagattacgagataaaagcagaacgtcgagagactctgtaaccaaacgacacagttggagtcctcgatcaagtatgacggaagcaggtgttaaagattcagcaatgaaaatgaaaactaataaatttactccaaagtcgtcggcgttgcagatggcatttgatcagcagaatattatgaaggattcttgctcaagttctgaattcaatgccgagagtctggattcatcaataggtcttccttgcgttcagcctcctctggaaaatttcaagaaggaaaacgaagatgacgatagcattagtgaagctggaacatatacactggacggagataattatactgaggaacaaaaagaacggatgaatattgatcgcatgccagcatttacaccagagtccactcccaaaccattgttcaaacaaggatctaataaattgtatccccagaggccaactagttttcgagaagaattagaaataatagatttggatcgaccatgttctggaacatcagaaaatgagcgacgaaaaaataatgttctcgaggttgtatactttcacgaaccatcgccggttgcgcaagtttcgaagcctaaacaatcatatctggaaaaactgaagtcacgtgttaagaacatcactcacaaagcgaaatctcccgacaaacaaatcgtttcacagcagattaattcaccagatcaaggaacattcacctctgtaaccactagtggaatattgagtgtaaaaccaacactcgaaagtcatccacggatccatcgccgcaacagtttaaccaaatctcacatcgatagctccgaatatgttcaaggtgtagctaaactaaacattcataaaaatgaagatgaagccaaaattcttaattgttacactgattcagaaaaagccactggactatcagatttgaacgtaaattatgaccaccaaaggcgtaaagctgattcggaagcttccaatataggatctgcggttaacaagaaagattggatacaagaatgggcaaaaaatgctcgagaatatgctaaaaaaccaactcctagtagcagtaatccgcaaatggtgagaagttatgagtttgaaaaccgaaatcagtttggctacgatttcgatatagatatgacgaaaagtgattattacgatacaaaaaagtatcaagaatttggtgacaatctagatcgccagcatttgcaccgaaagcaactggaccgacttttgaacaacagcagcaatagcgacccaatgctaaagcaagcttacggtactgattccagtgcaccaaattcgggtgaatttaccagacgtggaagtatcagacagtatacgagccccactgcagcaaaacctccaatgagtccaagtaaaataccgtccccaatgggttccatcggtagagctagaagcgttagtagaaaccgcagtctgcaaggaagtaattcggacctttcaacgaacgaaaccgaaatgtatctccagaagaccgctgctgcaataactactttgcagaaccttcaaaggcgaaactcgttacgcaattcatcacgacaaaactcgtcacactcaagtccacttagtcctgcatcacggcgaatgtctccgaagatttccccgatgaactcactacagtctccaatgcagtcacctcatcgggaaaagattcttcacgctgaaggaggtcaaacttatctaccacatcaccagcagatacttactcttaaacaacaacaaaatatgttgaaccataaacgaaacctttctctggatggttcggaatcctatgctagcgcgttagctgcttttgggtatgggaaccaaatgtcgaacagtctcaactcagagcacatgaatgcaatattagatttaaggaagcaacacactcggcacaactccttcgaaggaatgtcttctcttccaccaaaacccgtgaaatgttttcaaaattttgaccaaaggactgcttactactgtacaaaagaccggaacgaagatgttcctgggaatgacatggccgattacgatgacgatgaaaaactgattgtgattacttctggagtaaaggacatgtccttgggcactaagaaaccaaatgcagtattgattaaacagcaatcatcatcatcatccagtgtaaaacccaccggagcacaaattagaccaacaggtagtcaaccagtaaataaatcatacaatccaaaaccggtgccaactcaaatatcatcacccattaaaagatctagttcattctctgtcaaggcaatgaagccaatgacaccaacattaacgcccaaattaggctccaaaatagcatcaggtggttcaagaatccagaaatcggctagtagcactagttttaaaaagatggttgccaattataatgacgaagatgatttttatattaacgacgatgatgaccttgaattaggtccagaatattcatctagctcagaaattagcgataaggacgaagaaggggctgatgtggataaagaacccatcaccaacactagatataacaaaaccttcctcatgcgtatggaacagaataagaagattgctgccggagtcaaacacggagtggcagcttgcccaaacactcctgaattaccacgccgaacacttcaagttaagggaagcactcgcgatcgagcatcaatgccaagagattcaagtcttaatcgaatgaaacaagatatggctgcttctcgcaaatcgatgggcagagaatcggtgccgaaagaaccggcaacaggtgggaagcaaaaagttcagccaaagtatttggatatatcaaagtataaaaacccgacggcgggaacctttttgaaaaaggatgaatcgaaaagctatttgatcaaatctgaagtgaagaaaagtcctagtagtgcggcagtagctatgaacagggcagaaccaagcagaatgagtactagaagtatcaaatcagcaggagcaaaaccaactccatctaatcaaaaagtaaccaaggagcaagaactggaaatgtggcgtcggcgggctagctatgatccgatgaaagctgccatggagggcaagaaaaagcaagaagaggcccgtcgtcacgttcagaatcaagcagaacgatcaagtaaatcgtgtgaaagctccgtattgaggtctcaatcatgccacagtggcgtaggagttggaacaggtcgcttgtactccagcaatataagtaacaataccaatgcgaatataaaaggaattttcgatcaaactgataacaacagcaacagcagtcaaccgagtaatcactggacgctaacatcaaccgaatcgagtgacgatttcgacgatgaatacaataactgagtaattcccccacgaatggattttgttttcaaaaatctaatgactgcacaataatatttaaatattatattcactgaatgcttgaaagtgttatttgcaggagaatggaccaaaaataatacgcggttcaaccatggttcgcactatgtggcaattcgatagcgatgttttattatttttaccagaaaccgtattaattttggtacattaccccaaagaacactttgaacgagaaaaagtatttcatcacatattaatccttcaaaaatgtcatacaggaaaaaaaaaatgatttcgaatatttaatgtataatgatgaagtatttaatcttttacaattatcaaagtaagcattcaaggcagcttgtatttctacgcatatgtaatgatatcgtaggcaaataaaaacaaaatcttagcgatatcgaaaagtcatacgcaatatctttactcctaaagcatatgcatgaatttcagttcatacataaaatgagcttcttatattaaattgatctatttgattatcgattgtatgcttaaagcaaacttttgtcgccttattgtcagcctctcttactagatttatttcaaattttattggtgtaactttcaattgatactgttgagatctgttaactgcattgctatccgaatatataacgtaacttttgcgaacgagctaggttaaatatgactgtactttctttgttattgtggacattgtctgatgtgattagaacgacgtattaaataccctcatgttataaaatctttattgttaaaattcattttatttactgcatcattaaatcaaatcacataaatctaagtgtcgcatagaaaaaatcgaatggaagatggaagttgcatgtgaaagttgagagaacttgaactgaaatagttacaatgtggttggttaggattagtttaaaattgtagcatcatggccctccattaaagtgtgaaaagaagaaataagtttgatttagcttaataattttccaataccaatttttcaaaatggcataactactcaacaaaggcatctcatgtcactgaaggcagtttttgaccgtggagaggagatttttagcagcttacataaatgtattgctcggttttcaataactagatcatatacgatgcagcttgagctgaatggtgcttaaaaatggatgattttcactgcaaataatcacatgatcttgaaagtcattgatctgatggaaacatatgttgttgtatgttgatcagacatcatgttcttctagagcagatattcatccattcatgttgtttgttgaatattgaacggcatttttcgttactcatgagattaagacttcctcgaacagtgataacgtaaaacaaacatgttttaagagtcggcattgagaacactgccattatatggtcaaaggcaccccacacgttgacatgagcagcttttgttccatggcccttttgaatttaatttgttccattgtaatttgtcattagctaacaattttacatcaatcatttaacgtaaggtgtttatactagttctgtgaagtaaagttattttagtataacattggtaaatttatttagtatccgaatcaatccactaaatacaggtgctcataagactaaacataaaagcggattcggttttggttggcaagtaattccagaaagaagtatattgatgtaaaacattggtagtgggacggatggacttacgtctttaattgtgatttttatcacaattaaagacgtaactatcttaacccatcttaaaaaaaaactcttccaatttctagaatctatgtcaatattgttcattgatcaactggatcctgagatattccgaaattccttgggggattgacacgtagctataacccacgtaaatataccacggtacagaattttcatcgtattcggaacaatacatcaatgagagtatgttgtgaaaaaa

SEQ ID NO: 1042 - DNA, 2582 bp, Aedes aegypti
gaagtaaaaacgtaaagtgagaaacaaacaatcgggacaaacaaaatcaaaggaattaataaaaaaaagttgaggttcgcgcttgccgtgtggacacggacgcgatgtacgataatggtagattgtgggaacgacggaagaacgaatgaagtatcacttcaagcacagtcaaacggacggacggaggcatatacacgcagttgcacttgtatggaaatgaaaattaagaaattgggcaggaatttgcggtacaacattggaattagtttggggaacaaaaatggagggaaagtgtatattgtttgtcgttttgttcacggatagttctctcgcagtcagacgcgtgcgccatcattgttagttgtgattcattcattggattctgatttctgggataaatcagcaccaccgatgtgtgcataatatgttgtggtgattatttaaggtgttactctctttctatgaaccgtgattatttggcttccattttgtatacacaggaaacactcacatacaaagtacatacacttaccgacacattcacactcacattcttaaacaagttgtcacactctatctaactacataggaacgcatatatcaatagccggaggaacccgataaaacacgatcaaaaatgaactagcaaatgctaaatgccgcagcatgatgatttgtgtcagtgtttgaaagaaaaatggccgccggttgaacggcatggacaaaacaccattcacgctaaaaatatccacacaaatgtaagtcgaatcgatttatcaaaggcaaacaacgtttgaatggatattcaacagcaaactgtcacataattctctaccatgtggtcagtgatttgaaaatctattcgagaaaacaagacagtacttgttcaacacttacacatagaaaagaagtgaaaaatgtcgttcattcaaatagaagaaacaatatacaactgtacaagcgaagaaaagtattataaaaaacattcaactgatatcagtagtagatcaaatcgaaaataacattatagacaagccgagtaaaaatcgtatgatgtaaattgaacaagttagattttgtactatttttaacgcagttgtattgaatttttctactgtcatattcggaatccttgcggcacatttgtgaacaaatggttgtagctctagcatcatcttgttctcatcatgtggaactacagtctgaatcatccgaaagcccttctgccgggcttttcggagtgccaaacacatacacacaatcatcagctttctcctctaaactaacactttgaaacacactttcacatctatctcgcgttttgaacttgcctagtgttgttgaataaagaaaacgatttttactcctttaaatcgctcctctcgcgcttgcaaaactcaagtttcgtttgaatagttcgaagcattatttctcttagtatttctacccattccaaagttgttcacttttacactaaactctttacaaattgaaaaaaaaaaaagataattaacagtcgttttagatgaaaaaagaaaacgaaacaaaaatcaataaacatacaaattcaaaagagaaaatagcataatcaaactgaacaaaagagaaaaaaaaaacatcccaagcgagttcgcctttgttcgagttttaataagattaaatagaagaaaaaaaactgcagcataaatttaagccaaatcgtaatcaatcaagcaaagctcgtcatcgtgtcgttgtcgtcgtcatggaaacaagaaaaagaagtaaaaccacaacaaccacttacccgcacttgcccttcgctcccccgtcatcagtttttaatgtgtgcgtgtgggtatcaagtagatagtactcttccaattcacattcgttgtgtaaaactaatgatagtcggagaaacaaagcctctattgtgttggtgtttaaaatagaaatcaaaagcaacaaacagtttaaaacaaattgttgtacaattttaacctttacctccatctgatctccatttttctgtttccgcgcacaatcaagtaggccgaaccgggcatcccataaaatgacagtgactgtcaactgagacacacacatacagaaaccactagcactcactcacacaatcgcataccgcaccgcagatggaatagaaaagtgttgttacattatcgtaattttcattcgagtcgaatgtagagtaactaattttcacccgttagtccacgtggtgatgatgagagaaagactttccaatcctagcttttggtaaacatcgccatcctcccctaaaaaccattaaccaatgccaaccaacaccattaagcgatcgtcataaccaggagagaatcctttgagtagaaaatgaatatacaccctcacatcaacacacccccacaaaacagacgctctcaatcctttagaaaacaaacataaatgaacgttcaagatgaaaacaaattcaaacctacatgcaacatcttcgcaaacggaccgttgaaaaaaaaaacaagaaaaatattactgtgtaaccatgcaaaacaatctattttctaatgaataaaaagtatatatatacaacacgcctttgt

SEQ ID NO: 1043 - DNA, 237 bp, Aedes aegypti
cagctgataaaaacaaaagtgctgcctgtcacgccttcctggggcactctacataacagcagcaaaaatcttggaaaagaaccctcacgcgtcaccgataagcctccaaggcgtttgacagcgcccaccttgcgttcgattcggagaaagttaaccactcgtcgggggaaaatccagcacataacaatgacttcatttgttagaggcgtcaatcactggcaaggcagaagtaactaa

SEQ ID NO: 1044 - DNA, 3196 bp, Aedes aegypti
cccgccccgaagtgcaagcagtgcaagccgaagtgtgtttgtaaaaacagcagcctgtctttgtcattgcaacgcaaaaatctcctttcgtctcgttctcaaaccgaacctactagaaattattgcatcacttcactcttcaaaacagtatgcagcagccaacgaagacggtgcagtgatatcaactccagcccaggatgaattcacgctagaaaaggtttctaattttacattttgtgctaagtagtttgcctgtttaaatatttgatcacggtgttatcgttgaagtcgtgaataaagtgtagaagtgcctcaggaattcggactatttggcgaatactataaacttatcggacgtgacttggtgcgttgcaactaggagtgcttaaacggaatcatgactaaacggacaaacaagatgggatctttcgattgctcgccactgttcacccaagccacggaacggctccgaacgttcttcctccgtggccaggaggttgatctcgattatctccggaaaacgggtattttgacgaaaatatacgacggcaagtcggatgtccacgtcatcaacatcttgggatacgcgctgaataaaccagtcgcgaaatttgatttaccagcggaccagctggagaagatgcttcgaaccggagacatttgtatgtattcgaaagaagccaaagaacagttgcaaaaggttgtgaagcagatggagggttatcgcttcgagctgattccattggtggtggtagcagagtataaggaacataagcttttcgaaacacttttaatcaaggtccacggcttatacaaagtttcatatgttgatatgagtggaagaatctatacaagcttcgaccatttcctcaacaaaaatgtgctgccccatgggattctatgttatccgaaggatggaaaggttgtctttaatgaccggaacgagttgcttgttgattaccaagaggttggacttgccaattcaaagaagatgaatgcggacttattggttggccttcttggtactgctggaactgtaggttcaattttcgcgaccggaggtttggctgcgccgttcatatggctgtcttgcggttcagccctgtacggaacgggtcgttgtgttgagaaactgatcgatgccagcgaccacggcctgtcggtgaacccttgcgagagtgccgaagcgcgcaacaattggctgatgatgtccgccaatctgctgacgtttgcttcctttggtgctgccgctggattggccactgccacaaagatggaaggtgtcaccgttcagcagctgggccgcatcatgattggcagtcggataattcgtggcgttagtgcgggggtgaatgccataacggttctcgactcgattgtctacacggccatcaactggcaccggatgtcgatctatgagaaaatgtctctggctagtgccgtatgcttctgtttcagggaggtcattagctttgccaacgcggaacgtctgatccgagctagccaaatcgaaggattgtgtacgttcttcaagagttgtgctatttcggccgtgggagatgtaggaatgaaagatatgtccaacatcggccaaaggttcgtgacccaggtgaagaagactttcgaagacaacgaagagtatgtggccacggcgatggaactggttcgtacgcttgtgctggacaacttccaaatttccgtcagcgatgactttacattaattaagctgttcggattggagtacaaaatccgaaatataatcagtatgccaaaaaccgagctaaacaagtttttgtacatgattcagggcatagctaatacattcaaagacgcgttttccttgatgcgtaagatgtggggcgatggcccgatagccaaagctgtcttcaagcgagctgaagagaacggaggcgatcgcgctgattatggaaaagcccttaacgagctaatcgaaatattcaatctattgcgcaaaatcagtgacgatattagcattctgacggatgctcagctgaaaattggtggtggacatcattttacaataggaacagcctacgaaacgttcgtcaaaagtggtttgggaaaaggaatttctctccttcgagctctagtggagatgaatcccagagaaattgaacgcatgaacaatctccgcaataaatggggaaacaaagaggccgaaatttttgaatacgtgacgcacaactctgccgacagcgcagaaattctctcaacattacgcttcctattggatgtaaatgaaacttgtacagaaagttttctccacattactgacttgcattcttcggagcagacggtcgagattgaatcaatgatccgcgtcagcatcgatcagtttcgtcaagcggtgaacccagattatctaatgaatccgaaaattcttcacatttgtcatcgagctctggccaatcaccgtaacttcatcgaaagcatctggaagaatacctgtaacagtccagacaccgtagacaaatcgtttgaaaagctcactgtactggaggcagcatttgagtcccgtacggatgctgcaatcgaaaacatcatctcgtacgtttcaaaaatgcagtgttcggatttctccagattcgtgactcactcactttttgcgttagacggcatggattcgctgatccgtgagatgaacctttcggaagaagaggcaaacgatattctgttttcggatctggctcctctacgctctcgtttcctagagcttagcgagaaggcagaggaacattcacttggtggttattacgcagtgggagatcacctgctcaacgctgaagacggagagttaattgcggccatcaaagactcagcctcgaagggagatcttcgattcggaactgtggagaacggtgcgctccatctgggtaagtatccgatgcttcgctttggcaagaaggaacttcaaaaatacaacagattcattgctcagaagaagtttgatcgggaggaagttcaactcgcctacaagggtaagcggttggtactactcgctaatgaacagttgaggatcattgtcggattagtgcaaggagtaggcttctatattgacactttcatgttcgctcacatggattaatacttacctcgattgatttttgtctttttattacacatagggtagcttttttagtatagttttttttactacatgctacactacctacct

SEQ ID NO: 1045 - DNA, 231 bp, Aedes aegypti
gaaaaatcaaaagtattagctgattccactggaagaaaaggccatccggaaatcttgacgtcatcatcgctagcgaaccagcaattcaacgcagcagaaaagatcggtgttcttttggtttccatttgcttattctttgaacgttttcacgagagggctgttttggatcggaatactttctggcatgcgtggaagcgttggttctggacgaagaaacggagaaatttatga

SEQ ID NO: 1046 - DNA, 2524 bp, Aedes aegypti
aaaatccgttggcccgttcgcaagccatttcgtgatatacaaatttttatttatacagaaagatagatatctgtcaagtcaggtttttgctaagattttgccgcctgctcggatcctgcgttagatttggcttagaatactaaagaactccgaaatagtttactacgaccagcctgctatgattttcaatgttcaatatttagttttcaatatccaaaagaatttacaaataaattcgttctatcacttcaaacccattaaagagcttccaatttatgtccttcactcgacctcaatattcccttaactaatcaaattccacgtattctcttctctccacccgaacagcggccctcgcgcaacactcgccaaaccccaaggccctgcccaccaccgagccctgcctgctctgtaaaaagctctactacctattccggcgattctactgacaacatcaccagagctgccagtctgccgtcccgtcggaagaagaggagaatcggtgctggagctggtgcgacaccagcgacagcaacagcaccgataacattagccaaaaacgtgccaggactactgatactactactattactactactaccactacttcaaccactagaaataaccgagagccttcgggtcgtcgtcgtcgtcggaggcggaagccggcggtgcagcagcaaaagcattccgtagaaactgggtcaaggacggcgactggtgctttcacgaccaccagcgacggtgctgccacctcctccgacacggcgggctccgatggaactgttagctgtaagcgtcgtcgtaaatggagcgagttgtgaatttttggtgctattaaattaagcaaaacgcagcgagagagattgggcgaaggaatgattcatccgcattttggcgcgctctctcctcgtcgcacacgtgctctcgttctctttcgccgataatcgaggagtgcgtgtgagccggagcagagcgaatcgtgttgaatcgtgttgctttgatggatctcttgccggcgaacattagaaaagcgtttgtggattttgatcggaaaagatggtgcaagagcagtaggcttcgggttcttcgctgaatccggatcctcgctcgaaccggacgatggctgttgaggatggtttcgtaactaggcaacaaacgcaattacgcaaaacgtcaaatagtttgttgacaattaaatttttggaaacacttttcggagcgaacaaactacgagcaattatacaaactacaattgtaaggagcaaatccctaaaaaaaccctttgtacattaaagcagttattctcgagaccccctctctgtatcgatatactctaagtaagttcatcggaatagctgtgacaaaccaaagcatctgatcaaaagacaaaacaaaaccacgttttcttacgttttttcacccgtagtgcgtaagtctatctctaatcttgtcgcgacaagatccagaacaaattgaactaactatttatacccattatatcgaactgtaacaaagcacagaagataaaagacaaactagtagatgaagctgttagttgtttaagtgaattgacaaacaagaaaaagcatattgtgaccccccactagcgagtaaggcccccatcgatgaaggagcgaaggagaacaagacaaagacaagcgcaattgtgatatcaatgacttcttttttcttaatttttaaagtgcgaaatatttctatacaaaaccacacatacaaaggaaacgaagcactctaggttgccgtctctgcggaggaacaaagttacaacggtaggaatcgaatcgatttaaaaataacaaacggatacaaaacggaaaccgcggctgccgcgtttacccccggatatagagatacactgtaaatatttattttaaaaattgacaaaaaagagtaacgaacgacaagtttaatgtctatatatacctacgaatacatatatttaactatcgacatataaggtttcttctaagtatttttctgcttttgaatattgaatacgcgttccgaaccggagaagaatttaatcgtggtagtgtattggtacaataagatttgtaggtttaagaacataagaacgaaacaaaaaagtcacaaaaagtcaacaatcaacttcaactttcttaacattaacgaatagattttaaaaacacccttatcgagtaaggatttgtgctattttgtaaatcgaactcaatcaaaaatccaacacgacgacgacgtttgtttgtaaataatttatttagagctttcgcccccaagaaaggtgcgaaagtttggcatttgttagaccaaaaactaatgtgaaaaaaaagtttattgcaaaaaaaatcgtaactaatttgtaatgcagtactgtattagtttaattttgcattgattcctcagtttaccattaattgtaatacttttctttgttgcgtacttgaatggaaggatcgaatgagaaggtggtttttgaaataaatcaaaaagagaatggtttcgataaatgacgtaaaaa

SEQ ID NO: 1047 - DNA, 7664 bp, Aedes aegypti
caacagcaacaacaacaacaacaacagcagaaagcagttgatccacaccggtcagtaatccagcagccggttgcagcagctgctgctggatcttccttgaatgcgcttccggaatcgatcgttttacaacatcagcagcagcaacagttggtaaatcacgttgcccaacaacagcctcaacagcaacaggcaatataccatcaacagcaagctgttacacagcagcaacaaccgcaccagaatgtgataaacatgaacaacatctcaaacagtgcctccccgacagtccagcaccagcagcagatcacgacgaaccacgttcagtcgcctcaacagcaacgtacaccttcggcagcgtcgaagcaacaatctcacccggctgtcaacgatcaatctcagttgaagaatggaagcacacctaccctgcagaaccatcagccgtatccgcggtcgcagttcccaacccagcaaacgccacaaccacagcaacacagcatcaatcacatcatcaaaaccccagaagctactccacggaacagcgaataccttcaacagcagcaaagcaaaaatctggacgctcggggacgtccttcaccggcccagggcacaacggctccggaaaccgatcccactcaaaccaatctacggaagcaacaagagcaccaacaagcacaggcagttactcctcctgttcagcgaataaatcaaccaacgccaatggctacgccccctaataagccccgtccaccgggtggcgtccctccgggtggtacaccaacaagtacaccgccaggaccccggccaatatccgttgcaggggcattgcaacgggcagggatgaatgccgcaccgaaaccgattctcacaacaccggtaacgtcaatcgctgtttcaggagccctgatgaagacgccaacaaccaccacaacagccccaacgacgccatcaaattccagtcaacagcaaacgccacagccgcaaacaccccaacagccgccaacccccaataaaactccaatgaaaaagccccaacgagttaacctcaagaaactgtgtcggatgattaccgtggctgaaatagacactttaaacctgaaaaagtgttccgttcgattagagaaacttagtgacgagcacatgacacttatgcaggaggatctgaagaagttctcccaggctgaacccaaactggcgatgcgtttgggacttgtgaagaagagcgctgaaatgatatttagcaaaatgaaggaagacgaaaggagatacactggattactggcgaagcgaaaggcccaggaagatgcgatgaatcccgaggatatgttcagcaaaccgaagctccggaaggtagagaagatggtggtaccagttgtgaagaagttgtccaaggaagaactaatgaacacgaacacttaccagaggtttatgtcgatcatgggtaagatattcgatcagctagatgaaaccgaggcacccaatttggacgatggagatgaacagttcgagtgtattccaaccagcatgctcagtagtattagttcggaggcggcgaaactgaaggcacgcaatgccatcgatgccattccggaaaacaagctaacattgttgattacgtacgctatgcgatcggtgcattcggcaaagaatctcagtgggacggaacttcaggacgacttggtcggggacgagtgcattgagaaaatcttgaatgctatggaagcagctttgctaatttgttcgatctacacatgcaaaagcacaaaattcttgcaggaggataacgtcgatgcgatcatcaagtttgtgcagtttcaactgcgagaaacagtattcccttcgtacgatccagtttactcggttgagacgaaaaagaaaacagacggaaagaagtcgaaaaagatgcctacttaccagcagaaaggtctttcggttttgtacaccaaaattgtcgaactcggcaaacagttggtgaccatgtttgaaaaattccacttcgtcgataccatcgtgatacacgcttcggcattaggcgtggaaccattctttgtggataatatcgaaaccctgcagtttgtgtgtctcgatctggtgacgtcgatttttcaaaacgaaaagtattcacaccaccgacgaaacattgtcgcggacattctttcgtcgattgatcgtcttccgcactcgaaacgcaatctccgcccatacaagctggtcaacaatgccggaaacatccaaatgatgacggctctcgtacttcagttaatccagtgcgccgtcgttctgccggaagctttgggagatagcaaccccaagaaagcaaacaacgaaatcgttaatagcagcaatccaaaatcggctgatctctacatcattgggaagtacgatacggctttgagcattggcggaaacttcctagcaacctttctggataaatgtaaaagtcgatcaagcgaaacggatttccgtcccctattcgagaacttcatacacgatcttttgacaaccgtcaataaaccggaatggccggcttcggaactgctgctcagtctactggggacaatgctggttaaaaagatgtccgacaagggtgtagagcagtcaatccgtgtagtttccctcgaatatcttggtattgtggcagctcgattacggaaagacaccgtagagtctcgatgtaaggtccgaacgatggattcgctgatcaagtacattaaaatcgaacaggaaaaggaaggcgacgagtatctgaaagactcaaaatttcagctggacgaagaagaggaacgaacggagttcttggagaagattcttctggacttcctggcggcaaacgctcaggagggaaacatcgtgtggaatcatgcgaggcacttttacatcacacaatggtatcgggacatcattcaacgtaagaaaaacatcgcggccggcgagaagggatacgcttctagaaaaaagcaagcgaaaaggcggaagaaatataccagcgaatcggaaaactccgacggcggcggaatcgattccgacatcgaacaagtcaagactggggtggatcaggaattgaacagtgaaattttccggctgctggacacccggaaagcaacttacctgtcgcaggtctgtcccttcggtgacaaaaatgccggaataagtgaaatcaaaacctacatcgattatggcaacgcgaatctgatcgcacagtatttggccagtaagcgatcgttttcgcaaagtttcgacaaatatctgcagaaaatcattctggtcgtgcgggaaccggtcgtggcgatacgaacccgggcgatgaaatgcttgggcaacatcgtcgaggtggatcagatggtgcttgcgaggaaggacatgcagatgggcgtccaccaaaaactactcgatacggccatctcggtgcgagaggcggcagtggatttggtgggaaaatacatcctctccgatccggacctgatcgatcagtattacgacatgatttccacgcggatattggacacgggtgtttcggttagaaaacgggtaatcaaaattctacgagacatttgcatcgaatatccagagcaagaaaagattccggacatttgcgtcaaaatgattcgccgggtcaacgacgaggaaggtatccagaagttggtcatggacgtgttcatgacgatgtggttcaatccgtgcaatcctaatgataaggcggcaatggataggaaaattactcaaataatcgatgttgtttgctcatcccatgagactggcactcagggtttcgacgcactgctcaaatcgatttttgaaccaaaagaaaacaaagaggactcgaaggccaagaaggagattccgaagacgttgatcaaagcctgccagcagatcgtggacggcttggtggacgcaaccatgaaactggagagctcggaaaacaagaaactggttggctgtataacggcgctgcatctcttctcgaaaattcaaccgcaactgctggtgaaccacgcgatgacactggaaccatatctgaacatacggtgtcagaatgccatcaactacaagttcatcagtagtgtggcggagattttggaacaggtggtgccgttgatggagcatcccagtgagattttccttgctgatctcgaatcgcatctgatgatgcttatcgtgacgcaaagtcaagcagtggtgctgagttgtgtgtcgtgtctgtcggcggttgtaaataaaattaccaagaattacacattaatacgagactgtttttctaaattttactataagggattagtatctagtaaagagaagttaatctccgatccgtcgatccccatagaacaactgtataggccccagtttaggcgaagtatttatacggtaggattaatcatgcggtattttgacttcaagcagccagaagtttacggcggcgaagatgatgcacaaggagcgttaccggccaatatctgcgaggacgtgtacagcacgctggcattttttctatcgtgtagtcatagtgagatttgcaaggagacgctgctttcgatgggcaacttctgcgtgaaaaactacgaatatctgacgaagcaggaactgcgggactattacaactatctgctaacgcaggacaccgtactgacagagatgaaaattgtcgtcctgaagaacattttaatgtatctaaccgaggaggagaacaaaatggttcgaaacgacaaagaatgggctaagcaagcacaaaccgaagatttgaaagagatgggcgatgtatcgtccggcatggcgagtagggtgattcagatatacctgaaggagatcctgcggagttttctgcaccgggacaccggtgtacgaatgtgggcaatgcgtgtggttgagattgtgctgcggcagggtctggtacatccagtacaaatagttcctttcctaatatgtttaagtacggacccagaaagagaggttgcacatagtgcagaccgtcatctccaggagattgacaagcagtacccaggctttgtaaatatgaaatctcacgccggtttgcagtactcgtacgaattgcaagtcttgttacaaaaacttgacgacagtagtatagtgagaggatacagaatcaaagatcctcaagagccaccgagtgcgctgaacggtttcttgtatactttgttgcgcaataccaaaccgcagcgacgagcgctcgttcaatcaattacaaaacagttcgacgacggtaagatctcactgcagcagatgctctacctagcggacaatctggcctactttccgtacatggtgcaggacgagccactgtatataatccatcatattgatgtactgatatccgttaccggtaccaaccttttggcgacgtttcgagaggggttgaaacctccgcctggagcggagaataacccggaccagcaaccgaatccactggaagatgatgatgacgatgaccaggatgtaattctcagtcggctaccagaggacactacagaactacagaactgcataacttcggcacaaggctgcatgcttttactcatactcaagcagcatttgaaagacatctacggcatcacagattgcaaaatttctcgatactcaccatcggaagcggggaaaatctacgacaaaacaatgcagaggagatcgaactcattgttcgatcccaaggctaccattacgttgctgaaagagaaccgccacataatggcagtccagtcagatgatgaccgagcagagcttgtgcaacgatatctggatttcaaacagttaatgctgcggctcgatccggacgatccagacctcctggatgaggatgatcgtgccgccccgccaaagaattctgaaccgaactcaactgttaccaccccggtgaagcaaggtgatgccaatagtgcgaatcccggtggagacagcgcagctgcaacccccgttagcaacaacgttggcagtagcggtgcgcacgtgaacaatgtcaacagtactgctacttctgccagcagtaatacgacggcagctgtcggcacacggacaccgaaatcttcctcgaggccatcggcaacgaacaacgctgcctccagtcggaaaactctcccatcgcgaagtgctcggaaaaaacgacggaaactatccagttcagaggaagaggaaagtgaaccaagcgatatggattacgactagacacaaacaaaaaacaaaaacttctgccagagacattattaatcgttgaatcagagatgtaaaaattacgtaggatcgagatacacgtttaatataattatttgtggtgtaagaaacaatatcagtggagaatgccaggaaagatgattcgtcatcactttacaaaacaaaataaaagcgtctgtgaatgcacatttaagtagatggtttaaaagtgcgccaatcttagcagtagcaatagtggtagaacttgatcaactcgtagtatttttcttttcctccataaacacgcacgaacactgtttcaagcgtacaccgaaccaaacaccgtcactaggaatgaaacttgcgctttattcataccattaggtacggtcacccaaccttcgattcagatttggaaatgatacgcatttgaattaaaagagaaactttgttttaataattccgtatcggatagattgtccgcagtactatctgtgttctacggtttcggacggaaaactcctcccacagaagtgtgcaataaaaaggcatgagggagcgaatcgtttgtgctgacggtaagtcctggcaaaacatgcatgtttctcaacgtggaaaacgtgttttgaagtaggaagatgttttaattgaaaatatttaaagctaactgtgaataggaaggatgagcggaacaaaattgataccgcagaaaaattgcggatagtttaccaagagggcaaggaaaaaatcgccagattcactgattagagaactttgaattaaaaaataatatttaatttattgaaccagattagaacagcaacgagcatggcgagagagagttataaagagtgcaagcgcgtaacgattaacttaaattttggcaaataatctgcaaaagagactggcgaaaaaatattattactaataagaaggtgaagcaattctttgcttgagaataatcgaacattcaagttctgttactttgtgcgtgtgcgagcgtgctggacccgtgtatgtaattgtatgtatcgagtcaaccaattgtaaatagtttgtaaatatagagaaaatatgttcatttttccctttccgaatgtgaaaagaaagataagacaaacacagtagaaacaaaatcgtttcaagaaaaagaaaacccactgcaaaatttctgcgtgtttcggataaaataaagagacaaaaaagaacaaaaaatatgcaaccgacaacaaggaagagactttatttaaagtgtttttagataaattatttatacgaaaaaagaagctgaaaacgatatagagaacacaacacacacaaaaaagtcgaggaaactggaatccagatgaatttgtaatttaatgtagcgtcgtaagggaaataaaacaacacaaaaagataagaggaaaaaatgtataatcgaaagatcttttttgtttttttttaataatttaaatcaaagtcaaaaaataatgaaaatacaaagtgaaacttgtagataattcaaa

SEQ ID NO: 1048 - DNA, 1704 bp, Aedes aegypti
ttcaattgatcaagtaatatcgtacatgaagagaagcaaaaagcgcagagagaaatcagagttttatctgaacttggcagtttgagtcaaaagaagcacagaaaatcaacaagagagtcgcgaataggaacaagagagtcgccgtctttaaatgagcaaagtacacacaacgttgagttattttgtaaattttatcattatttagtaattaatgccactagtagactcttaacaaattgtcaccaaaagttacaaagtttttgtctgtgaaacatagaagaagaagcaaatcagcagcatcgaacgttctcgtgtgatacaagtgccggaagcaaaagcgcagctgagttcgaaaaacgccatcagtagcagaaaacggcagcagcaaacggcaaaccgcgagaagaaaatcgatgattgtcgaagtcggtgcgagctacatagcggaagaaaatttacaagttatgctctacgcaaagaactgaaacaagtgaaacacaatcctcttcgcaaagtaatggttaggaatttcaaattttgcccgacaagtacacaaagttgaaaatcgttcggagcaacaaccgcaacatcaacacccacaaaatacaaatggaagagtagattatttaatgcaagtaaaaaagtaatatttaaaaaattacaagttaataaaagaaagtgataatcaagtgctgtgaattacaaataattaaatttttatccataagctaaaattaagagttaaaagagagtaaatcaacccctttacgcaaaagacgaaaaagaaaagtggaaaacctcaacaacaagtcaaacaacggaaaaaagtcgaaaagaaaaagtcactcctagcgtagcagaaagaagagaaaaaaaaaatcagttgcacatcgcgaacgaggcaccagtggacgcaaatatccccttgtatttatgagtgcgaatttcgctgccatcgacgatctggttgaagagtttctgaaaatggaactcatttccgttcctccatatccaggccaattgggttatctaggatcaaacaaagtcaacgatttccgaacaccgttgatgccgataccggcaaatagtaataagaacgccaaccaacgccatcatcagtcacaacagcagctaccgagcagtcagccggtcagccagcgaagtcaccatcatcacaatcaccaccatcacagccatcatcaggcagcgcaggagaacagtcagccgctggagccggcgacgatagcccttaccgcatcaccccatgaagatgccctgcaagcgctatccgcccgactcgagtcggaactgcgcactgccaaacggcggcatttagcctgcaccgaagtattactcccggccgaccttctgccacggatagcttcgcagatgttcgaactttccgagaaggaaccgtgcggcatccgcgggtgcacggtttacatcgaattcgaggacgaaccagacaacagcagacggatcgccaccatgaagaccgatcctaccaccgtatccaccttcgagctgtatcttacccttcggcaagaccgaagcggctggacttcgatccttgccacagtttctcaagtcgcgattgccgtggaaggaaatttccagacaaattatccagaaggaaaaacaatcagctgtcatatgggagctgtcaacgggcagcatatagatccagctctgttctccttatag

SEQ ID NO: 1049 - DNA, 1041 bp, Aedes aegypti
tgctgcgaccacctccgtcatcgtcagcaatatctcagctgtattctaccgccatcaatgctagtagctgtcgctgtcggaaaactactgtctttcgaaaggcaaccgacacatcggctccgctgctcaaatatcgaaattcgtcaattcaaatagtggttgccgcggaaaaagaactaagatcgcttgatctgtatctacgaaaactagcaaaggcggtctcatctacacttgagagggactcggtctgcaaagcgcagcttctcttacttgaccagtcgagattgggttgagtcctggtcaccgagtggaacatttggcgactcatagggacggatctcgagcgacaactgacaactaacacataaaacaggcgttcgagggtgatttagagattagtagatctagagttcttaggaataagagcaacgggaagtgagggataatcaagacggtatctcaaccggcaaaagcaatgtattccgaaacaatctcggaattggacacgatagccaatgtgatcggtctgcggggagtaggaacgagtacattaacaaagtttgtcgatatgtggtatcacgtcttcctgtgggctctgttttcgtcgattgttatccataccggtgcggcggtaattgcgtttgtcacgctacgcaagcacaaatttggtcgattcttctcaatttttatcctagtaatgggtgttgtttctccggttaccggaggcaccgtcagtagtgccaccattgcctttgtacatagagcctcgaatttaccaatgtcgccaatcctggcgatggtatacggcgttggacagactatactgtctgcttgtctcgggttcacgcggctactggcaacactgtaaatgctattggcatatcctgcatatggtctgccagagcagacaacatcccactcaaatacaaatacatccatacatgtaaattaaacacatctaaattattgtactagtggaaattctaaatagatcaaacacgttagccattttacgatagtccagtttttatcaaaatgcgc

SEQ ID NO: 1050 - DNA, 2476 bp, Aedes aegypti
tgactcgattatgaaaactttggtttatttacaaagtcaaaatatctttcgtgaacgcgatccgatacaagcgcaaacacaaaacaaaaaaatcatgtgtcaggtgcagtgcatcagtgcgtgaagagtgcattcttcagggtgttggtgttatttttaattttctgatgaaatttttactaatcccaaaaagtgctacaaatattgagcttaattcttaacaatttatacgtttctgtccgtggtgcgtgtgtgccttatgaaaaaagggtccacggcaaggactaccatccgacgccaggagcaaggaagggaggagcggttcgaagcggtgataaggaaacggacgaatccgggtggacaaatcagcctggcagcaagaagggaaccgagttcagttcggtcagtcagtttagtttgttcaagctgttcatctcgtttgggtgtcgtctcggtcgaagtgctctgtgttcggaataatatccgcggaatcgagagtggaagtgccttatcagtttaatatagctaacaacaatcgtcggtgtgtgccttcggttcttttttttcggtccactgccatcacaaccattattggtcctcggagaatgtaatctaatcttctcggtctcaggcaggcaggcagaatcgttccgtttgaaagcctgaatcttatcgggtgccaacaccgacccctcgagcttcaatctgtgtgcagcagaagcagctgatatattttagtgtcgtgtggtgaaattttaaattctcggcggtagaagattgaatccctgaaggctgagcaaagagaaagaaggatataggatacagcacagaaactgcatgcgttcaagttcccgatgttcaaggcaacatactttgggcggacattcgcaggttgcaaaaatgtactccaaggtgtcgtaacttcccgcacattcggaacgaaccccaaggcaaagctacgtaaagtattggttgtgtcgaaactaacgcgactagagttcgagaaaacccgggaccaggccctcagcgatgaaaggctggagcataaaattcgcaaccgtggctcggactacgatgcgatgaaatactaccaccacctgcacaaggacgtggaggccgaggtggtgaaatcattccgcgaacaaggaatcgaggtgaaggtcgtcacacgactaactatcaataagcagctgctgcgatgggccgacatgctggtgccagtcggaggtgatggaacgttccttttggcagccggccgagccagtccgttcatattgaacggaccgaccaagatgcccgtggtgggattcaattcggaccccaggcgatccgagggaaggctaatgcttcctaagcactattccagcaacgtagaagaagccgtaaaacgaatcatttccggcgatttcaattggatgcatcgatcgagaatccggataacgctgatagggtcgactacgacggaacggccaccgcccatcgatctacatgagtacaacgtggcccaggtggaacacaaggacgtgatcaatggctccgaggagggcagcaacaatagaattctaccgtacttagcgttgaacgaggtcttcataggggaaatgctgtcggcgcgagtttcccaccttcacctacggatcgacaaatccgacgtggttacgaaaaccaagagttcggggctgtgcgtcagtacgggcaccgggtccacctcgtggctaacgagcatgaatcgcctctcgacgaacaacgtaaaggacctcatcgagatcatcaagcggcgatcgaagtccagcgcgctggagggaatcgatccggcggcagtgtccgaggagtacaatcagaatctggtctacccgccggacgacccgcggctgtgctactcgatacgggagcagatctgcgtgggggtgtggcccaaccccaagggactggaatcgaggggatttgccaagcaaatcacagtcaagtccaggtgcattgatgcaagcttagtgatagatggcagtattgcgtacaatttcaacgatggagcaaaggcgctactcgaggtgcacccggaggacgcgttgctgaccatcgacatgaaatgaagctacgatttatccatcttaatagggtttaaggtacagaaagtgcaaccaacacagactgctggtgagattgagcagctagctaatacgagatgcaattacatttttttttccgcgtgtcggaaaaaacaattgtgcacaagtcaactgatagaaaaaaaaagattagacgtcattttgatatccttttcgttatcatattatcatgtttttaagttattgttagtgtaattttacaaatggaggatcatgcatttatttatcgccgccgaccaaacgaaagtgctgaaatatacaagtataaagtgaggtaagtctgttgttccttgagggaaagaatttccaaaatcattgtgaagtaaaccgagagtgtttaagataaggat

SEQ ID NO: 1051 - DNA, 1671 bp, Aedes aegypti
aaggaaatcaagaagccgttggtcgaggcgctgaaactggcggcgagtaacaaaatactcgaaacggaactcaagacgcttcagaaggagcacagcatgctaaaggatatggtgcgagatttggagcaaatacacgagcagaagcacagcaacgcaactcagcagtgcggcaatggaaacagtagtaccagtagcaacagtaatagcaacactagcaacagcaacggtaacagcagcagcaacactaataacaacagcagtaaatcgacgaatggcgctgccaagagtagcggtaatggaagcagcagcagcagcaatactagcgccgaaaacgggaacagcgctccatccaagagtgcagcatcttccggtacttcggcgacggcatcttcgggttcgggcgttcaggcaagcaaaatcggtgcgaccgctagtcctgccaaggccatgctgaaccaagcaaccaatacgccctccaagatggtcccgaaagggaacccttccacgggggtaacctcgcagcaaccgacgggtaagatggtaactaaagttaccagcgtgacgccgaaacccggaaacgggacggggacagcttctggaccgtcggccaccactccgggtaaggttagttctaagtctaccagtacgcatcctagcacggtgccagccgcaactggggcaggctcatctccgacggcagcggctgcggcagcggggaacgcgacaccgtcgaccagtaccagcaatgctgccgccggtcagcatctcatccagtcgaaggaggagcacaagaagacgtgccatcggggggccaacggtggcgagaagggagacggttcatgtgtgtgctactattgcacactgttcggacagagtgtttgtttggaatgcaaccacaaccagcgaacgaacgaaacgcgcgatcgattgcgaaaaaaaatcaaacaactacagagcaacaaggacaaccagcagcttaagtcgttgaatctgaagaacatcaagattccacacggtgggctgctgaagaaaatcaacaccaataagagcaactcaacgaatgcagtgacgaacagcagcaacaataataacagcagcagcaacaacaacagtagtaccagcagttctactactagcagtaacaatgcaactcatccgacgtcggcgagtaaggaatcgtcatcgggaagcctcgcatcgaaaatggaagccttgaagatcagcaacaataagacaacgacggcaacagctggtcttgccacggcaaccaaagcccccgtagtgacgaagcctcccgccaacaagatgaacattgcagcagcaccagccaaaccgccagagatggccatcagtgcccgagaagtaccccaggttccacagccagtggtgcagccaactttaaggcctagcgtcaacaataccccgttcacgaaggtacctcccaaaccggtggaggaaacgctggacgccctggtgcgctacattgaaggtgactacgacgatgacaagcaaaaggacaacaagaagacagcgaagaaggtcaaacaaaaaagcaaaaagcaagagctcaaaaagatcaccgagctgggagagctcaaacaaaagttctccgagctaaaagaagaggacaaacgggcccagaatcggttacaattccaacagaatcttaag

SEQ ID NO: 1052 - DNA, 1557 bp, Aedes aegypti
aaaaacaagaaaaaggacaagctggcggacgagattgacgaaatcgatgaaatcgttgcaaagctggacggattggacgttggaagcagtgggaagaaaggagatgcgaagaagctaccggagaaagcactgggaaaggtgctaaacagaaagttgagcaaggactcgatcagttccagcggcagttcgcagaaagccaaagaaggaaaggagaaggttgtcaaggagaaaggtaaggcagatgagaaggataaggaaaaggacaaggacaaggaaaaagacaaggaaaagcccaagaagctaccagagaaggaaaaggaaaaggaaacgaagaagaagttggtgcggaagaagagtgaggcctacatcgatccggagtttgacaacaatgcattcaaattgttgaacttggaggacaccgaatcggatgaggaagaggtggaagttgaggaagaactggaggagccgaagcaaagcgaaattgtcgtcccggagcggacgccttcgccagtgcctgttcctcccaaagtggaggaacctccaaggccaccaacgccacctactcccgttccggtcccagtcaacacttctgccaccaagaaactcaacaaaaagaaaaacgaaaaggctaaagaacagtccactgctcccgcggttacaccggccaaagaagtcaaacaaaccaggagcaagcaggaacatgcagctcctcagccaacgacggttccaccgcaaaaaccttctaaaattaccaacaatgcttccaatgtgcaacctcacgtctccaagaacgacaccagcagcagcaagaagccctccggtagtgttcatcaacccgaaaaaccttccctcgataactccaacctgtccaaacgccagaagaaactgctcatgaagcaacaggagcagtccaaatccccgcaacaatcccagcagcagaagaagcaacaatcgcatcagcagactccaccgccccaggcaaaccaaaggcacgtcgacaaagccatgaagaacgcggaccgactgtcgaaggcacccaacgaacgtcgatccaaggtcaacatcagcgccgacacgacgctggaactgatcaatgattcgaatgcaccgtcgatgtcttctaagccggccacccagcccaaaatccctaacaccttcccaccgggcgacacttccttcggggccagcattatggaccagctgagccgaggaatccgagtggagggacttcaactgccaccgggtattacgctgacgcgagtggacgctgcccaagcggaagccatcaaggccaagcgagagtcgataaagaagatttgcgaaccgatgcaaaccgttcagccgccggaacctccgccaatgatgatgccaccgccaccgatgatgatgggctcgtccggaatgtacatgatgaaccccatgatggccaatgcggctgctcctccgatgatgatgaactccgctcccggtcaggactccgtcattatggtcgataccaataagctgaagggctcatccggggatggcgaaaagaaacccagcaagaaaaaaaatcgc

SEQ ID NO: 1053 - DNA, 758 bp, Aedes aegypti
gtttgaaaatggaagacgtctgaatctgttgctcaatttgttatttccgttttttcggtgaaaaaaatgcttagaacagtgcgaaaccggtcggaaattgtgcgtgagagtgccgggcagtgtttttgcgttatttggaagtgcatttcgccggatttggtgccgaaaagaatgagtttctagtgacacggttgcagtcagtccgtcagtgctggaatattttgctgctgggatccgatttttcatgtgtttttggagagacgaacaatcatcatcactcggcgactctgtgcgcggttttggatttcgccgtggaataataaaagtttcgacaacaatattgcgggcgccttattcggtcgcgttgtgtgtgtagttaggtaacgacgatgacgacgacgacgtgcctaaactgtgcatcgatccatccagagctccgtgaagaaactacgcgaatgtgagccgattgagataaagatcttttagtgtaacgtacgccagcccagccagtagtgagaatcctgaaatgtgaaagccctgaagaaggccaagccactactagaaggggcagcataaaacgtggaatgtttgtcggtgtatgtggccctcttaaggcgacaggtgattcgcaacaaacgagagcacgacgaagagtggagagaaaaataaagcggtcgaagaacctggcccagtccccgagtgccggacggggcgtgaagagagtcagtcaagtgccacgacaatcaaccagccaacta

SEQ ID NO: 1054 - DNA, 1424 bp, Aedes aegypti
atggatgtttgtcgagtaaacattttcattcaggtgaacaatgacaccatgaagccattggaagagtacatgctgtttacgaaaagcgaagtggcgtccatccaggtcatcaatcctcaaggcgttcgatccgcccagtgcaagcagttcgatattgtgccgaagctacccctcagcgaacccgccctcaacatgtcctcgggctcggataaaaattgggtcgtggaagctccgtcccggataccgtacgaagccatccaccaggacccatcggacgaggaggacaaaactcaggtggtgttcatcaccctgaccgcggtcttcgtggtgattgtcgtgtgctgcctgattgaagtgtaccgctcggatcgggagtacaagaagcggcaggagcgaaaaacggacgaggacatcattctgtcgaaggaacaggcggccgccaagatgcattatgaggcggccaccggtcccaacgccggcaaggggtacaattataaggcgatcccactggacgagaagaaggaaaatggtgccgccaaaccattagtcggcattctgaagaacggaagtgtcactcctcccatcaatggagatgcaaacggtcaaaaaactccagacgaaaaagacatgcagttgctgaccggcatccgagacagccaactgatggatcacgagccgctgtgggaatcgttggctgccgaggaggcggaagcactcatcaaagagattcccaacggtaccgaagatagccgtccgaactcccgacacggaagctcgcctcagctggccaacggaagtaacggagtgaacgcccaccatccgtccgaccgggacacggacagcgataacgaattgaccgacacctcgcataacattgcagatcaaacaatcctcgaagtagacgaacccacgtcggactcgtccgaagaacgagaagttgtagatccagtcgtaggaaaccccccggaaaacggagaagctgtagtcgatcggcaaccaggggaaccccgggtgccggacaatgtagtgatgcgagtcaagtataggaagctgccgccggtatttctggatgccgacaaacgacagtttggcaatccgattagctatctaggtggaccgcggctcgacaatcggaactcggtgcgctcgagtcggggcgatagtttgaccagtttggattcgttgatgtcgctagactagaatttcgagtggtggaaaataaactagtacaaagtcgcttgagaagggtagttttgaatctgatggtatcacagtccttagaattataaaaaaatatatttagatagtttaagaacgttcaacaacgatgctttaaacagcgttaccgaatcgaaatcgaaaaaaatgccagagctcaatgtatccaaaaattacttcagatttctttcaggataattccttaa

SEQ ID NO: 1055 - DNA, 3351 bp, Aedes aegypti
atgcacagatccatcggtagtggcagcaccgtccaccctaccactccaacgtcgtccctctttggggccccggtattcgtaggtcattcgccagtgaatgaacatccagcaacttcaccgtcgcaagtgttggtaaagtctacgctggtaggtggaagcaccaataccagcccgagcagtgtggccactcgagcagccgaagtgccgttgcacgttactcctcagcagcagtcacattccaatgacggtccggagagcaccagctgccccagtagtactagccgatcgttaagtcatcttcatagcagtaataacagcgttggtgcgtcgagtggtggtccagtgggaaagtatgccgccacctccggtggtaatggtattagtgctagtagtgccagtgttgattgtgagctaacgcgaccagcttcttcaggtgaaaccagcaacagttatagtagctccggtgagattggttggaaatcgaagaaaaacacttcaagtgcttcgagcagcagcagcagccccaaaatggttgcagcgagtgctgaagagatttgttacgagaagaatccaagatttggggggcccggagacgaggggaccactgttgacgtggactcgtccgaagaactaaagtatggtccgggaatagtgtcaaagttacgttgtcgttatttgagccttgcattgaggcaatccgcgaataagcagaggccttcgttgaataacatgcgtagggccaccagtttgaacaatctgttggacgaagagggtgaagatcttagtgaacgggagcaatcaatcgagtccaaggatcatcaccatcaccatcagtcgtcgcaggataaaggctatttgcagcagagccagaatgggaaatttggccaaattacgaaccagatgaacatggcaacaccgaaagcaaaaactccagacgagtacatctcgacgttccagaagagcgtgcagaacagttatacgcgaagtggccgacagacggagaagaagaacgagtacaatcggtacaataagcagcgtggtgctgattcgctaaaacgggcccgatcagttgaggcgctggtgcgctacgatcataaagcctgggagcgcgatatacagaaggaaaatctctacagtagcaacgatagcaatgtgatcattctggatgagattagctgtaccaacgggacgaccaacggcaacgccaacaactgtcaatcggtggcgatgaacaaggctgaactgataacggattgtgtcacgatcgaggaaaagatcatcaacggtcgggagaaaggtgatcccaaacccaaacggctgacctcgttcatcgatgcggacgaacgtcctccgccggatgtcgttcggcagacgatgaaaattttcgaagccaacgccaatcgtagaggacgacccgttgccagaactaacggtgctgccggtgaagttgctgccaaagtagcttgctacaaatcgatcatttctcaggacaaaccgccaatcacccatcccaaaccgccgctcagtcccaagaaaccaaatatcataccacgttctactagtcccaaatcgaatggagctccggtcgccaccaacggtctcaaagagaagccaatcctcccgaagctggacattggcgtgatccgcaacaatctggaaacaaccaacaacctcaagaacgttcaaacgccaaccgccaatcataataatagcaacacatcgacaccgctatctgtgcgcgtaacagaatcgcaatcctaccgtctcaagtatgaatcacccgccttatcgccaaacaacactgccgtcgctcaacacaaagtcacttctagtactacgacgacaacgacgacaaatcgcccggagagtcctcgagtcgcagcagctgccgcctgtatgcaaaacaacacaccaaacagtacggttctcacattcatcgactcaccatcgattccgactcttgtgagcaaactcaacaatctaaacatcgcgacctctacccctacgagcacccgttcttccacgccgcaagatttaccaccgcaagtcccccccaggcagcctccggtgcttcagtacgccaccagcgatgaagaggacccggacgatccggaggaccaacagaacgagtactcgataaatcacagcgatcgcgacaacgattcctccgacgatcaatcggatgaccttcaaccggcgacggaaggcgacgaagacgacgacttcaacgacagcgacgagttcgattcccccgaagtcaaaaaagtgtcccgcactgccatggacaacatttccagagcgggcgttacgacgcagttccgcttcaacggtcaatcccagcagaacaaatcccacctgccgtcgctcggcgccggtgccaagttgctctccaacaagaaactgaacgtggacgatcatcattcgaattcctcgtcgacgtcgtcatcgccgatcacagtgccagctaccgtcgtcgtggctcacaaaccgcctgtgccactgtcacgtgaaagtctcgcgtccgccaatggccttaagccgaacaacaccaacaatagcaatatcggtagtgtcacgcatagttccaatagtgtccacagtagcaacagcaatgtcaatactaataatatcagcaatggaagcaaagtggtgataaatgattcggtcgcttcggcgccgcccaatgtgagtgtgtcccctgccggaagtgacgtgtcgaaaacggtgaatctaaccgcccgggaaatcgagaagaatcagatcaatttggtcaggagtgaagaaagcctcaatagtggtgctgctgccgccgcctcagcccccaataataataataatagtgtcggtagtgtcggtgcagtgctgggaaaaactggtgacgtcagcaccaacagcggcggcggtgagttcttcatggccaagtggggcgctcagaagtcgtcgtcggcggcccagagcgaaaatgccgctgctgtcggagcagtggccagtccgctggcagggctggtgccaacgaagaagaaagtgaaggccccgccgccacccatcgaggccaacacgatggtgttcaacttcagcgaccggaaggacgtgccggattacatcgagaacgacgggatcatcctgcggccgcggccacgggaactgcctaagcccggcgagtccggtttcgtggtgctgggcgacctcacgctcgaaacctcgaccgatccggacgattcgtgggccatgggacccccgtcgccgtgcgatgtcgagtttgccaacgctaacattgtgatcaacggtaaatccagtatgagaaacaagacttctagggatagcaaggttttttttcgaaaatgcgattaa

SEQ ID NO: 1056 - DNA, 1798 bp, Aedes aegypti
aactgccccaacgccagacatgtatccgagtattacttcacagtttcgaatgggcggtgccgtccaaagtccgtacaatccttctccgtcgcaacagatgaacaatccaagtacaatgctgatctcttcgagcacaaactcgctcatgtcgtcgtcggtaaaaccgtcatcccaacaaatcggtgcaataggttctaagagtggatcagttggacaaccttatggccaacaatacatggggatgttccaacccgctccaccactgcagaacaatagcttctactcaaattccgctggaggccagagtgcatttttcagcggtgcaggagctacacaaaattacggaataccggcagctgctgctggaatgttcggtggacacggtggccaaaccccatcgaacgctccgcctccgcaacagcaacttccgaactatcccaacgcatcgcagttcttaaattcaccgttagcgttggcggcaaacgctatttctcagcaattccgcggagggcccacaacgaatccgcaatctgccgctgcagccgcagcatacatgaaaggaaaccaaccccaatcgcatatgcaggatcccaatggtcggcagctgaaaagccctttgaattctgatgcaatgaataatttaaaacagattccaccccaagcgagtccgccacatcataagggttacgcaacagcatgggagatacaaaatcaactgattcaacaacaacagcagcagcaaaaccagcagtctaaccaacagcagccaccacaacagcaaaatccacaacaacatccccaacagcaaatgagtcaaccaccgcagtctcagcagcccaatccaaatcgaaatatgatgccccccaaccagcaacctccagcaggactgggaggtgccggtgggggtcgtcctccacagggtgtccagggtgggggcatgcctcagcgatacccagctcccatccaacgaccgactaactactcccaggcgccagtaccgggaatgcatcagcaacggcccattcgtcagtcaggccataaccctggtcaacaacaacaggcaaacatggcacaggcaatgggcaatcccaacaaacattactacggtgggaatcgaggtggcggtcacgttaacgcgatgaacgagcaaagccttggcggaaaacctggcggtggaaatgagaaaccagtgctcgacggagatgttaacaaggatgattccaagaagaagtaaacgtcaaatcaaaaaggatcttcaatggagtgtagatgagaattggttacttagagaaaagctaataggggaaaagatgtgagacattaaatacattttggctgaaactaatagaactgagttcaacttactgaatgagagaaaaagtattcatttcacagttgtaacagcaggcgaaaaaatacataatagacaaacaaggtgcgtagacgattcagaaattcaatgaaactacacgaaaaatatgtattattggtaaataaataaatacctatttattaaatgaaatagttaatggaaatcatcggaaattgattagccacgcagtaacacacgaagaaacgaactgcgacgttagctctgttaacactgaaattcacaataatcgcattataccatttaactcagcatctgaataccgattgtaatcagcagaacgatcacaaatggagtggcgaactggtactaagtaatactgctacaatgcttaacacgccccctggtatcagtgaaatggatcggtttgactgagtttcactataaacgcaaaataaaaccttgaac

SEQ ID NO: 1057 - DNA, 1242 bp, Aedes aegypti
ggttggctcctgaacatcgagtgcgccctggacgaggacaagatcccccgcctcaaagacttcgtggcgtatttgacgcggaaatcacacaaccagatccccggcagcatgatcatctggtacgacgcgatcaccgaaaagggtctcctcagctggcagaacgaactgaacagtctcaatcagggtttctttgcggcgtgcgatggaatctttctgaactacacgtggaccaggcagcatctggagcgatcggagaacttcatccgcaattactacccccgacggaagctggacgtgttcgtgggaatcgatgtttttggacggggtcaaactgccaagttggatacccattctacattggccgccgtcattgagttcaagttctccacggcgatcttcgctcccggatggacgtacgaatcgctcgaggagtccatgcgtcgcgatcaactcgatccagttcagtgtaatgatcggttcctgaagctgaacgatcgtttctggaacctcctttggaaatacctgtacgttcgaggacctacggaacttcccttctacacatcgttctgtctaggttcaggaaagattcgtaatcgcctgggtaagactttggacgaatcgtggttcaatctatcgcgccagggcttccaaccgagcattccgtacgcagcgccacgaaatcagggaatcgatccgatctactggactcacagcttcgagacggctctggacggtggatcgtgtcttcgaatggaggatatccacccgaactgtcgactatttgcgtgtgatttcgcgtgtggaagcgatcttctggtgggttatgcgttccgaagaagcaatgaactgagtgccgatgtgaggttggtgttgaaggcgtacaatacgcggtaccatgactcggtgaagatcgtttgtgggggcgaggattgtcacctcagtgagagaagaaacgaaatgaaagcattgctattggacagtgaagattggcccaggctgttggagttgaaggcgcagttgaagcttccgctggtggccgcgatcaacggatgggagattagatactactacctatccttcgaagccatcgtccagccggtgtccatcgtggacatcggcgtcgagctcgtgaaagatgaccccaaggatcacgtcctgctgggggccatttcgctgcaggccggtttccccgctagccgcagtcgcatccgcaagcgctcgatcgttacgtacggagcgtga

SEQ ID NO: 1058 - DNA, 3883 bp, Aedes aegypti
tgacggatccttgaacgttatggaaaaattgcaagaacatgacagatttgcccaatgatgtcggcagcaatctttgaaataaattcatcaatttccaaaaatcctttaaaatcttgtgggaaattcttcaataatctcactcgaagttaagcaaagcttttcaaaatatccactgacaatcttaccaggcaacagaattttggaatgaatttcggaaggaattctacaaagaagtcgggaataatccatttagaaggtagtaattggctactctacaccgagcattaatattccttttatcttcagtatctttcacatcattatttagtgtaggtattatataatactcgatcatgtattgacccatttgttcaacagatttcaaataacacacttccaattttttttcatttttaaaccctacgcgatataaacttttgaaataccttaagtaacgtttttaggcttataggtctattatacagcttatatatggcaagtgagctatataatagcattattttaacactgagcgaattaaagtgctattttattacttaggacattgatcttatgaaatgcatcaataaatggggattaaatcgccttcgtctctcatcagtgaaggagtgtcaacgttttaatactaacaattttcctaatattgtacatacagctgaatatgtaactattaccgtagtctagactaacattcacacattcattgtacattgagttgcactaaaaacttctgagatacccaattcttctcatcaaaattctaataatctttctattctatttacgttagacgtggaaccgcttccaggatggcaaacgggtggtcgacttcgtgctggcctacaacggccaggaccaaagcgaagagatggcccgcaaaagggccaccttccagcagaacctccaagcggagggtttagaaatcgaaccggaatgttcgcagcgaatccacttcatcaaaatccacgtcccccaggaggtggtgtcccggtactgtgagatcatgcgcatgcagatgccaacggtgaagctgccgggtcaggacaatattgcgccaaaggatttcagcgtgagcggtttgctggttaagctgtttaggaggccgctgttcagcttcgtgatcatcgatcgggacaagttccgcaagagggaataccagctgaagcacgagtatacgcgggacaagtcgtatctgtttgacgacggacagccggatttcttcactccgagcatccggatagcggtggcccattttattctggagcggacgtatttcaacgtgggggaggagaacaagtacgacatcgggttgaggaagctgttgaacgatggggtttatttggatgcttacccgctgcacgatggaaacacggacatgccggaggtggagtgtcagaggacgcttcttctgcaggagtgggcttccgtgatccggtggatcaagcaccagccgttggaccacatcaaggagtacttcggggtgaaggtggcgatgtacttcgcctggcttgggttctacacgcacatgctgatctgggcttcgatcgtgggtttgctgtgtttcttctacggattgctaacgttccgggacaaccggatcagtcaggacatttgcaacgacaacacgacgatcatgtgtccgcagtgtgacgccaagtgcgactactggaggctaaacgatacgtgcacaacctcgcaactggcgcacatattcgacaacaacttcacgatcgtgttcgcggtgttcatgtcgatctgggctaccctctatctggaaatgtggaaacggtactcatcggccattcagcaccggtggggcatcacggattactgttcgctggcggaacctccacggccgcagtatttgtcgcggttgaaggatagcaagaagacgatcttcaatataattaccgggacgcaggaaccatcgccgccgttctggacgaaaaagttgcccagcttcctatacagttactccgtgatatttttgtttataaccctagcgatcgccgccgtcttcggcatcgtgatctaccggatgtcgctgatgacctcgcgcaacatctacggcgacccggacgccgtctcgaccaagctgttgctcctgccggcgacggccgccatcatcaacttgatcgtgtcgacgatcctgaacttcgcgtacgattacgtggccgtctacatgaccgacatcgagtaccggcggacgcagagcgagtacaacgagagtctgaacctcaagatctacctcttccagttcatcaactactacagttcgatcttctacattgcgttcgtgaaggggaagttccccggctatccggcgaagtacaaccggattctgacgctacgtcaggaggaatgcagtcccggtggatgcctgatggaactgtgcatccagctggcgatcatcatgatcggcaagcagatcatttcgttgatcctggagattctggtgccgttcctgttgcaaaagttccgcgagttcagaagcgtgctgggcatcgagtcggaggaatcagagaacggcgagaagctgatttgctgcaaccagtggaccaaagattttacgctgatcagctggaccgatcggagtttgttcgaggaatatcttaagatgatcatccagtacggattcataacgatctttgtggtggccttcccgttgggtccattgtttgcgctgttgaacaacgtgttcgagacgcggttggacgcgaagaagttcttgctgtactacaagcgagccgttccgcagcgagtgcgaaacatcggcatgtggtacaacgtgatgcacgtgctcggaaaagtggcggtgatttccagtgcattcattatcgccttctcgtcgaacttcatcccgcggctggtatacatgtacgtcgtgagccaggacaaaacagaccgaggctatctgaaccacacgctggcgtacttcaacgtcagcgatttcgaaccgggtgctgccccgattgcctccaagtttgagaacgtcaccgtgtgtcgctaccacgagtatcggaaccccccgggagcggatcgggcctacaagcgaccgctcatctactggcacatcctggccatccgtctggccttcgtggtcatctaccagaacgtggtcagcttcgtgcagattgtggtggcgtgggccattccggacacccccggccgactgcaagatcagatcaagcgggaacagtacctaacgaacgagttcatcatccagcaggagaagctgaagacccgggagcggaagtgtggccgcaatggtagctcgaaacggcgcaacgggacgctggcacggcagcagagcagtttggaagaatacggcacgacggtgagcctgaccgaggaggaaggcgaagacgaaaactacgtccggaggaggccaaacggtggaaccgatccgtacaatcacgaacgcttccaggagtgcgagattgtgacgtcgagagtttagatgagggggctcgaaacaatgaccaacccagtcagtagagtgtggcgtaagcatccacatgttaactatttttctactttcgaactttatatctttacactgacgacgctgagaaccgtactgatcgaatgcctttcttttacgttttaaatggcatttcgttttgcgaagctttacatgtgaatatatgagacgcaacatttgggggatctgaacccctagcgcaaaacttagaagtgtagctaaattttaggtagctattatataggagcgtaaacattttctttgtaccaagagaaattgtattgcatgaacaacaagaggaacaacctaaccaacacacagcacttatttattaaactaggaaaaacaaaacaaccaataaaatatattttcaatttt

SEQ ID NO: 1059 - DNA, 5740 bp, Aedes aegypti
atgatgttgcccccatcgccttcgccgtcaatgggcaagttccatcgttaccatcagcagcgcccgccgtcctcttcgtcgctgtcgtcgtcttcgtcatgctcaatgtctccgaacagtggtttcgcaactactggtggtggcggtccaggaggaatcagtggttccgactcatcgtcctgctgctcgtcgactgccagtattcaaacggccataacctcatcatccacggcaacggcagtgccgatggaagtggacgatttgccacagctattccccatgttacccccaccagtcccatcaatggccactggtggaagcaccacgcgaccttcaggaggggcgggatctggatcttccctctcactggccggcattacacgccatatgcgcaccgtatgcagcaatcattccactagtcacaataccggaagcagcagtagtagcggaacagtcatcacctcctcaaattctgctacggccgctaccaacaacaccctctttctgtcgacgattccgttgcgacgcttgcgaagctccctgcggcggcattcggtgtcagctgcccacatggcaaagcaaaagtcctcccagagcattgtaggcagtagtagcaatgttagtagcaatcctagttctaacggtcccctatccggcggaggcggtttctttggcaagaatgccacgggtggaattgtggtcgatcgttcgattcaaccggttcaccatcggacccggtccctgccgttaacggaggaaagtgcaatacgtgtgacatacaatggaacctttctgcatccccattccggcggtggccagcaaacacagcataatcagctatcgagcatcggtaatcgcaaacatcagcaatcatccagtttatcgattgcttcgctcaaatgcacctgtccatccagtggagccctaccgatcattgttgtcggcaacagcaccagaacaagtcattataatttatgtcccttgcatggcagcgctgcccattcctcgtcgccttcatcgtcatcgtccatggcggcagctgggtccactcgtcaacaggactatgaaaatatgaataaatcatgctcgtacctgccgtcaagttctcctccggatcagcagcattattacaacaatcacttgttcgaaggcactgatagcaatcattctgcaatcgcgacgacgttatctcgcagctcgatggagagcataatcgaagatcaaaagtacctcccgatgaatatgaaaaagcccacttccgctcccagcagccaccaaccatcgacgacagctggtggttcccaggaggaaaaggacctggcaaatgtggcacctaatcttcagttcatcagtcggctactgcggagttcgcaaattcaaactgccaataacagcaaactggccgctttgaaaatggccaccgccaccggaggtaacaataatggcacgggcaacatcagcagcagtagtagtagtggtagtaatagcactggtagcaatttgcacggtagcacaacaacgggaaccggaaatggtaccgccatccacgcttactgtagtagcactggcagtggaggcacgctaccgaaagggggcacttctccgccaggttcgctgaggcgccgtagcggtcgtaacagtaccaaatccaggcggagcgcagccattgcccgtgagcgttgcgacagtcttccatcacgaaatagaacaaccagtgaaaccagcacccatcagcagcagttgatcatgaacagcggcggaatgcctccgccgaggacgatcccatctgccagtttcaaccgaccgcaatcgatgatcgtgaaccgccagagccacagccatagtcctccggtgcattcgtcgccgctgagtcctccttccggtgcatgctctaccggaagtgatgggtcctcgttcagtatcgacgaacctgacagctacaacagttcgcacacaccggatgagggcaatggctttcccaaggtcattaaccatctcagctcaggttgttccattccggaggagaattccgaggagtacatcaacaactacggaaaagttcctcttaggtcccacacgcaacatcgatctatggacgagttcgttaataacgcgatcagaaggggcagcccggcaccgacggccaacattgtcagttcggtcgatggtaccggcaactacatggagatgtacagcccgagcggcagttcaccgggcgatccatccggcaacagtggctacataccgatgtcaccgagtacggactttcccagaggcttgtacagttccagtgcacactcacgtacctccagtttggcggaagacaccgttgacgcatatgttcctatggcagcaccaggtcacaacgcggaagagtacgtcgacatggacccgtcgcacaatagtagcaatcgaacgctagctgcggcaacgaccagtcagactacgattacgactgccggtggcaatggtaatattagttcggcggcatctagctgtagcattacgtccggtaccccttcgactgatatgcggttctccggatatcacctggacaaggttgaggctcgctttacaccaagcgaagatgatgaaatggagcgaccattgcggacgtactctgtgggcagtcggctggagcacaacaagcgcaagttgcgcgtggacatgctcagttcagaaggttcctcgaattcaagggttcgagcgttttctgtaggctcaagagcaaaggttccgcgatccgatgtgtataaaggaagcggtgctccgatcacagcaccattactttcggcgagtagctccggaagcttgcaggaaactagtagcaacagcggaagcattaccaactgtgctcctgggacaagtacaaactccagaggttcaaactccagcatgaatgaaggcagaacgggcaagaagtcgtcaagtgcccctaccttggcgccaaagcctcatggatcgtttgatcctattatggatgatttgatggagatcgattacagtgctccacagtttcacggcgaaccggctgttagtagtagtacaccacaaaagacttcgggtatggaggattacatggagatgacggcaggagggaataagaaaaataccggatatgttgaaatgaaaccgggacatatcccaccggtggttgcgagttcccttgagaatagcgattatctggatatgcgaccggggacaggatatgaatcgaatccgtcgacgaaaagcaaaagctctccgattaagattagttcgccgaagaaattcagcagtggtgggaataataacaacaactacctggaaatgtccccacgtatgatggggacatcatcttcgtcttcctcatcaatagccaaccgtaaatctgcagtaccttcggaagattacctgaacataagtccactgatgatgaccagtgcgggaggtgatagtggtaacgaggaaaaaatgattaacgaagaagaggacgaggaggaagtggttgcgccaagtagtgctccagatgtctacatggagatgacatggagccagcccaagactaatctgaagctggattgttctaaacccgcatcagatgactatatcaatatggattatagtcgcaaagaaggaggctcgagtgcgttggacccccgtatgagttcgatgccaattgcgattcagtcgggaagcgctggtcgaacattacaaggggacctgatggaaccaaagataggcggagcaccgtctaatattccaaattaccttcccctgaattcctcggcgacacgacaccaggtcgcagcacaaattggcttcagcccaaagcagaacagtttgcgatcacgctgtgattcgagagatagtggaattgtgacaccttccggaagccaggtaaccattttcccgttcagtcctggaagcccaatcaaatcgttttcgttgggtgtggaacctagtgcagaagagaggaaatgtttcgtagatgcaactaccggcactttgcgaatcagtgaaaccgatgaggataacagtgaagaatcgaatgagttcctagcagtcgatcagcaacagccatcgcaaccgaaagacgccacggagagtagtaagctggaggatctaagtcataactatgccgagttgagtataggtcaccaacaacaacaacaacaacaacagcaacagcagcaacaaactcagcaaaagactgagaaaagtagtcatccaagttccttcagcagtaccaaaaaagcaaatctaagtttaattctcacaacatcgactaatactagaacaacaccaacagtaactgctatgaagtctgccgtagaatatccggactacgtcaactgcacaccggtaacaactcccgtggtaactaaaccaaccactcctatggcagtggatgatcaagccggggattatgctataatgaatccagctagtctcaggaagctatccagcacttctcagtcggaactggcatcgacggaaagtggacttcctccgttgaccaaaaagtccaatcagattttcaagccgataacatcgagtcaagatgaagcatttctgaagaaatccggtggtgcctcacccaagccagcattcagtcgacaatactcagaacgccgagctggtccatctggaatcgattcgtcgggttatgagatgcttcaacgcacctcccgaccgaacagcgtaaacagcgaaaaaatcaccaacaaatgtcctccatctgtaggctcgacacgtcctagttcggccaatagcgacaggcttcccatcatatcagctacctcatcatccgcttcctcaacatcaacgttgtgcgagagtaaaaaccaaagccccacggcgtctagcatgatgattgcaacaactacgactacgacgactcccggagtacgaccggattccgttacctcgctcacagatccgcacatcatttcgagaccgccatcggtaagttcggaacgcgagctgcactatgccagtctcgatcttccaccttgcacaaaccctccacaatcggcgccggcagtcggtgcagtggtggtaccacccaaccgcatggaagttgattccgatacggccacggcaagtcgccctggtggacctgactcgttaaactccagtcctagtcccaactctggatgtacctcgcaacaacagactggttctgccttcacgtatgctcaaatagattttgtccgctcggttgcccaggcccaagcccagcaacagcaacaacagtcattaaccaaaagcggccaacagcaacagtaaatagagcacaggataccgaataaaacacacacacattcttacatacacactgaaacaactgccaatctgaaacaacaaaagcgcccctcctttcaaacgtaagtatagcggttaagctgcgtgagatgtacatatatacagttgcagcaagcaggaagcggaagcacactcctcatgtgtgcactattgcagtagtagcactgcaaaagttcggattagggacagttcttcgttaccgtttattttttgtaccaagatgtctacacatgaagagagagagagggcaccgagaaggagagaggcaagttggcagtttgatcgaatccaagaattagcagaggagagagagccacactactacctaagcatgtcgaacgttatttttaataagtgtttaagaagaatcgcctcgcgcgatcagcaaaagatggaaaatgaaacaaaaatattccaaaaatagtttaattgc

SEQ ID NO: 1060 - DNA, 354 bp, Aedes aegypti
tccgcggttgacggcgggaagaggcgaggagggattgtggttgtggccgtgagctgggaaagcgatagtccagttctcgcggctggcgaagaagcctcaaagtggaagagtggcgaagtggaatccggttctacaaacgaccataagaatacatacgtacacgtactgcttggtgctactccaggggggtttcttcttctttcccgatccgagatagatgtattgtacggtgtccatgtagacgaagaagcaaaagtgcgaagaatagttcttactgaagacgaccgcgacgaagacgacgacgagaccccatcaacaacaacaacaaccagatcacggatgttgggtctctga

SEQ ID NO: 1061 - DNA, 1779 bp, Aedes aegypti
gatgacgacgatgagatagagatggaaggaaacgacaaaagccaagcggtgttcaaccgcaatacgatggatatctacgttaaaccaaagaaagatggcggtggcgctagcacgactagcaatccggacatctcgtacgaagaagcaggaagcgaaatatccgccgacggattcgagaatatcatctgttcgccaaactttccacaactaggtggcagcagcactatgggcagttatcaggacgatgactacgacgatgatttcgacattcaaatcctgccggacgagaactcgttgacgaacggcgagagtgaaggcgatgacttggtttatccacctcctctgctgccgttcgggaactcggaaacgagcatcacccgcataccggtcggaagtaaaatgcgaaccaacggtggatctgcgctccttacgccgatgatccggcgcagacgccagtccagcagtcggggcggaaggctgatactgtcgacgagtccggggtctcgagatgccaaggtcaccatgacgaatggggtggtcattccaccgtcggcgtttgtcctcaggaaccctcgggggaatcagccccggtcgtacaacacggacgccctctggtcggccctgatggatgttaaggcgggagagagtatatacagagcgtcacaaatccacaaagttcctcgcaaaacgctccgcaactggatgaaacggtgggacatcaagtccgcctatccgatgccacggcagctaaaggaagcggctgagaagaaacgtatcatcaaggaactgactgaacaagcacagcaaatcggcgaagaaccgatgcagtaatagaaagaaatccaaccaaccaattcatatgtactagtaatcttaaacagaaacttaattatacgtttttacacgaaacaaagaaatgaaccccaaatatgaaacaaaacggaaatgatagtcagcttgaaacagatggcaaagataagagagtaagagagaaagagacaaatttatgatatacagatttatatatttttgagttatagttactaagtcagacatccccgtacacttcccttcccaccatcccaaattagaagcgtaaggaaacctttccccagagatggaacggagaggatatggttcaaagtgaaatctagttcggtagcgtttaggttcttttataatcgttttccaaaaacatacagaaagcatgagtgtaatgaaaatctcctaatccttaatttagaacatttaatctgtataattatgttagcgaagcacttttcattacgcaaacccatatattggagaacggtcagagatagtttgcatcgctgtttgcgagaataatttcacaaaagtagtagaaacgtacatttacttctagtcaaatgttgtaaaatcacaaaccattagctttttcatcccaagggctttatatacgaatctagttttatgataattggcattacatttcgttgtgtacgaatagtcacgctcggttgcaatgtaggtactacaaatatatattttatccacttaggccatatatgtatgattagtctttctcgtacctttgatttcaactaactgtgcaccaatcatattttatacatccctttaagtaagtacttacctgaatgtggaactgatcgggggctcgccgacgggctcccgatcgagggcagtcttgtttgaaataacttattttgtacggaaccattctagtgtcgtttcattaccaaaaattgtgcaagtcaataaagtaattcgagtaaaacc

SEQ ID NO: 1062 - DNA, 1493 bp, Aedes aegypti
ttgaccaatcacgatttgaccacgacacaactggactgacaaacggacgaacggggtgacaggagacacttcgaacaagactctaccgtggctcatccttcagaactgcctccctcgccgcaccaatgggaatgacacaatgaagcgatggctgcctgaaatttgtaaattactcaccagcactacaaaaatgagtgcacctcaacggaaaatcacataattcggatgacagccgaacaaaactcatttaggacgaaacaagtagcagagtgtattatagtatcgtatatattcgtataaaaccaacatgaaacaacacactagtaaagtagacactacatacaactatcaagattagtgaacatgaacaatacaatgctgccaaatcggcatcctctgagcgccactcaacagggcttagagaatctcaggaggatgctactacacgtacgagagaccggaccagagacggaaagagtgaatccttaggctaggacacggcaaccaacaacctcaaccaatttcggaggacgagacaattttttcccccttcgggatacatcaatcccccggaagaaggagtaatagaagctagtcgatgcatgccacaagcgtgggatgagtgcatcacaaatcgtgcaacacatggagaactacatcgcgaaagtgttgcggatctatcgctggtggtacggggactgactaccttcgaaggtaaggtagcggaacaacctcttttagaccaccagcattttttttcggactgatcagcgagggccatcattcaattaactggcaagcggtaggaatcactatgaatcaacagcaatttttcgcatagacaaactaccaaaccatgtgggagatgtgcagccgtcattcacggggacacatttgtaatgggaatcgttaatcgtaaacgcagaaaaaaaaacgtcgaaaagagatgcgagacatcaatatgtaatcaagaaaactgtaattcatttgcttttccctgatgatgctgcaactgcccagcataaataagagtagtaatttgtaaaaagggaagtctgctagttgcagattgaagaacgaagtcgagtaaaattaggacgaaacgaaataaaagaaactgctgcaggtaatgatgatgaccatgatggtatgatttaagcattagtagacaattttttagttctatttaggttccgtaagtccactatgtatgatcatcgtgggcgaaaaagctgtgtttatttgttaaggaaggaatacatttagaaaaaaaaggttgcgcaagtatcggctactacctaggggcagatatactactaccgtaccagtaagataacgatttatagtgtgtagtatatgactaggtacaattgctaccagaaagaaaaaaagaagcatgttttctgtatgcgtgatagtgtgacatttcgaagctttttcgtttaatgattgtgttcgcaagtggataaaataaatgtactgtattaaagggt

SEQ ID NO: 1063 - DNA, 3101 bp, Aedes aegypti
tgctccagaaagtcaagcaatgctaaaatcccaatgcttaaaaataaatctcttacaattatgtttgcaacctttcggtcatggcatgattaatatccaaataccacaataaccaaaatgagagggagcaaaaggacaatttacgcagagaaaagtactttctgtagtatctccgtcacataattgcgcacctcactctgctaacgagagaaagtgtattcgctagtcgagcaagcgcgcgcttcgtaaattttagacgagaattttaaatttaaatcttcctcggtaacttactcgccgacttcccgtctcatcgctagcatttagcagtgcaaaattgaccggcggctctcaccctttttaacgtttcacggtgcaattttgtttaggcgccactctcgctcgcatgagctctccaaatcggcttggcttgagcacggaatttgcgagatttccttctggtgttcataagcatcctcaaatcccctgtggagaacacctggtaggagaataattttcctccttgaccgggacgcgccaacgatttggatggaggaaaagttcaaaccgttcacgcgccgtttttttcgggatgatagatgattgctgcagtcgacaaacagctcagttgcaaatcggtcggtaggagaaatcgactctcagctgaggcgttcgttcagtgaagcgatctagtggattgatgtggtaacaaaaattaaggaagctcaatgaaaactagatctaatcaaagtaggtgaaaaggataaacaagaaagccgacgaataaccaggaaacaaattaaatttgagtgacataatcggttcgtttgcgaagaatcgatgtaaaaaaaattgtgattgtgcatctgagaggatcaacaataggtgaaaattctgtgatttgattgaagtgagtgaaactaaacaaagaaaatacatcaaaaatggaggaaagcaatgaagtggtgctttacatttatgacctaacacaaggcatggctgctatgatgtcccagatgctgctaggtcgccacatcgacggcatttggcacacggcggtggtcgtcttcgggcgggaatactttttcggatcccatggcatcacgagctgcttgccgggagctacagtgctcgggcaaccgttacgaaaggaggtgatcggtcagacgttcatcccccaggccgtattctcggattacgtgcgtggcctagcggaaagtaccttcagaggcaccaagtacagtctcctgagtcacaactgcaacaccttcagcgaggatctgtgccagttcctgtgcggcgtcggcatccccaagtacatccttgaccttccgcaggagttcctgtccacaccgttgggccaaagtctcgcaccgctgattgccagtctcgactcgggtggtgatccgactgcaaacttccagcacgagtcggacttcctccggggaggtccaccacgggaaaccagtcccggctttgaccagctcaacacccaaatcgagcaggcccgtcaacagtcgcacgagctgaacgaacggcggaacaagatccgcgacaagatcgacaagaagaccaagaagaaagagaagaagtccaggaaggaacgggcgcaaggttcgggcgaaggctccgatcagaactctaccggaatgtctgagggcgaagcggaatcgatgaacggcagcaacggtgttaatgggtccatcccaccggagatgctgccttcggagaaggtgcgcaaggaagaagaagctgaacgactggctgaggaggagaggaagaagaaccgtgatccaccgatcatcttcaaggaagtcgatccaaaactcgaactggaatgcctggtcaacttagtggacgggaaactttcggaggaagaacaggtagcggtggatgagttgcatcagtatctacttctgggtgagggagcttgggccttgggagacagtttcctggtattcgttggacgcatgctccgagataattcgctctcgacggaagttcgggttcacttgctccgtgcgttggccaatgctgccctgaaggacgacatcattctgctgctgcaccaggaccgacgagaccacgtgctgatgaactttgcccaggacatcgacagacatccgccggaggaacagcaagcaatggctcttttcatgtgcaacctgttcgagaacgacaacgcctccgagtggctgctgtacatctccgagtggcagtacagcaaccagtcgatttcgaacatccgcgcgaccaccaaggtgaccgtccactgtctgctgtccgcctgtccccgactgaaggacctcggcaccgccctggttcacaatctagcctctaaggaagtcaaaactgtggtattcgacgacgtggcggtggaaatctcgatggccctgctgcagttcttcaactcggaaccctcggaggagcacctcttccggacgatgaaggccttgtccaagtttgtcaatgtctccccagatgtcccgcagttcatccagatgatcggaccacaccccaaaacgatgcgaggcaaaagcgagcgaatcaacgagctgattgatcagatttccaaaaaggttcgctaaccggcttccttccccaactctcttttcccaaagttcggttcatttagatagttgacaatttagctgtagaaccaccaaaaacattacacaaacacactacacattaaacccctaggcagtcagtcagtacgataagttggacaaggaatggtgtgttgatcgaaatggattatgaaattcttcgcgccatatttaattttcttccggtccacccttccccatacaaaaaggaaatgtggagcatatgcattttcaccgctagtggctagtggacttcttaccccaacaacgaaccccacatgttctagtgcaatatctggctaaattagtatcaaccgattcgtttcttgttgctcctcttgcagaaggaaactctgtaactgttaaacgaatggcgaagaacggtagtctctgttttcgacgcgatgacaagtgtttttacttttatttctttggttgaaactcgtactaacgcattatacaaacaatatatgatatttttattgaaaggta

SEQ ID NO: 1064 - DNA, 2374 bp, Aedes aegypti
gtggctggtgtttgggcaagatttcataaaccttccatcacagatgtattagatcgcggctcaccatccatccaacaccatcgacagtgacactcgcttttccaaacaacaagacaaacgcgccgccgccaatggaatccgaagcgaaggaagggccaccggaagtgcgggccacccgctcccggtcgagaaccccgctgaatctgcgcgtcagcgtcgaacgtgacttgaatggcggggaagcgccaaaaccggaaaaggtccagaaacctccaaacgttaccacaatccaggaagagttgaactcttcgcaaaagtcaacctccgcctcgggaggttcccgctccgtccgcaaaacccgcaccgttacgtcagactattcttctgatggtacccgccaccaccaaggaagtctcctccaacccagcaaaggacaaatccgttacggttacaaagacaacagtaaccactgttaccacatcagcttcctcctcatcgcggacgtctccctcgaaaaaggaaatccgccagagtgagatcagtcgaacgttggaagacagtcaaaaggctgttctccggaccagcactcccaaagccacttccaaagtgtccaagaaaattacactgactcccgaggagttgcagaagcatgttgcctacaaagagtacaaagaagccggagagtactggaacaagttccccaagacagactacacctattcggagttgtctccgttccggcgcgagcttgccccggggatgattgccatgccgaacatgtcccggccagggctgaccaagcatgccgagcgcataagcgtgatgattgagcgaaatcccacccaagagtcgtacattcggcagcgatatgctgcgtccaagtattccagctcaggagtggccggagggagtttcgcccgggctgacccctatgattccggcgaggaaacgctggatctatcacaactttcccgagcatcgcaaagttaccgcagtaagagatccgcctcgcatgtacaggtggacgaacatcgttcgtttgtgagtcgctttttcctgtccattgtgaacctgttctacagtgcgacgcattcggtttcgagggtattcaaccagtcggaacacaacttgtattacacgaggattgaagatgagagaggtttcttcgcaaaaatttactccttcttcaatatgctggtcacgagtatcttcaagaaagtgtacctcctgatctcatccgtgctgttcatggacacttggctgctccagagcgcttccggtgacgttccacaacgcaggaggaaatttttgcgcttccttctgattttactgcctttccttgtatgcggtggaaccttacttttcgtagatctcagtcattggttcccagaaaacaccttccagctccccaaattcgatttcaaactcgatcttcccgacgctgaaccggccaaggcatttgtcttggaaaagtgggactcggcacgccttttcactgagcactatttggatgctttaaagctcgcctcccagaacggttttgaggaagctcgtaaaatctggcaggagaacgtcaaccatcttttcggttaacggtggtggtcctacctgatttgagttgattttatgaaccttctagagttttgttttaaccgcttcatcacgtggtagcgggcttatatgcttctatccaagtaaccaaatagcactttagtgctattatacagctgacaggccctatactagcagtataatagcactataagcacaaactcacgtattagcagactagtggttacttggctatcttcaagatttgagtgccattttcttattcgttcccgtttgaggggaatcgttccctcctattatcccttcccaaactcctctctgatcccgagtaaatcatcacatgaacaaaaagcgcaacgtccgtaacagagtcggtacttgcctcacatcacgatggagccactagctacaacccttcaatcgcttgaatgagaccatgccagatgggacactgttagccgaaaaagggggaaagtgcgactctcttttgaaataagctcagcatttacaaacaatatttaatcatcgatgataatataattacaacatattgccatttaaaatgccgcaaatcagtcggagaaggatagagaggactacgtccatagcatctagatctaatttagtcaccgtgttgttttgccaatgtaaatcgtcaagttcgaattgagtagttttcgtttagcttgttgaaattgttcgatttcaaatggaaagtttataataagtttcgaagaaaacccgtagtgaacgtcatctgtaaggtagatttaaagaaaaataaaatgattaacttctaaaa

SEQ ID NO: 1065 - DNA, 2739 bp, Aedes aegypti
agggcggatcgaattcaaaccgggtgcggggataatgcggcgctgctaacgatgagcccgagaaacattgtgcacgtcgtggaagagaacatccgcggcaaagtcagctggaggaatctgcccctagaactgcggaaggccctgcatgacaatgagaagcgctacgaaaagttcattctcgagtacagcctcaagaaccaacttcgctatcgcggcaatttagtgcacaccacattcggcaatgagaagttatactacgaaaagctgatcgaggagaacatcaaggccctgcatctgtttccgtatcacctggccgacatagtggccaaagggctccggttgacgcccttcaactactacatagatatgctggtgttcttgttgaacaacgacaagaactacgattcgttgccaaacttcacggcggccgactgtctgcgggtggtcggaattgggcgcaacgagtacctaacgatttcgagtgatttgaagacgagttcaccgaagctgttcttcaagcgtaatccgtactatctgctgcccaagttcccgaggcggatcgtgatcgagccctggtggaaggtggaagtcggttacgtgctggagagtgatgtgcagtttttgaaccaggacgagttgtcagtgctcgatcgattgatcgattatggtgctcagacggctggggcgttggactacgaagtggttcacagtttgtatcgcaagggattgatctatctcgatgtgccaatcagcggagaggacaagattagcatacctccgctgcagaactttgtgatgaatcgagtcagtggcgattactttgagaacttgctgtacaatgtgttcgtcacggctgatgagcagtctacaatagctgacttatcaaacattctgcaagtcccactggacacggtcaaacaagctacatcgctattttgccgcctcaattttgcccgtcgcaaacaatccagcttcacaaacaacgtggaaccgcacgaaagctggagaaatgccaggcgtgaccaacagcagcagcaaactggccgcacgatcttcaactatcattccctgctcctcagccaagaatccgtggaaagtgaacaaagcgagcgtccagctgatctcactattggttcgctcgacagcccaagtcctgccgaagaaagtcccggcgactacagtaacctctcggatgccaaacccgaggagttccgttcgccggacgccaaacgagtcgggttcgtcttcgattccaccctcacggctttcctcatgatgggaaacttgtcgcctgggttaaaaactcacgccgtcactctcttcgaagtgggcaaactttgtgacgaaggaatgaacgactttctgcgcgaattggagaaagtctccattctggatgccgatggcgaaggcgaggtcagccgctacttccatcacgccataattctacgctcgacgattgtcgcactgaaaaccgtcctcaacacagagttggatctcctccgtctggaaagccttgaagccctcgatcagaagacccgaaaccgtctcctagagaagaagtacaaatttcttatcgctgccgcccctctctcaggggtcctctcctcaccgttcaccattccgttctttggccaattctaccggacgtccaccaattcacacatttggtccaagctgttctactaccacatgggcggctatggaccgccgagcctgctcctcaccaagggaaccgtcctgacccatctgccgcgattgtttctcggctacggaaaacttctcatcacaattgtccacacggaatcgttcgtgctgaattcggaaaagtttgcttcgctaaacgaacacctcaagaacgggtgcgtgcttatacagggctacggaatcaagcagccggccgagatgcactacgaagtgttcccattcgaagctggaaatcgtggttcggagtggttccgacactcagcggtgcggaaactggccaaggtgctggatttggagaatagcttcggctatatgacgttcatccggacaggagtgccggattatggctgcgacaattacgacgagaacgttcatctattcaaagaccatcccaaaagcagcaaggaacgaaagcattccgatacatcaaaaccagactgtccgaagcctaaggcgacccgctcggatacaatcagttcgatcacatccattgaaagtgacgacgccagtctgatcgaggacattcgccggatacgggacatctacgaagggaaggtagttccggagccggatcttcccgaagatgacgaaccagctgtccaggcgacacccgtcgtggattcccagcatttcaacccagaaccagcgcccagtccagatcacgatttgatgcaacagctggccgatgccagccggaatgttgattcggattcggattcgagggatcgattgggaggaaaccgaaaggaggagtggaccctactggatgtccatttcggcattccactgttcgacgtagactgcaataccagcatatgtcagcatgttattaaaaagctttgctcggaggacaagatcgcaaccatccgggaggtcaattctaaaatggagcattcctacctgaagtttatatcgcaatgtttgtactacgaggacgagagtatggaattggtcaaaccgggtaaactggttcccaagccgcgcataaatctggcgttcgaaaacggtaaaatcatcacctggaacggaaaatag

SEQ ID NO: 1066 - DNA, 204 bp, Aedes aegypti
caccactggaaattgtgcgacagcgtttctcctgcgaagacgaaaaaaggggcattagtcattactcagagcaatcgcaccacaagcaagcagaagataagctgtaaccacgtgatctcaatccatcctcaaggcagtttccctgttcgcatcgcctcatcgtttagtattcacaataatgtacatagcgaatcagcgtcggaa

SEQ ID NO: 1067 - DNA, 900 bp, Aedes aegypti
agcggagttgacattttctaccagagacaaacaaatcgatatttaaaaagttactacacaaggagcaagaaaagtctttaacgcaattttgtatttatttttaacttatatagtattaaaaattatatatagttacaaatttacaagttaacaatagtagcaaaagggcaaataatcctaaaaaacatgaacaacaaagcaaataatggttatccgtatgatgcggctcaacaaggcgcatatcagcaatatgtgaacagccaaattcccgcgcacgcacagctaccgccatcttacaactccgtggtaacgagcatgacaccggccggttatccaccgtatccgccggggattgttcaccagcagcagttctatccgaccagctggagcgtgaatccgtccgcaccgcaggccgccccgatgcagtacgctcctcaccatcttcccccgccgcccccgtatgccgctgccacccaacaggcagccgttgcggccattccggctcaatccgtacatccgacgatgtatcagtatccgattgcgaccgctccgcaaccacaaccaccacaagtgtatcatcaaacgccaatgtatcaggtccagggtgcaatgtatgacgcaggggcacggttcggcaagtccggtgggtcggcctcgattccccctccgccacctggaatcgcccccaacgcagcccagatagccgccatgcaaggccagcaggttgtgatgaccaaaaagaagaacaacttcctgcacggtggcaacggatccggttttacattctggtaagcaccgaactcttcggcgcaaacgtgtttcgttctgcgcgctgctcatagcggtcacccagaaaaccacttattatccagtgatgccgtagttttctagtatactgat

SEQ ID NO: 1068 - DNA, 1626 bp, Aedes aegypti
atgaatacgacgctggacgacagtggcagtacggaatggtccactctgcactgcagcaaagatgcactgaccgactttttcggttggttcctgcagggcatcctggccacgctggccttcacgtgtctaatcggtaaacgattctgcgaaccactttacaacagacgatcatgggaaacgtggtggtacgatacatcgaagcaaggtatcggcgccatggtgatccacatgaccaacgtctacctggccccgctattccagggggatccctgtacctggtatataattaactttctactggattccactatcggcctattcataatttatatcggcattaaaacctgtcagtatttggcgcggaagaaaaaatgggatgcgatcaactttggcgagtatggggctcccaaatcgtggctttaccagacctggatctacgttggactgatggcgatcgttaagctaataacgactctattcattcagctcgacatctgggacaacgtgaaaaactttgtcctgtcacccttcaaggatcctcgcatcgaactggccgtggtgatgttggtgattcctttcttcgttaatattctcatcttttgggtaaccgataatttcctaatgaggcacacacgaaaaaagcgcaatacaggtactgcacatcaccacggaagggaacatagcctgttgcaaaaagtaaaatacaaaatgatacaaaaaaccaaacctaatgactcagaatctgatactcttttatcaggcgatgaagaaattttaagttttaaggcgtccaacagcgccacgacatcgtcgtcgcttctgcaggggtccgcaagctgttcctcgacggcgctggtcgtggacgatacggcaatcattctcacctcttcggcgacatcacctagcagtaagcaaacaactgtccagcagcgaacgagtgtgatcaatatttaacgaaggttttgtttagttttgcttatttgcaacaatttttacctatatcgtatctgtataagtcatgtatagtctgaacaacgcatcatcccccagccgggacgacacgaaccactttttcattgttgaaacagagggaaatccaaggcaatagattagctatgatttttttttcttgttgaaactgagagtaaaaacatgtgatatttgtgtgtctatatctacatatatacatatttacatacatattcaaggctacgtaaaccattcaggaagcttagaaattggaattgacggatatcaaaatatccctctccataccacaatgttgttgaacttaattacattcaagaaggtattgaaggagcaacgataggcaaacagtgattggatattagcgcaagagattggtaactgatgtgaaactgagcccacttacttaggcaagtcgagcagatgattagaattgagaaactgtagacgaaacacggatattgtattttgtagggcaatgataggctaagtcaatcaacaataaactattgagtaaccagcgaaaaagtcgaactaggaaggattggttttattttttttatatatacacaaacagacatcaaaagattatatcaacggcaggagaaaaattgaaagaataaaaattaccatttgaat

SEQ ID NO: 1069 - DNA, 1285 bp, Aedes aegypti
ctcaagccaaggagaacaatattcattgttcggttcaatcgcttcattatcaaccttaatcacgtatcggagatctgtggccgtacctcgctaattgagtcagcaagtgaaactgcaggtagtgaccgatttcgattacacaatcaccaagcagaggctcgaaaacggggagaaaatcctgaccagcttcggaatgttcaacgagtgcaaatcgctgcccgagtacgtgctggaggaaaccaagaggctgttccataagtaccgaccgatcgaaatcgatccccacatgccgctggacgagaaggtggtctacatgatcgagtggtggtccaagacgggggatctgttgaaaggctttccactgccccaggaggaaatcgccgaagtggccaaacgattcaaggacggactccgcgacggcacccaccagatgttcttcgacctgaaccaactggaggtgccgtgtttggtgttttcggccggtttgggcgactcggtggtgtcggttctgcgacaagcgaacgtaatgtatcccaacgtgaaggtgatctccaatttcctgcagtacagttccgatggcacgctgaacgggctgcaggacaagatgatccacacattcaacaagaacgaaacggccctcaaaggcacggagtactacgatctggtgcacgatcgtgaccacgtgatcgtgatgggcgattcgttgggagatgccggcatggccgatggcattccctcttcgtcgtacgtactgaagattggatttctgttcgatcaccccgagcagaatctgccgcgttacatggagaccttcgacatcgtgctaatcgacgaccagactatggatgtgccgcgggcgattttagaaatgataaagaacaaatctcaccagtgaacgcgacgtgcttagatcttgtgtaaggaatttcaaattcacaatgacatttaactgtcgacttaattgttttattttccatccatttgtgatcgatgacgatcatttgatgttcgttttagaagagcctaccatgtacgagtctttttttatattgtaaattatgagctgaaatcagcacaaagcagcaagaagctaagcgaatagaattttctgctgttccgtaaatagtacttatttgagttaaatttggaacgactcaaaattctattttttgcatgtgtgtaccaacgtatgattatagttaaatcgacttatgaacgcgaactgtcgtaaattgctgttattaggggctttgtgatctgcacaaaatataaaaccttgttcgtg

SEQ ID NO: 1070 - DNA, 1119 bp, Aedes aegypti
atccagatgcgcttccagcaacgccaacagcaggagcgggaccagcgcaaagtggaaatgatttccaccacaaaaaccacggccgcagccacggccacaccggcaccggcgccaatggtgacctctcggctcggcgctggcaaggtacggcaaatgttcgacgagcggcgccatcgggtggccggaatcgacaagagctatcccctgcaaccgattcaacagcaaacgcagcagcagaccggcaggaccgctaccaataatggcggcagtaacgtttccaatggcaactcggcgaagacggcggcggcagggctgaacaacaagacacataccatttctttcgacgacgatctcactctgactccaacgcctgctgtccggaagctcccgaatgtgggcaaactcaacgtccagcagcagaacgtcaacagcctcaaactgaaaccggtcccgggaagaacccccacgacgccggcgtcgtccacagtcaaaactgccagcagtgcaacgaaacccgttaccaaaagggccactccgatggcaagttcttcatcggctcctgctgcaccggcacagtcatcgagtagcccatcgtccgctaaagtgaacgaacccgttccggacggtctggttcggtgcaccatctgtagccggaacttcgccgaagaccgaatcgagaaacatcgagagatttgccaaaagaccaagagcaagaaacgcaaggtctttgatacaacaaagcaccgagtgctgggaaccgacgccgaaaagtacgtgctccagaagaagaaggtcggcgctgcggccagtaagaagtccgtttccggaccgtcgactgctccaaaaggcgcggacaatcgccgcaagagtgactggcgccgaaagcacgaggagttcattcaagccatccgagcggccaaggaaatgcaagcccacctggcgaagggaggcaaactgtcggatttgccgccgccacccccctcggagaacccggactacgtgcagtgtccacattgctcgcgccgcttcaatcagaccgctgccgaacgacacattccgaagtgcgccaccatgctgcacaacaagccgaaaccgaccgcgaaagcgaagagattctaa

SEQ ID NO: 1071 - DNA, 231 bp, Aedes aegypti
atgaatgtgtacatcaaatcagtagtctatctagtagcgttcgggggcgccggttacgtcctttccgaactgaccaaacccagcaaggagaaaatcgatctactcaagcggcagcatcacggagggccagcggcatcagaggcggccagcaagaaggcgctgttcatgcagaagctgaaggaagccagcgaaagcagtgagcctatctacttgaagaagaaggctgattaa

SEQ ID NO: 1072 - DNA, 1587 bp, Aedes aegypti
atgatgaaattttgctgatagcccatttattcttaatttggccttcttgatagagagcaacgacgatgcaagtattttacttcaaagcattactcttagtgcagattttgcatgagattcgaggatcgaccaatacgccatatcgtatttatgaaatggtaccggaagggatctgtaagtctcggcggcttcccctgtttgataatttgcttacccaaacggatcctatacaattaaaaaaccctgagaggggcgttattttccggcaaacctggaattcatcatctttcaagaggtttggcgattgcaagttttacttgcaggcacctccaagtatgggtctatacctgaccgttagtattgcaaaactaagaaagaatagtcgtggccattgtattgatagtattgtggtcaagaaaagcaacgaaaaaaaatacgcattttgcgatgcaatggatgatgacgatgagctgaaagtgtatgccgatgatcatgggaaaatgcgagtgactgtaaacttggataccggtttggccttgccaactctggacgatacgctggaggtccagtttattgcaactgttaaacgggattgcaacagcctagaaggatattcaccatgcgaagatgatgaggatgattcctgtatttacaaagattttttcgaagatggatatgtaaactgtcctgagtgtactgatgagaaaggttgcttcaaagagtcagagcaagttcagattatgaatccttccaatgtttttctgagtgcaatcatatccctgttgggaactacgattgtattcgggggttgtctttggtgcctctatagataccgaaattgcattggcaattgcaatagcaacagtgcagatacagcacgcaataatcaaaatacgagaactgtggcagcggagcaaattcaagtagaactgcagtcttctggaaacgatattcagccttctgcgccacccgactacgacaaagacctgccacctacttatgaatctttgtttccggtaaacccatcgggtagaaccagcccctaaccagtcaagatagacaattgatttgctatacttgagtttgttgtttagattaacttgtattattggttttaaattaaatataattagtagatacaacgtgaatggggagatacactgtcgcacctgaaaataagggtaaactcatgccacgtctcgtaaaaaacgaatgaactgaacaacataatgtaattgattcgtaatcttttgcatttgatagtgtaacttttatactagttttaagtgctcgaacgtattcacatttagatctgtgtacacaagaaacaataataatacaatacggtgaatgtattacgaaatcttttaaacaatggccgtttaattaattttagttatttattattaaattctgtcatttcccccgagtcaagcccaaatatgtaggtagaattacgacaaacggagaacgttctagtgttttttattgtaacaaacagaaaacgtaaacgcataaccaattcacaaatgctattgaatgtacatattgaaactgtatgttggaatatatgcatttccaaatttt

SEQ ID NO: 1073 - DNA, 1513 bp, Aedes aegypti; identical to SEQ ID NO: 528

SEQ ID NO: 1074 - DNA, 555 bp, Aedes aegypti
atgctgaacagcaacagtaatgtcaatctcggtccactgccggaaggttgggaggaaggcattacggccaaaggcgaacggtactacatcaaccacgcgacgcggacgaccacctggagggatccccgattgtccaaccaggactgggcagcacaagagcaatcggtcagactgtacaacctgcagctagagcgggaacgcctccggaggcgacaacaggaaatccggtcacatataggggaagacccgttcctgtccgggctgacggatcactcgcgccaggagtccggtgacagcgggctgagcgaatcgtccacgtcccaatcgatgccacacacgcccgatttcctctccagcatagacgacagcatggacgggcttagcatggcagacaacacaatggacacaattgcatttggagataatttagaaacgcccgatgagttcatgcttgacgaccccttgctactggagaaaatcgatgccgtcagcaatctgaacctgattgatccttcgagtaccaagccggataacacgctgtacgatatcatttaa

SEQ ID NO: 1075 - DNA, 3267 bp, Aedes aegypti
tcaattttccacccgtaaacgacgctgactggaaaaaaaatgtgagaagaaaaactgcaagcttgtggatgctggttcgagacggcagagaagtgggagtgatttgggttaacgaagagcaccaaatggaatataaatgttcacacttgcaagatttaagtggaattaaatgtttttcatgcgaatatgtaacgttgtttcattttgttttgtttttggtttacataagaaaaataaatggctaattttattcacaatacaggattttagatctttatgcatgaactaaataattccagaaaaatcgtttccagatataaaatatgtttatactaaccaagtttaatgcgtaaaaatgcatcacaatgagttaatagaccgaatatggttttagaatggtatttaagccatctaatataatattttcttagcgtgtacatattgacaatgttcacatcgaatttccatagaattgacaatctgagaatttgcccttttgaattgtcacacgagaatacactgttaatttgacacagtgcacaggaatagcgcagccaactgttctaaaaatactttctcgttgatttgttgcagtgtacgcatttagtacaaaccgcccttttgtcttttgtcacatgaattttctgccatcccaggatgatgcagaatcaaaacaatccaaatccccccaggaagatgagcaatcctcgcggcgggcagcagagaactcggccgtatcaacagcaccattcgaggaagaattccggagcgccatcagcagtatcgggaggaggacgaatcgcggcgtcatcaagccaccatcgcagtacagttccaaacgtaatcgatcaggaaaaggcactgcgtaatcagattcacatggagatcgaaaagaagtcgaaagcctgttccaatcagtcctacgagtgtacgcttccgcgtctggagcagtacaattactgcaagcgtcatattctccaggatacccgcgccccttacaagcagtgcgcattcttttttgcgtcgaatggaaaacgttgcttggaaccggctccaaagtatgacaacaagaaggactacgggacgaattactgtttcgaacacagccggctgacgcagctgaccaaaaccaaatctaccatcgggaagtacacaccgctggaaacgaccgaaacactcctacacaatctctcccaccatgtcaaggtggacaaggcgaagcagcaaagtcaacaacagcaccagcatcagcttgccaattgctcgtcggcgctgaagatcacggtccacgatgacgaggaagagggcgacctggacgttgttaccccttcggtggatccgtttgtcgacatcgatgtgccgacgatcaacgattcggctcgcgttgtcctggactatgcttcggatagcagtactgatgaagacgccactctggtgggaaacacctggcgagggtacgatatggacaattcggacaatgagagcgtcgattcacagaacgaagatctgctgaaacatgccggaatctacacggccgaggaagccacaatgataacgaaagagaagttgatccggcttcagacgctgtacattgatcagtttcatcgtctgcagcacgttttgaaggagaaacgacggcgatatcttcacgaggtgcgtcgcgaacgggaacagtattgcagtatccacgatcaggtgaaggattccccaaaggagcgtaagctgtacgagaagttgaaagctttggatcattatcatcggaaatatgggatggatgctatcctgcaccggaaatatctggaaaagcgcgccaaagctaccgaagggctgcaccagaaagttccgcaacatccgaagtgtgcatttaccgagggaggcgtcaagtgtggcgagcgaactcttccatgctgcaaattctgccggaaacatatcctcgaggataagaaacaagtgttattcaaatcctgtggagtcgagaagagtggcgtcgtgtgtcaagagcctttggcaaacatctttgaggatgccacttgctacctacatgtagaacttcctgcccagaaaacatttaccaaaaagaaatatgaatccgagtcggaaggggaagaagacctgcagtcgcaggagatcaaaagagagccgctgtcggaaccaaagctcgaaaaacattccccttcgcagtcgtccagcaccaccgcgacagcagccgaaaccgaggatcaggaagtgtcctccgagcccccgctggtcgagcacaacattaccatcgctcacgacgtggaaccgccaagcctcgaggactcccttcccgtgagtgtaattgccaagccgatcccaatagaaaaacccaaccaaacggaggaacccgaaaaggaacagccggaagcgacgccccccgaaaaagacccagtgccggaggttgctccggtggtcgacgcccaggaaccgaaagccgatccagtcgagaagatggccgagtgagggaagaaacgaaatgaaaatgccacttccggttttggtctcaatttaattgatttttattgtatttctttcctttttcattgtaatagtttcattaaatatagtcgcgcgatagttcgaaacgatacattagaacgtaatcactttagaacggttcaaaaaattaaccggaattataaataataataaaaaaaaaactcacctcaatgttttttgtgtctctgcgatagttgctagagtgtaaatttggaataaaatgttttgctataagtcgatcacttgtgttttcttcttctttactactatactgcgtttaagttttgcttgcaggcgggggctgtttgtatttttgtatgcttttcgatggcttagatgtaatgattgatcgggaccagaaaggctgtaatgtgcaatagctgtgggaacgagcgaatagtgatagtcgatgtcaagggatcagcatagtcttttcggagattttttaacagatatgcttgacaatgtcttcttgtagcttcaataaatctcgcttaatttatgataacgcgcctcaagtcattggtatacgcgtgtgtacacggagaaatcagactacccaaaaaatatgttctttaaactcaaatttggggaaagagtatttagtttttacccacagttgggttgtttgaaaaagtcaaaattgaatagatttgtgggtccgcgtagcacgtcgtttcagagcaaatgaacgaatgaacatcgaaaccataactcaagcgtgtgctggaataagggcgtaagtcgcat

SEQ ID NO: 1076 - DNA, 1461 bp, Aedes aegypti
acatcaaatacaaaaaaccacctcttgaagaatcttcagtagaaaagaagagccctgataacgccatccgttcccaccacaaaccttgagcttgccagtttattcacatgtctgtgcacattcatcgcaaaacatcacacaattatctccctcgttattggaattatataggtcatccgttgactgcattcagtgattagtagtgctacttattggacgaagatttattagcttgaagaaaactttgaaaattactgatatagcgatgaatgtagtttcgcttttaggaattatttcctgtgttttcagtgtaacttccgctgtcccattttccggttggctcttaggcgggagacaaaatgaagaaactactgaagcacgacccaattttatgaacaaagtacaacagttgggcgaacgagtgtatgagaggaaacgtgagttcctaaacggtatcaatgaaaaggtgtcaaatatactgtggataccaccgttgtatacaactacggaaacttcgattcctccatcggaaccgccttacgtattccaaagtgatccccaaaaatacacagaaatggattcggacgaagatgatgtacagaacgttgaaatttacgccagaagcagctttctttctccggatgatctcgttaatatcgatgcaccacccgagccgcaaaacaaacctaccataacatataacattaacaaaaacttcaatatacttgggagaatctgggcttaggtaaaacacactaaattatgtatcttcctcctctgtagataatttttgctgaggattctccgaaaagtccacgcggtgtccatccttatccaccacaaccattgggggatgattgcatccgatcatttccgtatcgctcacactcatttgatcagccgctggagcattctcccggaaatccatttgcggtgctgcaatattcatagaacctcatttcagctccacactcttcttcagaatgattccaagttaacttcacctgaatcgatcaccgacgacacgatcagcaccacaaacagcaaaccgataacgaacttcatcgcctgtatgacgtcgtcgaatttaaaacttcaaacgcgctgaggtaagcaactacgcgacttcttcccaatcggacggaagcttgaatcgcactgtttgatttccagtcgaactcgcccctaccgaaggccaatcacggtttagtaaacagttgtcactctcatccatgctgcttccgatcgttatcaaagacagagcagagcgctcggctgcttaggaaatggctcattgtagggccgaacgaatggagcgacgaacgccgaacgacaaactatttcaacgccacttaggaatctcgttcagtggcgttgttggatgatttttcagcaatacaatacattccaacttgttgggtccgctattgtaatagggaattgtaaaaaaaagttgtgaaa

SEQ ID NO: 1077 - DNA, 408 bp, Aedes aegypti; identical to SEQ ID NO: 521

SEQ ID NO: 1078 - DNA, 219 bp, Aedes aegypti
gttaatagtgacgagttgagagaagaacccgaaccggcattggattaccccggcggcagttcgaacagtgacaagattctcgcggaagataacaaatctcctttctcatcattgaataattttgaacgcgcaacaaacggaggagaaccgtcagaggataataaacctagccgaagtattttaacgagagaagttgccccttttcctggtcccgtgtaa

SEQ ID NO: 1079 - DNA, 252 bp, Aedes aegypti
atcgatcgtctgttggccgaaaaccggatgcccatcatagtaggcggaaccaactactacatcgagagcgtcctctggcaggttctggtcggaagtggcatcccagctgatcaggcggaaaaagtgttgctaatgacaacggaacaaatggaacaactcgagtcgacgcttttgcacggcgtactgcgacgggtggatccagtcactgccgatcgtctgcatcccaacaacaagcgcaaaattgtcaggtga

SEQ ID NO: 1080 - DNA, 2203 bp, Aedes aegypti
acttctcctacctctttaacagcaaaatgcagaacaccgcagcagctttctggatctggcggaccctcaacaggaacaacataagcaacccctcctgactgcatccaccgaaaatattccgtttatcgatgtctgtgatactgatgctgtagacgatcaaaaaacaccgccagaaaaggaagccaatggcgataccaaccccaccgcaaattcattagcagtcccattcgatcgatccacggccctgcgaaagtcctgggaaggattcaaagatatcatgggctccgcccgaagaaccaaagaacttcaaaaggaaacggaaaagatccaactgtcagcggattctagtctcgacgaagtgatgaaggaaatcctccgacagaagcaaataaggacttctgcctgggtggataccaacaagggacgcggtcatcagattactttttcgatagagtctggccctcggtgcgacgatgtgatatatatgctgtgttcctggggcatcggtgaacggtacggttcaacgatttccatcgcttcgtgtacgctgttcaccgagcaactgcaggacgaggaagacgagaaacaggccaacaacaaatccagcgcctggaatagttttctcacctcagctcgggcacagctcaatgtggcatcgatcgtcgacaacgtcagaaatggggccgtaattacgtttgattatgtgaccatgttgataactgctgctattattgctgcattcggtctgatagaagatagtagcgtgaatctcattgccagtatgctggtgtcaccgttgatgggtccaatcctagcggcagtgttcggaactgtaatcaaagataggaatctgcaaatgctgggaattcgaaacgaaacaattgccatcggattagttttgttgagtggattcttcttcgggctgatcatcagcagtacggacgaaaagtggggtctgggtgagggcgtgacggcggaaatgctggcccgctgccagacccattcacttaaactgggcattgccatcgcgctgccatcgggggccgccgtagccgtggccattctcgccgaaaacggtggcggacttgtgggggtggccatttccgcttccctactgccaccttcggtcaatgctggtattctgtggtcactttcgttgctgagctcgatctacggaaaagcaccggaccgacgttatgccaccgtgacacaaacgaacctctactcggacacccaatcagtagagctattctgtctcggttgtatgagcttctgtcttactctggtgaacgtgtgctgtatctatatcatgggtatcttcattctttgggtcaaagaagtggctccgattattccgaaggatcagaaacaattctggaaccacgacatcaagattgcccgggattacaacaaaaccatgcacacaatggacggaatgacgatgaatcggcaattgcttcaggagctgtctcatttccgtccccacggcgaaaccgataagcagggctccgaacggtggcttaacactatcggtcgtgctggccagaatacctggtccccgaggcatcttcacaatacgcgtgaacatcgaccaacgatccaagagctagaggcactctacctcagtctgtctgctaacactagcgataactcgagtcactatcctcctcaccacacgactcatcaatttatgaaaatcccatcgtcatacctacgatcatcaaagccctggtctccacccaaattttcctccgccgaagcggagcctttgtcaccaggaggccattcgaatcgttcaaaacccatcgaaattgggttccgacgacaccatcggttttcggattcattccgagctagttcagcacccctgtcgaaaatcttggaaaatgtcgcttccgcagctcacggtggatcgggcgaggggccgtccaatcgacaaagtcaaaagcacaagaacaaattcatcgtcacccccgcagtcgatcccatccacaagtagtgctcaaatgcgaatcttaactggcaagactcgtcctcgcgttgtaaaaaaaatatctctgtatagtattttactctctgtttactgtttttgtattagttcatgaacatctgtttcgttaggtccaataagtttgaagcgaaaaaagagaaaataataaatgttttcaagctttcaaaataaagtacaagctagcgaaaccgg

SEQ ID NO: 1081 - DNA, 2463 bp, Aedes aegypti
atggaaaatcgacggttctttaatcaggaaggcaaggaagcgaagaacttttaccatctgtccgacgacggagaggaaagcggctgcagcagaagctacatgcggaagccaccggctcacttgaaaccacgttcgctgcagagtgcctcgcaaagcaaatcagctgcaaaatcgtccgctccaagagtgcgatccgcttcgacgggacgggacaaaaagtcggaacttcaagcccggtactgggcttttctgttcgggaatcttcagcgatctgtgaacgaaatctaccaaacggtcgagtgttacgaaaatttgccctcatgccaggaagcgattctcgtgctggaaaactacatccgagactttcgggcgttggccgaatggttcaaggtttcttgggattacgaagcgaccccattgcctcagcgtccacaatcgctggcttgggaggtacggaagagcaatccggttccacgcgtccgcaaacccatctccagtccgggcatatccggcaaatcgagtccaagcttctccggtaagaacagtccaagtcacgcagtggaagatctgaacaaatgttctccgaaaaagcacttcagttccacggagagcctcagcacgaagaaaggctgtgctggattgggaaagctgttggtcaaagatatgataaaacagtccgtaggggcaaacgagaatgcagtgctggacgaagcgcagaaaactctccaaacgacgggagagaatgaccaccatcagccgattggttgtagcaatatcgatgcttatgtacttaaactggatcagtacacgcagactaatttagatgacgaaaatctaacgttggctgaatacctggaaaagtattgcaagaaagaggaagatgttaaggaagttgtgaagcaggatgaagtcgttcaggaagagactaaaatcgttgaagcggcgcctcaggaagataagaaagttgctgaacctgttaaggttcttgaaaaggttctggaagctgcacctaaaaaggtcgcaccagttacgaagtatgcagctgtagtgaacaatgctgccaagcccttaatacggcaagctggtccagtcgttcagactaaaactgttctgccatcgagaacggttccttcgaagactgttcgaaccgtgctgaatgtccgcaagtctgcaaccttatctagtctcagtcagagtcaaacgaaaaccgtttcgctcccggctaaaagtgcaaccatttcaaacatccattccacaggttcgaaacctggtgctcgtcccgtagcaaatccagtgagaagcaaaaccattccaacgaatgtgtccactcgtctctcgacacgttccaaaacgatgatagaaatgaataaccgacggaacgacagtaaagtggcacctttcccatcaaagctgtcattttcgcgcaaaacctctagggaagacgtcgacagttccagttctactttgaaagccagcaccgatcgattgggttcaaggaattcagtcatagatgcttccaagtcccgtgttcagaatggacccgctacgagtagacgttccgaaccgaagagcctcccatctgacgccgccaacaatgacggatggtatacggtgaagacgaaacgacggtcaagtctccactgggcaactaggttcaatcaacctagcggatacgcaagccttcctacgctttctctgctggatgaaaacggcaatgccgaagagaatgagcctaaggaatctacggataatgttaacaagtcatcgaaagtagaaccgaaagttgttaaaccgagtattgcatcgaagactccgcctgactccaaaactaaagcgacttcaattgctaatgcaaagcccacgattcctcctactaaagccgtgaccactataccaccaaagcgacccacaacagcacccgcagtagcgaaaagggttgttccgaccaaccctccttcagcagctcagccaaagcaaccaacactaaatggtccaacgacaatgagccgacaaaaatccgatctcaccggtttgaagctaaaaaccttgcacaaggaatttctccgtaatgaaaaaatgaaatcaaaacctccggcagcaccgatcgtcaacggcgaaccagatgaactggccaagacagtcgaagaaactgtcccgatccccccggaggataccatgtcccagttgaacaaggtcgacatgaacatccaaacgaacctggtatcgtccaccatacaaaatctgtacgagaagtgtcttggatcgagtgacgatggcggtggagatggcactgcaatagtcgtcggtaaagcattgctgcgatcggaaattaacttgtccagttgcgacgagttggaggaacgggaggacatggaaagcgacgaggatcagcgtaaactgttggaggaacaggaaagccttgaagcgcaaattcgggaactacagaatacgggtgagtattaa

SEQ ID NO: 1082 - DNA, 4342 bp, Aedes aegypti
atgaatctcggtctatggggatgcttggtgccctgtggactgcaatactggtgcgagagtaaaagcgatacatgcattacggagatgggggcgacggcatcaactgattgtcccggtgccggaggtcccggcggaattccgggcctgaccggtgctatcacgactgcggctggtgctacgactacgactcctctcacagccggtggcattggtggctcaggtgctgggatgctgggagcgtacggacccgttggtggaccacccgttatcgtacgggagcggcggaagaaggtcaccgggtttgccacactgaagaagaaacttattcgacggagacgatcgtcgaaagcatgcgatcatggccgggtgctgcgggaattcgtgtccagctggagtccgatggaactgtcggcactgttggaagagtacgaatcgctggcagcactgaaggacctttcggttcaggctgagctggcacggccaccggcaaccacgttcaaacaggatctcgccagtttgtacgactacaaacattgcaccgactgtgatctagtgttccggggaaccgtcttcccggttcaccgtgcactactatccgcacgttgtccgtacttccgggacctgctagccggctgcccgggctacggtgcccgaatctgtttggaattacgctcctcgccggtggacgttccaatgttttcgtcgctgctaagatatctgtatacaggagatttatgtacacacgatccgaccatagatgtaagtctgctacgtagattaggagaagattttggcacaccgaatccgctagaaaatgacctgcgctacctgctcgaaaccggggactacgcagatgccgccatagtgttcacctccgagggtggcgactaccatcggcccgattctggcagctcggagtacggttttcgaccgaagctagaactaccttgccataaggcgatcctcagtgcacgatcaccattcttcaagaatatgatccagcgacggacccgtaacattaacgaagaacaccaacttcatggcacagaccgatcgttacatgttccgacacgcatcgtgctggatgaaaccgtaattccgaaacgttacgctcgtgttctactgcacgcgatctacctggacaccgtggatctatcgttgatcttacgcggaaatggatgcggcaacggagcaggaagtctcggagaggtgcaagctcttacccacacagggagaaccaggccgtcacctttggaagaagccatggagctgtatcaaatcggacgcttcctcgaactggacattctggcacaaggctgtgaagatctgatccttgaatggctaactttggatacgctagctacggttttacgatggggtgggcaaccacacgggtctgcctgggtttatcgccaagcttgccactacttgcgcgaagagttctcggctattgtcggatctccggtgctcttccagcttgataaatctcagctgatagaagcacttcaaaacaacttccttcaggcatcagagctggaggtgctgcaggctgttttgaagtggggcgagcaggagctgatccgacggatggaagatcgggagccaaatttgcttagtcacactgcacactcggttacccggaagggaatcaaaaagcgtgatttgagcgacgtagagttgagggaaattctatcggagttactgccgcatgttcgaatggaccacgtactgccaccgagcaacgagatattgaaccaagcaatccgacggggtttggttagcactccaccatcgcacatgatcggagacgatcgtgagagtctgaggatcaatgcgtggattcgcggtggaaagaaccatggtttgtttgtacgacctcggctgttcatgccgtactatgaggaggttaaggtgctgcttgaggatcacattgcgtcgcaacagatcgaaatgttgcgcatgcgacgatcgcgccacatgccggacattccggacacgttgtacatggtgtctcgacttaatagtaacactagtgggaacatgggtggcggaggcacgtcaggtgtggatgttgttgcggcagcggccgcttcgattccagcaccagatccaagcgccatggaagctatgcaaaagagggaacaaaagcttaggcaagcacctagctgtcaacgagcgttgacgcttccgctgtcaagccggaacgaaatcaatcgtcagatcaggttgcgggttgttcgggaattcaattttccggatgaggtggcagagttgttggagaactccaattgctactgcctggacgcagatggctccacaccgaaagctcagggcgacgatatccatgcgagcaatcattcattggacgatgacacaactccgcccccttcgccggcactgccaagtgatattattccacaaaacgttgcctgctttgggcgcaacatgacattcccccggcaacaacctcaaccaccaccacaagtgatcgcgcatggggctggaggaggaggaggagatatgggaggtggagttggaggacgactacatcatccctcgggtggtatgttaggaccgagttcaagtattataggtacccatcgacgccaagaactgccatcgttgatccccggaggggatgtagttgcttataggctgtcagcaccggccggagatcattccggggaggccggagcctgttcggagggacatctttcggatataatgccggacgtggccatggcgacggcatctatgggacagttgcaacttggagacatgcccgagagtcttcatctagatctgggcgatggaccaagtcacatgatcggagcagcaggatctctaggattacataatcttccgcatcatcgaatagcgacaccttcgccgagcaatttccatcactacatgacccggagccatcctccgtccggttcactgagtagtagtggtgtcggtggcggccacggggaaggcgcagcggaacgtggcatgatgggtggtggaaggctacccagttccctcggtggatcctcccagtcgggtcagccgggagtatcagctgcttcggcggcagcagccgggtcttcgtcgtcatactcgcagcgttccaactcaccgtacaccttacaccgagcgagtccgggcctgccgcatagctcatatcacaccggcccccgattatagagacggctgcaagtatttcccgacaaacgtcagctgttcagtatgcctttctgaaaggaacacactgaggagaatgaggagcggatgtgtgtgcgtgagactgtctgtaagggtgtgtgacggagaggaatggagtgcgacccggggcgtagaggtttagttaaacgaattaactaaattaaaacacaagtagcagaaaaaagaagcaaaaacaaatacaaactactacacagtaaaaaaggaaggtaattaattgcaacaaatacatagatatttgaattaagagttaagtatttcattaataaactcaagaagaagaacaacactacaatggcaaggatataaaagtaataatagtactaaaataaacacaaaacaaagcagtaagaataataatcgaagacttttatatttaacaaactacaaaacaaacataggagcaaacccacagaatacaagtcgacggtgtaaacgagaagcgaattgatagcaaagaggaatgaggcataaaacacacaaacaccaggagagcgacgaaccgcggtttgtgtggaggtagcagtagtgtgtaatcgagtttttgagttcgcttcttcggcgtacgaagcgaagcgagataaagcaatcgttcacacatacgaatgaatgaccaagcgatcgcgtgcgtaaatcaacccgaatatatgaacacacacacacaaacaatcgtacggatttttccttggtttagaaactaggccgtgcctttaatttattctcttttacattttttagcaaactttagcgccccttcctttcggatccctcaaactctcgagggacagtatgataatcagatgtgttttttaatatgagatgaagttttaacgctatttatttatctttttttcgcgatctgttttttttttacactaggttatgtaggacattttttctcaattgggaaacaaggcaaaccaataaaacaaatgttattacgattgtgtttagatttgcccttggtttccgcgttatacggcaacggtagaagtagtaaaggaaattcgagtgaatgagtgagaatgcgagataaatgaagcaaaaaacaatttcatgttttcgaataatcgtaacatcaagaagaagcaaacaaaaatgcatcgttcgtgtatgt

SEQ ID NO: 1083 - DNA, 2772 bp, Aedes aegypti
atgttgcttgggaaaccgcaaatcccggcgtctgtcatcagcagcgttggcgcggttaactaccagcaatcggcggctgcggtccggcagctgtacgttgtggcaccgactggctatgggtccggaggcggtatcggtactgccttcaacgccaccagcagcaacgacaatgtgaagggtcaccccctgccctacagcaacagcagtgctagcgaaagtgccaatcataatcaccagcaacaacatctccagttccatcaacccgggagtggtagcaccagcaacggtagccataagatgataacacaaaccagcaccggaagctcctcggcggtggttcacagttccgcagcatcgacgacgacagctgcgctatcggtggcaacagccgcggccaacaacagcaacggaagtacaaatcaaccccgccagcatccgaagaagcgcaagttctacctggccgacctcgaggagatggaatcccaccggggcagtgcaggttcctccgggccgccattgcaacccgtcgacacaggaggaacatcgctgctaaacgggagcaatactagtaacagtactgtaaatagtagtagtagtaacaatcttagtctagaaagcgatcaacatccggtaggcacgagcgaggttttctcagcagcatcgggccacaccgaacttccaaatagtaggccaccgtcgggctcttcggcatctccctcggtggcctacagcagttgtagcggcaacggtaacaatctaggtgcaataataaccgttacttcgatggcacagctgcaacagcagcagcatcattcgcaatcgatagcgatgaacgaacgtgtcagctgtagtagtcccagtagtagcaacaacagaaataacaacaacggtactatagaaggagctaggcttcattcacagcagggctacgatgccatgcaacaacagcagaggcaaacggtgatgtctgcggattcggcgaggtcacaacagcagcaacagcctatgaggatacagcaaactgccgatgggtactacggcaataagaaaatctataccagttcttttggagatccacgcaatagttcatcaggaatttctacagaagtttcatcagaggcatttgttatagcgatactttcagaactctcacctatcaacagctataagcctgctgccacgcctccgtcttcgatgccgcagtccattcagcttcagcagctgcagcagcaacagaataccgtggggtcaccctcttctgtccatcaacagcagcagcagcagcagcatggtccaccctccagcaataccccaccggacacgggatcgcatcacatgagcagtacaccgccagttgccggtttgatctcaagcaacgctactacctcgtcctccggaggacctccacccccgccacccacgtcgtcctcgtccactgcccagtcgagttccggcggggcggctgcaccatcgagtttgatcgatctgaacgactgggccaccaactatcgggtgctggccaggcggaaagactactacgagtccggagtgatacgagccacaccgtcgcccagcacggtcgtggtcctattcgactacccggagggcagccagcagaagtacgaagatgtgtttggcgctggtcgctacgacatcatcgacgatgcctgtccttccgcttcggatgtgggccccggcagcagagtgtgcgtacggcttcaaaccgtccccgcatatccaaccgggaacgtttacgtcgaggctgtggttaaggaaatgcataatagtactaagaagttttcggttcagatcaccggagccggcggcgggacgcaggagctcttggttaaaagggtagacattcgattgttaaaaccgccttggtgggatgagctggaagagatggtggaagcagtggagggcgcacggaatcgatcacaacctacgccggttagtagctccggtccagtgagctacccaaatgcggacatgcctcaagttccgtcgaatgccatcgtgtacagtcaaagttcagttcccccggtcagtgcaacgggtgccccgtacaaagccatcagcattacgcaaggacgtgcaaataatcactatcaagcccatcacctctcccagcagcagcagcagcagcagcagcaaagcgggaacgaactggtggcgcctggtggcccgaatacagtattaacggctggcagtccagacgatttgcatagtgcaaatcgcaacttctacgactacgatagcgacgacgaactgcgacgaggagaaatcaactttccgatggatggtgaaaacgaaaaatactcaggcagtagcaagagaagcagcatgcaaagtcgtggtagtacgtctagcttactggaccagcgaagtactcccagatctcaaccagcaactccaagatctcaagcggcgacgccgcatcgcttcaagaagggcgacgtggtgtccaccccaaacggcatacggaaaaagttcaacggcaaacagtggcgacggctgtgctcgaacgagtcctgctcgaaagaatctcaacggcgcggatactgctcgcggcatctcagccagaaaggtaacgccctgcgctcgtccgccggttccacggccaaccatttcgctagcagtcgatctagcagcaaaacgcaactggacgaggacacttctcgagattcggaaacgtcaccaaactaccgggtaaccggccggttcgatgagacggaaacggacgttgccaatatgttgggtaagtggaaataa

SEQ ID NO: 1084 - DNA, 975 bp, Aedes aegypti
tcctggtcaccgagtggaacatttggcgactcatagagacggatctcgagcgacaactgacaactaacacataaaacaggcgttcgagggtgatttagagattagtagatctagagttcttaggaataagagcaacgggaagtgagggataatcaagacggtatctcaaccggcaaaagcaatgtattccgaaacaatctcggaattggacacgatagccaatgtgatcggtctgcggggagtaggaacgagtacattaacaaagtttgtcgatatgtggtatcacgtcttcctgtgggctttgttttcgtcgattgttatccataccggtgcggcggtaattgcgtttgtcacgctacgcaagcacaaatttggtcgattcttctcaatttttatcctagtaatgggtgttgtttctccggttaccggaggcaccgtcagtagtgccaccattgcctttgtacatagagcctcgaatttaccaatgtcgccaatcctggcgatggtatacggcgttggacagactatactgtctgcttgtctcgggttcacgcggctactggcaacactgtaaatgctattggcatatcctgcatatggtctgctgccagagcagacaacatcccactcaaatacaaatacatccatacatgtaaattaaacacatctaaattattgtactagtggaaattctaaatagatcaaaaacgttagccattttacgatagtccagtttttatcaaaatgcgcaagagaagaaggaaaaaaacgaatgaaatgcatccttagggacaaccatacaagggccatacaacttgacacgacacaagataaggttgatacctattcgaataaaaaaaacgattgttttaaaacaatgataaaaacgtcagctaatgtgttgtaacgagcaaaaagagaagacgacaaagcgaagactaaaacagaaatgagccactagcagtaaacggatgc

SEQ ID NO: 1085 - DNA, 1470 bp, Aedes aegypti
attgacgcagttggtgttgttcgatagattaatttaaaagtttatcaaatttcttgaagaaaaataaggaattaatttctcaaaatgcctttaactgcggagcaggcaatgctccaagtgcaggagcgtctgcgttccctcaaatctttgatagtggaaatcgatgctgaacgcaaaaggaacgaacccaacatcgtcaacacgatccgattggccaagatgtccagcgacgagaaatctgcggcagtaaaccacaaattgaaagctctgtacaaaaccggtatccaggatgcgattcaagaggagaatttgatccgccaagctctggccaagattcaggatatccggaacatacggaacgaacgaagaatccaggcaaggaatgccgggaacaaggaaaccattcgacgaggagccctgatgaaaatgttgcaaatatcggcccaaactctgccgctgtttgtgagcaagcctggagagaagattcctcccttgtgtggaagcattccggccgacaatagttacgtggctaaaccgggggacatggtggccgctttggtgaaaggtttggaagacgaagagaattggattctggccgaggtggtccattatatttcttcggccaacaagtacgaagtggacgacatcgacgaggagcagaaggatcggcacatcttgagcaaacgccggattgttccgttgccgttgatgagagccaacccggaaacggacggtcaagcactgtttccgaaaggaacaaccgttatggcgctgtacccgcagaccacttgcttctacaaggcggtcatcaatcaactgccccagacggccaacgaggagtacgaagtgctgttcgaggatccgacctatgccgatggttattctccgcctctgtacgtggcccagcggtacgtcattgcgatcaaacagaacaagaaggtcggtgccagttcctgacagtctcagcagacagccaccactacttctgctgcaacgaattcttctggatccacggttgggtcatcgaccagttccgcactggcaggggcctccaccaataataatgccatctcaacggggggaaacttcccgttaacatccggtagttttatgcaatccaaggaagacaacttgatggacgtgttcatgatggatgatcagttttaatagcaaccagataatcagataatgcacataattttaaagcggtattgattacattgcatgccatgcacttacctctcaactatatatcctttacaaatcgactgccgattaaatacaactagatcaccgtttattacatcaaagcattttaacccccaagacacgattgtcttcataacgcgttatacacttatctcaatcacctcgaatgatgtggtcggaatcaggcgctgctacgaggtgatagaaataagggaaaatatagcgttaggtacctaatggtcaaataaactacataatcgt

SEQ ID NO: 1086 - DNA, 618 bp, Aedes aegypti
atgaaaatacgatcctacctacgatatatgataccagcattgccgctcgtgccttctgaagtcatctctggagcacagtattcttctgaaggtaaaaagcatagtatatgccttgccggagtgtcgtcaggtactgccgcccctgataaaatctttccaacacccacagcaaaatcggttttgctaacgacgtccaaatccatcatcaaccagtgccgccaaaagatgcaggaaacaacgttatcgacgactcttcagtatcgaatggttcaacggtctgttattggcaatcccaatatttataacggcaaacgggcgaacaattcatcctcggtgggaaccctactcggaagcgctcacgactcgaacgcggaggagcactcttgccagccagagctgagtcaaagtctgagtctcttttccgatgtgaatctgtgtgtgcaagagtatcgcaaaaaaggacggtctttttctcggtcggtcggtcgaacggtcaaatccggatttgctgccgtgaaaatccggcctggtcgtatcccgcaacggttacggtcatttcggggtcgggatctgtgttcaggagtgttgaatattgctaagcgctacggtagacggtga

SEQ ID NO: 1087 - DNA, 4615 bp, Aedes aegypti
gccgctaatgttgcactttgtttgctttttgaagagatatcgagaataatgacttttcaatatatgatgatttattgatttgagttaagctgcataccattgtctaatcgggagtgcattttacaataatcaaatggataaaagtttatctaatcatgtttggtttcctatcatcaattttgtttgtttgagcagctgctatcaaatcaagatttgaaatacatatgtagttcaatccaaaatcacggtggtccaaactataacttagatcattctgaggtgcgaggagtagaattagggttccgtctcgagttcgaagacgacacatccgaccaggagaagcagtttttcatgcgagcctttccgaatgtgaacaaaatcgcggaacgcaaggtgcattgcacgtcgtgctacatgcacatcggaacggccccaatcacggaagccataatccgtatgcatccggtgctgcgggtctcgcactgccgcaactgccacaccttctacaacagtggcgagttcgataagggcgaagatggcagcgaactgtactgccgctggtgcggacagggcggcgaagtgtactgctgctccaagtgtccatacgtgttctgcaagaaatgtatcgtgcagaacttgtcccgtgcctgcgtgcaggacatttcacgcaacgacaactggcagtgcttcagctgtgcaccgaaaatcatgtggcatttgcgggcccagcactgggcgttggtcaactacatcgagaagcagaagaaagacatgaaagacaagaacctctcggtgcaaactatcaataacttgatgaagcaagacaacaccacgtgttgcagtggtaaaggtcaaaacaagaagactactactccgattgcgcccaaaaaagccgccaaacggccatccgatgctactgatttctcaccgggtgctgccaaaataccggataacaagcgggccactcctcgtccgataatgccggtacatcaagctgcggccactccaccatctgcgaagaaagccaagactgataacaacgaagttgtatgcactccggacatcatgagcatgtttatgagtccggaggaacccccaccattggtggccgcaaggacgctaccaccggcaccaaagccgacgccaccaaaaccaactccacctcatccagttatgaatactacagtcccaggtcgccaagtggttgttcggccagccatacctgctaatcaggctcccgttacaatgcgaatgccaactatggccaaccccgcaaacaccgctccaccgccagtatatcataccatcaatggctacaggatcgaccttcacacggctgctcaacagggtacctatcggctgcccaacggcaaattgatccaggtccgtaaacaagctccatcagctcctccaacaccgaccgcgattcctgctgccagaaacattgctccgaaacccaacacatactacaacccagttagcgttgctcaggccgccccagttcgcatgaccaatggtggcaccaacatgcacatcaatatcgctcttcaacagcaacagcaactccaagagcaacgtttgcagcagcaacgccaacagcaacaacaacagcagcaacagcaacagatgattcaacagcaacgccaacaacagctgttgatgcagcaagctcaatcgggtcaaccgcaaccgactatcgttgctggacaaatcaatcctgcccttcagctgccaacgttggctttgctgcagaacatggtcaacggaccgcacgaagattcgccactcggcaagtctcgcaagaactttgaaggcaagttgctgtcgggtgtagaaatttgtcagcacattgtcaacaagatcaacactctgaccaactcgaactcgttcaagaacatccgcaacgtgcgggatctcaaagagttgtacattcacgtgtcctacctgctaacgtatgccatcgggcggttcaagactctgcaggagaagtgcgttgacgatgtgaagaagatgggcttcaccaaggagtcggactttgtcatgatgggcgaacagattagcaatcggaatccgggcgaggacaagagcgacgacgaggatgactgtgagatcatcgagcagagcacaacgctcattgagctggattccgaagatgaggacgacggtggcaagaagaagaaagacgaacaggccaacaagagcgcacagtgtccgatggaaacggaagctgctgtggcggctattttgcaggagaaggatgatgctaatacatcctccgaacccatctcggtagacagcgatgagcggatcgttccagcggaaaatgaatatccaaacaaagacgattcggcagcggcggcggatcaacccgaaccagagattgtgtcctcggaagataccagcggcgcaaaggaggttatttccgtggattcgaccgaaacgatcgccgaaaaggctaacgttgacagtaataagagcgacgatgatctggtcgaaattgtcgatggagatgacaaggttgaatcgcatggggaagcttcagctaaacccgatgaagctgcagccgcttcgagagacggtgaagatgcaaacaaagatgtggtggaaatcagcgaatccactgatgctgcgcaagcacaaaataaggaaaatgatactacagataaggagagtgaagccgctgttgcagtatctgaaggagatagagaagaagacaaacaagaaaccaccgatgctactgatcatggcgaatctgagcaagaaaaaacagaagacgttgcagaagcctctgcagacaaagaggaggatgttgcaatcgtttcagatcaagaaaagcaagaatctccggaagccgaggtttcagatgagaacaaatccaacgaagagcaagatacggagatggaatctgctgaggtcgagaagacgccggaggttgaatgcgttgaaaccagtaaagagggtgaaaacgagaacaaagaaaacgaactgcctaaggaagaagattcgaatacagcgcaaggcgatgaagcagtagtggaaaaggaagctgaggaaaacgatgtagtggtgatggaaaaggaaggcgatgaaaaggatgaaaacgatgctggtgagcaagcggaacattcagaggcaatggaggtagacgcacaacctgaacctgaagataaaattgagagcaattgcgtagcagacgcagagccgaaaccaagtgaatcagaagatacgccagcgtcaaccgaaatcgctgaggaaaatttgcagattgagtctactgctgaacaatccccagaagatgagtctattcctgaacaatcccctgacgaccagagtgaagtcgaggcccctgaagtcgctacccatgaaccggaacctgcaatcgctgagagtcatgttgaagcatcaaatgatgatcctctagctgagcagcccgactccgaatcccaaacaccacaaattgttgcagtagaatccttagtagattttgaggctgagcaacccactgtcgagacgcctcccgctgaagaaacattagtggaagaatcctcttgcaataaaccttctgccatcgaggctccagtggaaccaacttcggatgcggccacagatgccgttgagactcccgttgaagaaatgcttgatgccccaacgggcaatgaacttcttgcacagatcgaagactccttcctgaaactccaggaaatgattgaatccactgaagaagcgaccgaagaagcgtctgcgaatcaacctacggcggtggatcaaatgacggaagcagcggttgaagcaccatctgcccaagagactgagaatgagcagatggaagtggatgaagaagaatcttcagaaccagcagcaacttcggctatggctacgcctgaagaagagtcgctgggagcaacttccgaaggagccggtagctcagcggcagaagacaaagtggagcaacaacttttggcggattgcaacggagtgctagaggaaaatggcacaagtaatttcaacgggatcgatggcgagctggaggagatggcagatgtgcttggtgatgagatgctggagatcagcaaaatggcgacagcagccgaggtcgagaatattaactctccagagatgattagtggtgattattaggtgacataaaccaagttgtacaaaatccttttgcgcgtagatgataaataagtaacgagacgtaatgactgtctcttagttttatataaatttggactagctcagtaagtagtgtaacactactttacaatgatatctttaataccttataaacgaacatttaacaaaaattcaacaactattgaaatcaaattatcggtttagatcgtaaggcataatcgcttttttaatttaacgttatttgcctttagggtacatttttgaatatctgtccgtagctatcagtatctaagcatactttgctttagagcattttttatttgatcagctagaattatagtaatgattatggtattcgatcaacttagagcacattatagtaatttatgtctgaaggactcacattgaaatgaactatgtagtcactaaggtaaacctacacagcagaataaagtacattaaacgtcgtatgaatgtc

SEQ ID NO: 1088 - DNA, 2248 bp, Aedes aegypti
caaactcactgccaacgtttgtacacgaacgatgattgtcgcgacgataacgcctatcagtgctgattggtaatgggtttcgataagtgagagcaaggttgcaaaagtgtagcaaaaattttcccacatgattcctatcacagcgaaaatctaatcaaaaatcatttctcccgttcgttttgtttcagcttcctgaaaaatgcctccaccgccaccgccgccggggccacctccgccaccgggtccaccgcccccgccggcgatgaaacttggtggcggacaatcctcgggcgatggacggaacgcgctgctgcagtcgatccagaagggaaccaagctgaaaaagacggtcacggtggacaagagtggacccctgattcagggcaaggtcagcggaggaggtgttggagcgggagccaatagcaatagtattagtaggggaccagcgtccgcggcgtcgggcacaagtgatagcaatggaggtcaaaagttaggaggaatattcgaaggtcttgcgtcgatgccgaagctgaaaccggttggcagccgaggaacgacaacagcacaatcatcaactatcagcaataagtcaccatcgccggagaatacgatcaagggcaacaaccggataggtggcggaggcggaggaggagggggtaacggtggggccgtggactttgctgacgaactggcggccaaactgacgctcaagaagcaaaagaaccttagcaatagtagtaccaacaacaacaatgccatcgtgccggtgacggagagcaatctacggacgaaccgaggacccccaccgcaacccccgtcgagctattccagtcaaaagagtattctcatcacacaaaaaccatttctcttccccctttctctgtatctctatttatgtacacttcctcttcgggttgttcattcatcactactcatccaccaaacttcatcttcaaccgattcggatactgtactgtgtgtgcgtgtgaacctccgatcggttcggattccgggggtaagtagccaggcaccctcgacgccaagcccgtcgccctcgaatgggcccacctcagcagcagtcactagtcccctcggaagcctcagtgtgctaccgaacaaatcgaccctgtttggcggcagtggtagcagtaatagcaacagcaacagtttgaccggaagtccccaaccgccagcagtgcctcagacgcaaccgagccccaagccggtgccgaaccatggaaaaccaaatctggccccgaaaccgccgggcatgcagctcaatacgagcgtggccagcaacaacaatggcagcggtcgcgtcgcccgacatcacagtatgaggagtcccaggtcaccgcctgtggcaccgagtggtcccaactttggagtgaatcatttcggaacgctacgaggtcccccatcgagctttacatcatcggagtcgttagctaggccaaacaatccaataggacgacctgcggcgccgcctccgaagccaccagccatgaaaccaccacccccgcctcccatacgcagcgtttccaacaccaacctgtcgcatttacccatgagtttggcaccggaaacgacggaaccgaacttcggttccgccaacaacgtggccagtgccgtcgcggacgagctcaagtcgaagctagtcaacagcggttcggcaaacaatgtcgcaacgctcaccaacaccacatcttccaattcgatcgtatcgaacagccagcttagcatcggcagcacgaaaaccctcagcagtggcagtattaaatcgacggcacccccacttcctccccatcggacgtcacctaacatgacgaacatttgccattttggttctctttcgcctccagcagcaactcaacaccagcatattggtgaagcaccgccgcagcctcctcagcgaatttcctccatccggcagcagcaactatcggcactacaacagcagcagccacagtctctctccagcgccaacaccagccctagcagtatcattagcgatagtcagcaaagctcaaatctgaaacgaaaggagaccatagctgctgctgccccggaacgacgaaagatgcccccgccgctgagggagatcgacctggaggccaactactcgttctacttccgcaaggtgaccgagtttcccgcaccgcaaccctttctcaatgtggccaaagtctacccgagcatgatacggcaacagcagcagcaacagcagcaccaacagcaacaccactaa

SEQ ID NO: 1089 - DNA, 3226 bp, Aedes aegypti
aggcggtcgatttccgaaccgctgacactgcgaagtcttccgttccgtcgctctgccatcagtctagtgagtcgattactggagtaagcatctggcgcgacgttgttttatcggcatagtcgttgttttccccgtaccaaagaaaaaaggtgtcaaaaaatagtgaaattgattgctgttttgatttcacttcagtgtgcacagacctgtgcaggcgtgtcaaaacgttgtcgtttagtgtcgcactccgcaggttgcttcgattgatcgaattagcatcttccgtcgtgcgaaaagtgtgaaaattagcatttggagtgaactgctccgggttttttgctcacggaacgaatgaatggacggatgcatggcgtgttgacttgaactgatacctacctacctggccacataatttcgattctacatgcgtagtcggtatcggtccggtccggtcgacgtcgggtgtgccgtcaggattttcgtaaaccagcggtttttagtggtctggtttgatgatgtataagtgaacaacgagaggaaagaagcggatgactattattgcatcgtcttcgtaaagcactgtgtgctgcgctgagctgaaacgaaccacccgcagcatcccctattgtcgccgtcggcgtcgtttgccgttttcatcgcaatcatcactacatcatcaatatggatcgagcagtggaaacatcaggagtgcgtttcaagtttctatcggtggtgttttagaaaatagtgcttccctataacgaatggatctatggtgctggcaaaaataaaataaaaatagttgatccaatcagttcatattcgcgaataagaaagtgattgtgaaatcttcgatactgcatcctgtttcgagcaacgaatagaaagtgaaaaattcgcaactcatcacgctgtaaatacaacacatgcctatttgcccctggtgaaacattagagtgaaagcaagaaaaagaggatattgcgctcttgctggtgcatggggttacaggaaaaaaaaagaccaaagtaacagtgcaggagaatccggaaaattgatgtgcgaaatcctaagccgcctccgctagagtcgccgagtgcgcccttctcgtagaaagcagcatggatgaaccgatccacgacccagatgatggaacagcctcagcgaacgacagtgaacaatttctcagagcatcgtcgccaacttttctactgccggtcaccaccgccaactctgccggcagaaacagccccccttcagcaggatcgctggggtctatcgcgccaacgaaagcgaaagcgcactccatctgtgacctagatttgcactcgccggtgatcggcccctatcaccaccatctgctggtaaaacaccaccaccaacaccattaccaccacctgcagcttagcggctctgtcaaaaacggcagcattagtaaatctcccaccgtcaccaaagccagtatcgaaatgcgggacaactactgcttctaccggttgcagcggttcgtatcgcgcaatccagtgctcaactacctgctgccgctgtgtgcgatagcggtgctagtgtttgtgatctatgccttccgggactatgccaaaaccatgctttactggatcgagacgcaaaactcgtggatcatcttctgcatcttcctgtgtttgttcacgatcgtcagctttccggtaacggttggctacctggtgctgatcatcaccagcggctatctgttcggcttcatcaagggcctgctgacggtggtcatcggcgctaacctgggggtggccatcgcgcacaacaccatcaaggggatgcagtcgaagctgccgttgcataagttgataaaaaatgagactggccgtgccatcctgcgggtgatatcaggaccacgagcatttaaaatagtattattcgcgagactgacacccattccgttcggactgcagaacaccatcttcgggatcagcgctgtgaattctcgcagttaccacaccggtacggtgataggtctgctaccggcacaaacaatcaacgtctatctgggatccaagctgcgctcgatccacgaagtgctgaatgatcacaacgctgcccttggactcgctggctacggagtgtttgttgtagaggttgtggttggtgcagctttaatggtatgggtcatacagaaggcccggacggaactatcagcggctttgctgtccgatatggactcagacgagaagatcctgatcgaagtggaagcgtaggatcgaaaagattttcgtcaaagtcgaaagtctggctacatcagcattcgttgtgagaataataggtatttattcgttaaccatttgtatagaaagtagattaagtatagggaacgaaaaaaaaaaaaacaaagaacgaatcaagtcgtatattttaagaatgttttgatggttagatgtatccaaaaacttgagagaactattttaggaaagaaaacggtttaaagatggtgttttgttcctatgaaacaaacaagctgagagaatggtaaatcagcagtagaatcttttaattaatatcaatcaattgatccactgtctattgttatgttataacctgaaaaccgtccataaatcaagaattactccgaatctactacagtcaaaccagaatgaatcgaaaaaaaggtaatctttgcgtagggtcatgcagaaaaacagtcttcagtcccggcagctaacacatgaggtcatataactttaacttaactgatttcttccagcaggaacgttcacttaaggcgtgttgaaggtgtgccctggcgttatcgaaaccacacaaagtgaaataattgcgagtaattgcgataagttgtgtacttatggtattgcatatacttgttcaatgcattatgtatggttttgaagactctcggtctatacataagggagcgtcgttacatcatgtcaagaacgttgcttaaatacatcaaaagttgacacgcttcacgctatgtctgaaccagacgattatgaatatcgaatgtacatcaggttttttcacgctagagagcagcatttggactatatttttatattcggaaagttttagaatattctatcggtgaatttttttccatacattttgtttgtgctgaaatacgttgataaatgggattttcatgagttgtagtatgaaaaatagctaaaaagtagaaaaaatcaaaatttcactgatagaatatttttaaacattccg

SEQ ID NO: 1090 - DNA, 2752 bp, Aedes aegypti
cagctggacgcgattcggcggcagttggaccacctgctggaatgcctaccaggaccgagaactccggagcagttgatcagattcgacgacgatcagcgtacgctggattgggaaaagtacgcttcagaacaatacccggattttctggaagagttgatcgcgagatttgatcgggagttccccggcaaggagccgcacgtggatgcgaggattatgaggatctttggcattgactacaatcacgtattcgtagtggagagtttggcaatgctaactgcagcagataaactcagccaaaacagagaagtattaccatttatattgagtagattagtacaggatggcgagtatttaggcgggtgctttgttgaattgagcttgaagcaaaccgaatctaccgtcacaccatcgaagcaccatcattggcacaaatccgagcaactggttcaaattttggccagcattccaaacaaggtggccaatgtactacaacgggatacaccagatacgttcctaccagaacggtattctcaaattatgctccaacaaatgctcagagcaattaattcactagccaaaatcacccatctacacacccacctcgcttacgacacgacattccttgcaaagctattcagcaaactgattgtagattacaactttgataagcaatcgcgttatttacaattctcgcttcgaatcctaacacattgggcgcggttcaatgattgccaacagagaccacttatcgcagcgatttgcaccggcttatcgcgtcctgcagtggaagtactcgctcaaattgctttacgcgaaggaattgatttgtgcaatcttttcggaagcaacgattgcactggggattggaactatgtcctcacgaagaagattccactgttttgcagcttctcacaggatgcaattgttgagaatctgatatatttattggcgaggatgttcgaagcggaattgaaggcattatccttagaattagtgacggtatggtccagtcgcacaggcatccagaagacatcattcgaacagcatctgtatctgtccaagttattggttttgtctacgacttatctaaatcaatcgaaaaatgggaaactgaccgcggtggagatgcgagagtttcgacgcttgctatttggaggactaaagtgccatttggaatcacctgttaaggaaatgagatgcgtcggaatgatcgtgtcggaggtcattttgggatatttcgatgcttccgatgtggaagaagctaataaactaaaatttgattacgatggatttgataaagatacactgaagctagttgactgcttgcgcaatttcaaaaaccgatgcagatttgttgaggatgagctatcgcaaaacctaatcagctcagaagaagcaccgattgatcaactaattgaaaaactgtttgaatctggaagttcagaagctcagctgccgtcatatgaaaatttgcaatcacaaacggtagagcccgtttcatcagacttcaaaatatccgccaagcacggcagtgacgattctgaactcgattcggatgatgatttggaaccgtacgacatgtctaatgatactaatttggaacaagaacaacatcgtccaaagtatctcctagatcttcgtgaaatacttctagacacttctgatcagcatccaccggcacgtttcgaacttgccatccaagctgcaccagagttgatccagcagcagctacccaacaacgacatcaagctagctctcgatctactgcaaataatcctcccacttgaagctcgcgtctatatggaaaacttccaagagtacaaattctccgccttgactgctatatgcagcacttatcccaaagagtgcgccgagtatctctgttgcgagttccactctgagcttagtaaatactctcttaatcgtcgtattctcatgttggacatccttgcccaaaccgccaaagtcctcagcaatctagattccacaaatcgtcaatctaaaactaccaccagcgaacaaccggaactcgcacctacgccaaaaaatgccctggatctgaaattccgcgaagagaatgaattgcttcgcaaacgccaacttgcggaacggatcgttcgcgaacggattgctgggaaaacgcgccatatcacgtctcagcgatctactgcctcctcgtccgtgggcagcaaacttccgaccgcgaatcgtttctccgacgtggcaggatggttctttttcccgctgctacgaggcttcggatccaagcagtttctttttactgcaaacctaaaatttcagtacgatgccgataatctcctgttgaccacattccttcagacgctttcgattctcatgatatgtgctgaaaactgtccgatcggaaggaaattcgcccgagaactgttgaacctgagcgtgatgctgaggtttagtgaggaaccgaaagtgcgcctgtcggtgctgcaagtgctatcgtcgatttttctggcgcttcctaaggcaattctgcggcaggatttctacatggacatagttgagctgaagcagtggctcgaggagtgcgtacaagctagcgtcgtcaagggagaaccaaatgaggagtgccgggaatttgctcggaatgtgcttgttatgtgctatggcgcgttggcagaagattaaaaggggtacaaatagagttatttctttagtggttaacactaatgtgaacactttcgaaaaatatagatgttaaggttaatgaacttgc

SEQ ID NO: 1091 - DNA, 225 bp, Aedes aegypti
gcgatcgtgttttgttgttattatcaatcgggtttattaatccgtatccaagcgatcaacgagatcgcgatcgagtatctagagagggtgagagagatagtgaacgcggtgtgcccagttgagtgggcaaacggcgatcagacacacacccctgcggtcggtgttggtgtgctggttttagcgatcacgactcacagccctgcggcacttgaagcggcaacaaca

SEQ ID NO: 1092 - DNA, 693 bp, Aedes aegypti
atgaaggtgcagtacgacttggaaggcggtgtcctgaagcaaagtatgggcccgaagtccgtttcgaagcaaattctctacggagtattgctgctagtgatcgtggcaggatgggtggtctatcaacaaggtggagtcttacgttctaaggaattgtcatgccaaactatatctggagtaactgttactaccgaagatctcacaaatacagttgttcagagtaccgaaaatcctggcgttacggaacagttccacgtagagagtgtagataatctgattggagccctgttcagtccatttgttgaatcggaatcggccgttgtggaaatgaagctggacaccgatgggttcctgattaagttcggtgagaatgtggataatttggtggagctggccagagattccgaaatcaatacgatgatggcgatggcattgcaggaactgctgcttttgggtcaagaggataagccggggaagaaggttgacatcggattgatgaaaaaggagaattcgtacgaggcgacaacagtgaagaaagtcgaagagctttggacctggtccactggtaatctgttggagtttaagttccgctttgaagataatcattgggagcttgaaggagcagcagaatataaatctagtgaggagaagaattcaaatgaaagatcggaagaatcgacagatgatcgatag

SEQ ID NO: 1093 - DNA, 924 bp, Aedes aegypti
gatcggaaaaactctcgtatgccaacggtaacacccatccagggtccaatttttctcaagaatggaacagttcctgtcgtgccattatttgcatatcctcaagtcagcaatggaacgttcgtccagataccgatctggtggacggccctatcagtagcgcttggtctcaacgtgcggggggatgtgatcaaaggtgttccttgtgttaagaagaaccatcagctgttctgcccgacggctggcaatagttatccaatagacaaaatcgaaacattcatcgacgagaacaaggcgctaatgaaacgaatgtacggagactttgagatgtcctcgaggtatccgccgttgcaaacgaacaggaaacggaaacgtcaggtccaagggatggacgatgatttcacgatactgccggagctgatggatctttacggagtaccgggctcggcggatgatcctgtttcatttggcggcagtggcgattcctactttggacggttacgggacaaaaggcaaagttcaactggtcgcagtaacaacggtggagcaaatggctcaaatggtagcagtaatggcaacggcaatggaaatgcaaacagaaggcaaggttcgacgcccgatagcagtggtgagagtaccggaagggtggacgcatgcgaatccaagatcgagatcgtcacaccgtactgggcatccaactctgctggaaaagtacgtgccattgtaaatacgcagcattttgagcaagcaattcaccaggaggtgtgttcaaaaacacagacatctcgctgctcgggagattgcggttgcgagcaaaagtacaaatggcaccggttactggcctacgatccggacaacgattgcaaaggtatcttcatggattggttcctgtttccttcgtgctgcgtctgtcggtgcagtccttga

SEQ ID NO: 1094 - DNA, 1268 bp, Aedes aegypti
acttccggacaaaatcacccgatcgtcataagtcttttctaggttgtaatgaagctcatcatcatactgatctacgtctacaatttggcccaaagttcgtggggacggtcgtttcttctgttggtggttgacttttcaatcgttccattccgcaaagaagtgagtatatcgttcagatctactgcaaacagtacagacagtaagcggaaaacatgccgggagatgagccacctttgcggtcagttggtgcatcaagcataaaagcgcagtctgttaagagacagcaatagccgatgtggtttagctcttcagtattgttattttttcgtttcttaatttacaattaagtgcgtgccatctgcgttccagtgtttgtgtgtgccatctctaaagctaagcgattaaaattgcagtttgcgtgtttcaaatttagttttgcgttatttctaaaagtgtctgactacttggtttgtagagtataattaatattttactagcattaggttcttcatctttttgcacatgtagtcttatcgtctagttcctatcggtttcgtttagtcctttctctatttagaaaattattgattatgcttttcctgataatgctcaaagtgtgtacaattaatacgaaaaaaaatctaatacatttctttcggtgtgggaaaaatgttttacaatcaatttagtgtcgataatacaaaagagcgatccagtttgagtgtaaaatttaggctgccaaatccgaaacttacgtttataaatgtctttaaaagagaaataataggtatcacatcatatttcacgctgctccggtttgtgacaatggttgtcaattgcaattgttgatgttgacattttttttttggaaaattgcacgaaatgggaagaagggcaaacttagtattttcacaatcggttctaacttaacattacaactggacagattatctgtttagctaaaatataagtgtaaatatcactacaactgattgaaagatagattatagaaaacaaaacactaataataattgcaatttctctttttttaaatcaggaatataaggcggggtttaatgcccctggacttgctcctatcatctttagaagggttaagtatttttttctgtgtcgatttttcataaaatagaaacataacaaagaaatgtctcaccacaaacgcatcctctcatcacattctctccctcacatcctatctcttccgctcggcgtcttacaacacgcacccatacatacgcccattcagt

SEQ ID NO: 1095 - DNA, 528 bp, Aedes aegypti
agaaaacttaacaccaactcaagcacttcttcgcttataccagtaaattccacctccaatggctgccacaatcactatgaccgcagcaccaattatgaccaggtgagaacttccatttccaccttcgttgctaccattggtgttgtcctgggccttgtgcccatcttcgtgatcagttttaccgggttcctccggcggcggctgtggcggtggcggcgaaggcgtcgtttgaggagaaggaactggttcaggacgaggtctaggaggcatcggcccggtacagcacattccttcaacctcccgctcattctgttcgcagttgctgtgccgatcagtcggcgtggcaatattgtgttcttggaggaaatcaagcatgtcctttatatttcggcactggaaactgtttccgttcaggtacacggctttcagcgatttcatgtccagcagatgggcgtagtcgatgctgtccatattattgtcattcagtttgagagtttccaaagccgtgaaaggatagaagatttctag

SEQ ID NO: 1096 - DNA, 714 bp, Aedes aegypti
atggcgtcgcgaaatttcttcggagcgaaagcacaagcttctattctgccgctacgggcgatttttcacactacgattcgccaactggcgtcacaacttggcggcaagcatgccgacgaaacttccccaatatgcgctgcggcagcttcgtcaaggatccttcggcatacgaacagcaaacgcagcagcagtagtagtcccaacgattatagcgattcggcgacggggtcgttagtcaaggaacagcaccatcgccaccaacaacagcagcagattaatggaaaatatttaaactcgaatgagaacggtggctccgaggacagtgccgggattgaaactccggccggagcgacactattctcgtcatcggcatcatcatcattgtcatcctcgctgtcatcgccgctgtcgcataattcgccgcaaacattgacgctgacggcggataaaaataaaacaagtaagtgtttgttccgcgcggcgggcgacgccaagatcgttcccgtcgtatacatccatcatgaaaatagctcgcttgatatccacagcacgagcatggtgaagatacatgccctccttcagtgcgttcaacctgttctactgccccttttgaaccaaatcccatataacgaagctcccacatacattcacagcctagtaatacgtatacgctctgaagcatacatgtgtggaaccaacctgttctacgaataa

SEQ ID NO: 1097 - DNA, 8286 bp, Aedes aegypti
atgctatccgtccgattaaatctctcggattgcggttcgaaggtgcaactactactggctgccttcgttacgcaacggaataggactggacgcggtcgtaagtcgctgaacctaggtgccacaccgaagaacctaccgcagaacgcatcggcagctagcccggcgccagcttcgttgccacatccctcaccgaacaccaccaccggtgccgttgccgctgcaaccgggacttccaatgtggtccaatcgagccaactggtgaccgtttccggtgcccaaacaggtgtcaacgccacgctgctcgccagcaacaacgctagccaaccacttcagcagcagcagcagcaacagcttgcacagcaaagccaattgcaacaacagcagcaaacaccacagcaacaacaacaacaagtgccaacagtcggtataatcaaagccgaaacaatgaaggatcaaccacaacaaccaatggcaccaatggcgttctacccaacctggcaagccgacccgtcgcagggctggcagaatcaattcatccagcagattccgcagaacacccccgccatcacgccgctcaactctctcgaattccagccacagggctatgcagcataccaaccgaacagctatgttcaaacggccggaatcgggttcgacccgaactacggtcgcacctatgccgcaccgccaaccgttcagcgatacgaattccaaaccaaccaaatcacaccgatcaaccaggtatcgctgcaaagcgtttcctttgcaccgaccgtcacctatgccggtcaggtctcaaccggtccagccgtcgtatcccacaatccgcacgatcagttcaatctccagctgaacaagcagacgtcgggaaacgacatgcctggatatccacgggtgaacagcgtaccgccgcgctcactcaattgtaatggatattcaggccaagactatggcggccaaaccaccacccaagccagctcggcaacgactaacgtaaccaacgccaacggaacgtccaccagcaccggagccaacagtggcaccggcagcagcagttccatgcacccaccggcacaggtccctcagtcgccgaaccgacaaacacaacagcaacccccacgtcccaactccaaccaacagctgtacgcccagcagtctcccaatccgtacagcagcaatggcaacaatagcaatctgcagcaatcgccgaaccacaacaatggtgctaacaccgcaaacaacaacaacgtctatgcacagcaaacgcatagcggcatgcataccccttcacccatgcaaacaccagacaatcatcagtcacccagtcacatgaatggtggtcaacaacagtcccaaggcgactgggtgggctggaatcaacaacaacagcagcaatcacccgatatgttcaaccaatcggatcgagtaaacctcaactcacggttgaaaacgatgatcatgaacaaaaacgatcccaaggacggggtcggaggcctacaaccgacaggtcaacacatgagtcatctaggtgtccaagcacagggaccggcccaacaacagaccggtcattttttatcgtatagccaccatctccgagacagtctaacgcctacatcgctagcggctggtggtagtaaccctgcttccggtcagtcgccagcgcccatgatgggtggcggaacaggcagtggcagtaacagtacatccaatgatggtactatcggagatggtggcggtctgatcaacagtataagcaatattgttgatcccaactggaagcaaagcagcaaatcgcctggtctaggcggcatagagagcaatggagcaaacagagcagagcacgaacatcacacgcttttgagcgaccttcatcacggtagtaagcatcagggttttgagcagaagcagcaattaatcgacaagaataataccgacccaggaggtggtggcctacatcatgatactggcggcggacacgacatcaagcataagcttcattcctccaaatcatcgtcttcatcatcgtcctcctccaaatctaagagcagtagccataagaatagcgataagcatagcaaatcgaaaaacaatcatcatctcgacatgaatcaaccgatagactctaacaaatcttccagtaatcttaatagctattcaagcagtagttttatgaacgatcaacactcatcgtcatcgtcgtcaccgtcgccgtatccgaatcttaatcaaacatatccagcaatcaatcatagcagtagtagtagtaaccaatcgtcgcttggtctcggtggctatcccagccatcccctggacaacaagctagacgataaaactcctctgaaccggtccgccacgacaacctcaacagcggattcaatccacaccttccacatcagcagtctccgcacggcatccacagcggtgctttccaccatccgcaaaccgccaccagcggaagaaccgggtcttttggatgacggccagccaatcaagtccgacggttacgaaaagaactaccaaaacttcatccgctacggagaatacaacgacagcagtcaaccaccacaaagccaacttccccagcacggcagctctagtctctccggaacgacgaaatctgaatacaacagctactactctccttacggtacctacccaggctaccaaaactatcccaactatcacaatcaaaatttcaacagtccttcgggtagcagtgcgcttccaccaacaccagaagtaacaacaccactacccgccatcaccacacccgttgcccatcaaaccaactttgagcaacagatccccgcccatacatatccgattcccaaaaacagcggcattccgcaaccggacgttcctatcaaactagaagcggaagacaactcgtatctcaccaacactagtgtaccaccgatgagtgaatctagcccggtcaacaatcttcctgcggccatacccaacagcgctccaagcacccaagcagcacccgaaccggaagctccccctccgacccaaccaacccccacacctaccacggggaagtccaaaaagtccgaaaagaaagagaaggccaacaaagattcgccttccggtgacagtgaaaccaaacctgaaggcggtagtagcaaatctagcaaaaagaaagaatccaaaggctcgaagaaggaacaggaagcagccgccattaaacaggcggaagatgaaaaactggaaaaggcgcacaaaccggaagcaccggactgcgattgtttcacctcttcggacacaaaggctccgtccgaaccgggaagctactacacccatctaggtgctgcatcatccttagaagaacttcgccgtgaaacagaaacccgtgtgggtctatccggcaaacaactacggatagagaaagttgtgtacaccggcaaggaaggcaagtccagccagggttgcccgattgccaaatgggtcatccgacgagtcgatccggaagagaagcttctcttcattgtaaaacggagacaagggcatcggtgtaaggcggccttcattgtgatatgtatcgtagtctgggatggtattccaacgcaggaagccgacagcgtctaccggatgttgtcggtcaaactgaacaaatacggtcttccaacggtgcgtcgctgtgcgaccaacgagaaccgaacttgcgcctgtcagggtcttgacccggaaacctgtggagtgtcgtacagcttcggctgcagctggtccatgtactacaacggttgtaaatacgctcgctccaaaacggtacgcaagttccgtctgtcagtgaagaacgaagaagcagaaatcgaagaacggatgaacatcttggcaacaatgctgagtccgctgtacgttacggttgcacctcaagctttccaaaatcaggtccagtacgaaagggaagctcccgattgtcgactgggactgaaacccggaaagcctttctcaggtgttacctgctgtttggacttctgtgctcatacgcatcgagatctacacaacatgcaggatggatgcacggtgcaggttactctactaaaaccgcttccaccaggtgtcaaagccgacgatgaacagctacatattcttcccctgtacaccatggacactacggacgagttcgacagcgaagaaggtcaaaagaaaaaggccgaaaccggagccgtacaagtcctggagaaatttgcaactgaagttcgggtgcgatcaactcctctgcagccatgtcgacgtcatggaaagaaacgaggtaacggcaaggacgagaaatcaaaggatgattcaaacaatgaggaatcggttccggaaactcctcctcccccaccacctccgacgaaaaaggagagtaaatctaagagcaagaaaggttcctccaattcgtcaaacaacagcaacagtggcaatggaagcaacagtagtcaaagctcttcaggatctggctcaccgaaaggccaaagttcgaacagcaatagctcgaaagccagtggtgaaactagcgctaatggtaacaacagtgcgacgaatgcaactaaagcaactaccccacaaggaccggctacaggaaacaatgggtcgaacagtgcatttactccaccaaatgcaattacctcgccaaacaatggaggcaacagcacactcgtagatatggcttccatgattgacaacttcactgatgcccaattgcagtccaaccagatctcgagcacggtgctggattcaccgtatagttacgactacaacaccggtcaatacatcgataaccgacagtactacaacaactggccaacggattactacggcaatcgaaccgatcctaacaaaatgttgggacgaaatgaagaaattcccgatacaaccacaagacccggtagcaacagcagtaattctgctttcagtcctagcataccggatccgacgaaaacgccaaccccaatccatctagatgactacagtactaccaaattgaaccaacaacagagccaaaatacgtaccacacgctccaacagccggagcaaggttttgtcaaacctaaaccaccagactacaacccaggctatggttaccacccaaacactcctatgggctatggttaccattcaccgtacacgccatacgatccataccagaactacaactacggctatccgccccaaagctaccaccctacatatcacaacatgtactcggccacgcagactcaactgccaggaactggtccggcacctccgcctccacctactgcggtcataccggcacctcctccgccatcaaactggaatctctatccaccacatccacaccatcagacacacatcccgcccagcactccttcgcagttgcacacgccgcatcagccccatctgaatcccaagcagcacgacattcctccagcgatgcagcaagccccgcaaccgccggcacctccaccaccgcccaaggaaactctcggcgaagtaacggaaaccaacgagaacgtggactgcttcgaggacccgcagatgggcggagtggccatcgcgctgccgcacggcagcgtcgtcatcgaatgcgccaagctggagatgcactcgacgacggccctgaagaagccgaatcgcttgaacccgacccggatgacgttgatcttctaccagcatcggaatctgaaccggccgaagcacggcattgccgagtgggcggagaagatgcgcctgaagaagctgggcctggccacgaacgatcccatcgacgacaaggacatgctgctgatgcaggaggacgacataaagtcggaaccgctggacgacctgcaccacatgcggcacatgggcgatgaacacgacatgatggacgtcgaatactcgggtgtctagtggtgagagaaaaatctgccaccagggcgaccgctggatgagcagattacagcaacacgcggcaatagcaacaacctatcggcgtccggtttggcgacgtcagtgccattgacatcgcagccgcccctgccggcgggtggagttcccggttccagtcgaggaacggcattccaccatcagcagtcgcagctgccacatcagtggctccctacaacgggactccaaagccaaccacacgaaagacatcatgatcctaaccagtactactactattactattactgaagactactacagatactacagatgcggaggagaatatatcaagcgatgctagtgactacataagatttagaacttggaacacacactcaatgaggaacactaataatacgtacgctccagtatttttgagaagcaaaacgagaaacggtaagacgtaaatgaaaatggctaagattttgcattttgtaattaactttgtattcacgtcaattgttttgaccgtgaaaagcatttgagttacgtttggcaacactctcaactgctcaaaccaattctttgatgatttctgtttgtgtgtcaaaaaccaaatcttctgatcaaaatccgtatttatttgacttattcaagaatgaaacaataatgacaacaacaaacgcaccttcaggcacacactaaaaaacaacatagaaaaagatatcaaaactaacttttgaacaaaaaatcaaatattttgaaaacaagaaatagcaaatttaaaataaaaaataataatctatatcgaagccaaaagtacaaaacaaacaagttgttaacacaaaagaatctgactgttccactttaactattgatttagaatccaaaacaaagtttctcgtcgagaaaaaaatgtctggaccatttatctcctgcattaatctcctcgattttttgctgcttattttaacctaaaaccaagaacttgatgaacgaaacaaacgcgaaaactgctctcgctctagacagtttacgtgggaagaacaaagttctcccattactaccactgctactatgctctttagctccaatttgcttatagaatcggaaaagatatcacaaatgtttgccaataattcattgctaacgacaaactagctgttatagactttttcttttgtatataccattttcttaattgcaaaccctacaactaggtcaacagaattccttttttaacttcaaagttttccgtttctctatcaatcgttttcactacactttttcttaggttagaataatttctttccagtctcctaatttcacatggtagaataaatgaaagcgccagcgcacgcagcatgcgatatgcacatatactacaatacaaacacattcaaagcgaaaacaaaaatttcaaagatgaaaaagtattagtattttaacttagtatctaggtcttgtttttgattttccctgtatttttttaaatagctcactaagtaggtttttctctctgtaaaatctctttaccattagaatcgttttttaatattgaatattattcttctaactgatgaagtgaaacatgtaaaagacagtgaaaggacaaccgtaactcgaatcagttttatcaaataaaagaactgaacaaaaatgtaacccatcatttatgttaagaagtgtacaagtgaatgtttttagtttccctaagatccagcgacgaaaagaatcattatttaattatctatttaactatttattacaaaatgaatcacacactcacacacgcgcattgcatccatacaaaagtgacgtgaatctaaacaattagaacaacaagaaacacaaacacacacacttaagcgtgtaagtaattctattattgtcattaaattatccattagttttaagtatcatttgtctcatgagaaaacacatcatcttgtgtaattttagttctagtaaacaaatgaagaaagtaacaaatcgcacgctggaaggaaaatcgctactttagtgcgcatattgtttagccataaaacatataaagaattacaacacagtgattggacacagtgttggcgagtcagttttgatttaatacttctttctgtactacaaacactcacagacaaacagacgtgttggttttcaactgctccgtagaacaagaccataattacaagtagatgtaaaataaaatcgtagggatgttatatagaagtaattaagacatgaaagaaaacactgatgatgatgataatgaggattaaaggtgcgtcgcaaacgcgtgtgtagaaagaaaagaaaacaagacaaatttgccatattctgaagaaaaaaaaaaacattagaacgtcaaccgtgcgtaaaaggtaatgaatactcatatacgtgaacattatttttcaagtaataccaataaattgcagtttttaattc

SEQ ID NO: 1098 - DNA, 330 bp, Aedes aegypti
atgcattttaggactatttttcagattcaattttactgtaatgaggcccgctggcgtgagaaccggaccatcttcaacaccccgaacccccggctgatgaacgtgtcgctcctgcgggacaacaagctgctgcacggccaggaacggcgcggttcccgcatgtccgtaaggctgccctcgcgccaaccgagcatggcttcgctccgtccgcattcgccgaatgcgtcgataggtaagctaggtctgtatgcggggaaccgatttccattccatttctactacactactatgttgatgttgaatacaccttctacgtacagctcctactag

SEQ ID NO: 1099 - DNA, 654 bp, Aedes aegypti
catctgcacagatcacttcactataaagaatcagcagaggcatttggaaacgtattaaaattgaaaagcttacctctcgaagatacggggggcttcttaccatgcgcgccgcttgttgaagcttccactgttgttggttttgcgcggaggcgactgtcggaaccctgccgggataatcgtggtcgccagctgattgatctcgtcaaagtttacaccacggtgatcgtccttgaaggaaccccttccccgaggatctcgcgagcttccgccaccctgtctcatagaggccatctcacgggccttcgggttcatgggattcggtccggcgtagcgattggcgtttcgctcgctctgctccagaatttccgaaacgtagtgcaagcccgcgttcagatgctgattacgcatttccgggacatctcgttccaggttgtgcatcaaatttgtcatattaccggatacctgccgtttcttcatgtaacgcataatctcgttgagaatttttacttgattggcgttcagatcgttcatagagtgcagttccacatcacgatcgcgatccgtttggacgctaacttcaattgtacgtgcgcgagtggccgtttgtgtgttgaccgaaacgtacgtcttgctgcgacgttgcacgcaatctaa

SEQ ID NO: 1100 - DNA, 327 bp, Aedes aegypti
atgcacgaatgtgcagcacgttgttgtagggacagcaatgccagcatggactctgtacagcgctgcatagaagcctgctcaacaccggtacaacgcgctcagcaacacgtagaaaccgaactaggcaatttcaataatcgactgcaacgttgtgtcatggattgtaacgattccatcaaagataaaatgggtccgaaaccgtccgatgaggacatttccaagtacaccgcgatgttcgaacgctgtgcaatcaagtgcgtcgacaaacatgtagatttattgcccggattgttcaaatccatgcatcaggtgctagggaacaaatga

SEQ ID NO: 1101 - DNA, 633 bp, Aedes aegypti
atgagaagttcaggtgggatagttgtaagtaacgtgtttcctggaaatttcattgaatcggaaaacaaatcaactgcgaaagagttccccgagcacgggatggcctatcaacagtacgcccagtattgtaacgcttactatcagcagttgcagttcaatcccaacggggggtcaatttcgacaaatgttccgccgccaccaatttccggtggaggaaatgctggaggatctggttctcccggaggtggtggagcccctcccggtttcaccaacgcttcgatgtcagccattggcaattccggagaaaatcagccagggggtggttccgatgtatcgtcctcgccttcgtcaggtagttttatgaacacgtcgtcattttttagccctcagcatcagcagcagcaacaacaacagcagcaggatggaaatatgcaaggattcaaacaagcgccaagccaatttggtcctattcgattcaatattaacaaacagccacagagggttagtcccttggtacagaacaatgccttgtcgaatggttctcctcaattgccacctccgcctcaacaacaacaacatcagcagcagcagcatcaacagcaattcaatcagaacaatcaaccgataggtaag

SEQ ID NO: 1102 - DNA, 848 bp, Aedes aegypti
cggctaattttagaggaaggaaggaagctgaaaattgtgctttgggtgggtgagaaaattttcaagacctacgaagattggatttggtgtgttttgcctgtgtggtgcggtagtagaacattccctgtgtggtgcgatagtagacgattctctgtgtggtgcggttgtagtcgattctctgtgtggcgcgatagaagaagaatccctgtgtggcgcggtagaagaagaatccctgtgtggcgcggtaggagtaattcaagggcggtgaatctttgtcctttagttcggtgtcggaggatacaattcctgtgtggcgcggaaggagtatttcaagaggacgttattcgccttggatttttgaaaattgaaaccacctttgttgcagtttggttcagctgaaatgtcacgttggattcgatttcgattctctccctcactggctttcgatgacactccttactcaacgccgattgttattttccaagattacggctctgttatggtttagtaccgtgtgagcctttagttttaagtttgatttgtaacgtttttcgaaaagataaagaggttttgtgcctctttgagaaagatttttaattgaaatcactcaaaggggtttttccctctttcaaaattttagttaaaaataaataataataataataagtgtggtccaaatatccttcaacagtactcaagacggccttacagttgaggtcgaaataagcgtatatttcaatcgatagagctgtattgtaaaattaataggtatgatactaaattcgtttttaatttactcataggtattctacacagtgtgaagcataaacgatttaatgaaccaccct

SEQ ID NO: 1103 - DNA, 342 bp, Aedes aegypti
atggaaccggaccggctgcagaagcgatttcgctccaagcgtcaggcctactacaaatcatcgcgggcgatcgacaccaccatctatccggaaatcctggtcatcgtggactacgacggctaccggttacacggcggcgacaacgtccaggtcaagcggtacttcgtctcgttctggaacggcgtggatctgcgctatcggttgctaaaagggccccggattcgcatcagcatcgccggtatcatcatctcgcggatttgtaacaaactggcacaagtcactagcgatggcatgaaccagtctaacgaacatcgcaatccgcggctaattttgaccagttag

SEQ ID NO: 1104 - DNA, 792 bp, Aedes aegypti
ttcgagcttcgatttttcattttcgattttcaattttcgattttcgaccttcgatttttgtttatcgattttcgatttttgtttatcgattttcgatttttgagttttgtttatcgattttcgattttggattttggattttggattatgtattttgtatattggattttggattttggaatttggattttccattttccattttccattttcgagtttcgaatttcaattttcggttttagtgtttcgatttcttttaacgatttccaagtttcgatttccgagtttcgatttttgattttcgatttgcgattttcgacttcgatttgtgattttcgatttctgatatttgattttcgattttcaattttcgattttcgactttcgattttcgtttatcgattttcgatttttatttatcgattttcgatttttgactttcgtttatcgatttttgactttcgtttatcgattttcgattttgggttttggattttgaaatttggatcttggattttccattttcgagcttcgaatttcgattttcgtttcgttatcgattttcgattttggattttggattttagattttcaattttcaattttcaatttttgattttggattttggattttcattttcacttcttacttttcagttttcagttcttagttttcaatccaaccatttcacatttgttttactgacaaatttattggcgtttgttaagtatttgttttcgtttttgattagatattttttttattttattattcatttggtgtttgcttag

SEQ ID NO: 1105 - DNA, 687 bp, Aedes aegypti
agttttcagtttcttatttctagtgttctgtttccagtttccagtttctacttcccaatttcttgtttctattacacttttcctatattagtttctagttcccagtttccagtttccagctttcaattttcaggtttcagtttccagcttccagttttaactttttacattccagttcccagctctcagtttctagtttccagcttccagtttccagtttccagttcccagttactattttccagtttccaaactttactttctagtttacagtttccagcttcaggcttcaagtttccattttcccggttgcagtttccagcttccaatttccaatatttaatttccagttttcagtttttaattgctagtatccatttccagatttcagtttccagtttacagctttcagtttccatattccagttttcagtttccacttcccagttcccagtttttaagattctaatttctagtggcctttttccagtttctagtttcccacttttctgtttcaacttttattttccagcttccagttttcaggtattagtatcttgtttcttgtttactgttttcagatttcagtttctagtttcaactccccagtttccagctctcagcttccagttgccagtatccagcttctatttttcggtttccaatttcaagttttcatctttctga

SEQ ID NO: 1106 - DNA, 1581 bp, Aedes aegypti
atgaattacagactgttggtatggctgtgtctcctggtgccattggtggcgtcgttgcctcaagaggaaggtcttcgatcgttgctgttgcgaagaggaggacgcgttggaactaaaggtcagttgcaattattgggtaatgaaaggattcttaactcatgggagagattgcagtgttgtaacgttcataaacgcactaacttcaaccatcaacttcatcaccactattatcatgatcatcactctaggcgtaatcgtcacattaatgcaaatcatgttccacataattcacgcttatctcatcacaaacccatcgttgatagccccagtggcttacaaaagaagcaaggtactgcaggcttaactgacgctcaaaagctgcttttagacacagaaattggtaaagtagcagaaagacacgaccaacagttgcgacaacttgcctttgggagttttacgtccttcagtgattattttctcgataacctgaagaagagtaacgtagcggtgggttttgcttttgcacaatcctcaaccacaaccagtagtgacagtgttggtacaaccagtgagatcccgttttacgacgaggtcgacgacgatgcaaaatcagctgctaatgctacgacagttgggtcaggtggcaccactaatcaccattccaagtccgcacagccagcatcactaacactcgatcaatcgacaaaccggtttccaggcaaagtgtggggtgaaggtaccgagtccaagtttgggccaattttggaatatgttctacaacgaattcaaacattgttttcagtttacaagcacgacgacctgagccgacctggtgtcccaatagctgacgctgttgaagccaaatccgaagatgccaaaaccacagaagctacaaccactaccaccagcagtaccgtagctccagttcaaaagaagggtctacatccactattggctcgtaagaagtttgcctattctccaaaggaggccaaggccaaggcaactgaagattccggaactccaaccactactttgaaaactactactactactgctgagtcctccgaaagttcttctgtttcttctttagcaactcgtcgaacccgacctactcgtccagcaccggtagctcgtgcttccgcccctaaggctggattaccttctcgtgttcccagaactaccactaaacggacaaccacaactcccgaaccggaaacctcatctgtaactactcgcactaccagacgtcgcggtggacgtcctacgcgtccatctggatcgcaattcctagctggtaaaaccgcgacggaagagaaagctgtaccggtagctccaacggttgcttctaccccggaagaagcatcaccgtcctccactgccgccactagctcactgccatcttccccagcctcgacggctgcagcccctcctgcagtgttgagcaatacgattcctttgacggccgaagccaccgttgccagcgaagttgtagtcaaacatgtgccattgctgcccgtggaaccggctccggtggttgaagcccagttggacgatgtaggaccagatcagcagctagcctaa

SEQ ID NO: 1107 - DNA, 737 bp, Aedes aegypti
ggcgatagtcgcttttggtgttcttcctgcgtgcgcgaaagaagagtttctagctcgagaataaaacttaatattttttggaattattcagattaaattcgtagttatccgcggaccatacgcaaaacgtgattgtgtataagtactttgacaaaaatggtggaacagcagaaacaaagaatcgagctggaattgtctcgccgcgtagatgaattggaccgcacaatcttgcgtaagatgcagggtgaaatgcacgaatgtgcagcacgttgttgtagggacagcaatgccagcatggactctgtacagcgctgcatagaagcctgctcaacaccggtacaacgcgctcagcaacacgtagaaaccgaactaggcaatttcaataatcgactgcaacgttgtgtcatggattgtaacgattccatcaaagataaaatgggtcctaaaccgtccgatgaggacatttccaagtacacctcgatgttcgaacgctgtgcaatcaagtgcgtcgacaaacatgtagatttattgcccggattgttcaaatccatgcatcaagtgctagggaacaaatgattctagcgttaaaactattaaggcccacttgtgttctctgattgggtttttgtacagaatttggttactaaaaccaattaaaacgatgcatttcacagttgacatcatctagtgttaccgttaaaatatgtttggaaatatattaaaaatgtacaatgaat

SEQ ID NO: 1108 - DNA, 552 bp, Aedes aegypti
atgttgtccaaccgtcgtaaaaggtctgccacaatggtaagggtagatactcgatcgctcggggccattggggcatttaggacgctcgaaaccaaagccgagctgctattcaggttgccattacgttctataatcaacttttgctgcagcgtactatcttctatcttactaactgcattgtccatggttcctaaggggggttccaagtcgagtttactggtcgatttcgcgagggctacaacatttaggtctgtctttttgccaatgacgttattattgaggttttctagcttattgctactgaggcatacatttgcggtggtattcgagtcggatctaggttcaccggatgcgatctcttgtgttttgtcttccggtgtgtcgtcaaccgcgagcgtgtccgctacttccccatcttcttcatccttgggaacgtgtctaactttcagctcctgtttcaaatcccgagcctcgtccataagtcgctgtaacttgatttgcatgcgttccttctcgtcaacctcgagttccaaaagagcattcttttcgtaa

SEQ ID NO: 1109 - DNA, 534 bp, Aedes aegypti
atgtgccgcaagtgcaaaaccttatggatgcacggctactttcacgtagatgaagtggcaagcactaaccgatatgacaagctcattgagaagtgccagaacaaatcctcacgaacaagaaagcagcaggcatatctggattatctcacaagtcgaaagcgtgttactgtgaaatacacttgtaagctgtgctcctataaaacacgtgtcatcaccgatagaggtggcaccacgtccaagtctgtctccgcagccttgacctcacgaaaggaacttacagctcctccagtcaatgtcaccagtaataagcgaaagaagcgcaagcgggacccaactgcaggacttaacatttcggttgcagtaaaaagcggccctcagaatgtaccaaaaaagagcactaaaccgtcttcgtttagctcaaaggaacctagtaagctcaatgctttggccaatatgttgaagaagaagactgaagggatgtcatcagttgggacgttaacggcccaggatcgattgaaattgttgcttaagtag

SEQ ID NO: 1110 - DNA, 183 bp, Aedes aegypti; identical to SEQ ID NO: 481

SEQ ID NO: 1111 - DNA, 917 bp, Aedes aegypti
ctgcaataagcacgacattgtttggcaaacacactaacagaatgacacgattttttgagaagtttacccttttttgtgtgataactgtgataactgcactgtcgctcataatcgttaccagtgtgcaattggcttacgagcctgaaacagtgataaatcgtgataacgacaagctcatggatcagctaaaaagcatacgccaaagttctggttggatcaacaacagcagtgaaaagtgccagcaacatatccatacgaagttattcatactagtgcggtcacccaaaagaaataggaaagtgcgccaaacaatcagagacacgtgggctctcactggaaactaccccaccgtacaaataaaatttgcattaacaaagctaccaagccagctaaacgagcatgaaagcttcattcatagacacctgaaacgttactatcaccaatgtattccgggtgactatctactaattaccaacgacatgcactttatcaacacaccgcaaattataactgccataaaccagcgattaccccgaagtcacacagcaatatgcgcaaaagcgtcgcccaacgaaaatgcgatgaatgaagttaaatatctagggcagtgcaacgtccaagcaccaatccttttctcgaaagacgcggtgcgtggcttattagatttaaatattcacaacggccgctcagcaatggcggagagcattatccggtatggcgagcatttatatctcacgccgaaagaaacactgcgaattatcaacggttcgatagatgccagcaatttgctgttctttttctccgatcgggtcgaaagcgcatccgatatcagtctgctgtggaatgcatcgagagattatacggctgtggaatcttgattagtagcgaataaaggaaacgatgtacttgtaccaaaa

SEQ ID NO: 1112 - DNA, 2301 bp, Aedes aegypti
atgaaaagctcggcccagcgtaatttcattgttttcgaggactttgtatacgattttgagcacaaacagcatgacggctgcgttttctatcggtgcaaaaccagcgacgcatgtccagccacgttgatgctgctgagcaacggtcgtgtgatgcatctggccgattcaatgcacacgcatatgaagcccgatctgaggatcttccgccctgtgggtcgaggctcgaaggaatttaaaatcgtacagaacaaaaacggaagcaacatactggtgcatcgtggccaccggtataccactcctcgatctaagactgatggcgctggcatttggtattgtcacacgtacgttccggatatcaaccgtcgatgctacgttccgattgaactccttcctaatggtcgagttgctccggtgggcgataaacagcacagccataatcctccattcaaaactaagcctgaaccaggtgcggctcacgactccaaagacaacatcgtcaaagctgagcacagcaatggcactgccgacgtcaaggcgaccaacaatcgtatgttactgcatggcggacatcgatacaactttgcgaacaaacgcgacgatggagcaattctttggaagtgtattgaaaaaacttgtaatgcttcgatgtaccgactaacggacggacacattgtcaaaggaccggaacataaccacgatcgtatggaaacgctagataactcgatgaaacgaaagctgtctgattatgagaccaaaccgaaacacaccagcccaagcgtaaccgacagcgattcaaagctatcgtctacacctgatcatacggcatcctatccaagaggtattgcaataaggccgaatccctacattggaaaacctatcatccacgaggggtaccgttatatatactacctgacacgacgtgatggctcggaacactggcgttgcagccggagactaccgatgaagtgccgtggaggattgttcaagcaaaccgacggaacattgatcaaatccaatgaggaaggacactcacatcctccgtatgtcaacatggacgattcagtctccatgtcgtttgcgatcactgaaatgtcacaagaatcgaacgaggattccgcagaggtggtggaagaagtgttggaaacttcaactagtgcggaaccgcagcagcagaagtcgccatttgtagacgatgaaggctcatacgattatgagctcattgatgtcaaagggaagaaacgaggaatgtaccttatccataagggtgccatgtttgtggcaggccacactagaagggatcgagcaaggtactatcgatgtcgaactgccggctgtaaagttgccatgttactacatcgaaatgggttgttagtgaggatgaacgaaaacacgcacgattgtcagaacgccgtcaagactgaggaacacgacaaagaaggtggagatgatgatgaggaagaacatgttgagcccagcaaaaagaaacaacgattggagaacgacgaagccagttcggtaccagctgaggacgacgaaaccacagaagagaaggatgtggaggtgaatggtgatgaagatcccgtcgtggaagtgaaagacgaaccagcggatggacactaggtccgtttcgtactataagcaacaacagtagaggcgcatttgaaagaatacacacgcattagacacttagacagtgccgctactgttcttctaccattcgcataatctactactacaacagtatccgtaagtatttatcttattgatgtaaagttagttcgaacataaagttgatgtaatttcatgtattttgacctgagagcgcagcaatagtcttaatggaacataacaaaagtaaaccaaataacaaaactttctcgcgcaacaatctggtagaacagaaaagaatgcccttcctagaatagaaagcaatcctaattgatgaagataaacaaaacatggccagttgtactctgaacatggaaatgacaatcatcaaacacattttaatttaagggacgggccaagtgcaagtgcagtggttagcacacgcctctcacgccgaggatttgggatcgaatcccgtccccgagatagtctcttgacattcatgttatccttcaaatgtataaccccaaggctcagacaacgtactattttttaagaaaaatactctagaaactatttttcaagataatcaaaaaaaaatccttgcgcaaatcaataaacacgcgaaaacgcagcaacgtaaggaaaaaaatcacaaatcggttcactaacataaaagttacagttaccttc

SEQ ID NO: 1113 - DNA, 504 bp, Aedes aegypti
atggctttggcgtttgccttggctttggctgttgccttgactttggcttttgtctttgcttttgctttgactattgcccttggctttggcttttgccttgacttttgtcatgacgtttgccttagcttttgcctcagtttttgccttggtttttgccttggcgtttgccttggcttttgccttggcgttttcattgatttttgccttgttttttgctttagctctttccttggtttttgccttggcttttgccttgacttttgccttagcgtttgcctcagtttttgccttagcgtttgccttggcttttgcctcagtttttgccttggcgtttaccttggctctttccttggtggttaccttgacttttgccttgacttatgccttagcgtttgccttagtttttgccttggtttttgctttaatgtttgccttgacttttgccttggcgtttgctttggcttttgccttggttttaccttgactatagccttggtttttgcc

SEQ ID NO: 1114 - DNA, 654 bp, Aedes aegypti
gtagagcatcatgtcgatttcctcctcccgcagcacggctcgcttcttgaggaaatcgcgctgcccgccggtgaagcgcagcttcatatcatcacaggccgccggaatgttcagaacccgctggcagagtttcttcagcagggggaatgcattttcgttgcgccagtaggacagcacatcgatcggtgcctccagcttgacgtccacgtactgtcggatttcgtcgtccaccacgtcggccgattccacctccaacgagacgtccataaattcgtagaatttggtctccttcccgatttcgacgttgttcttctttccgctggagtagagcttcttcagctgctctattccatcctgatcgcgtcgcagttgcgctttaacgatcgccagggtttcactgcgttcctcttccgagaggaatcgcagacccttgaacttgggatccaggaagaccgctattttgtggtagtcgtgcagcttcaagctttgcttgatctgcatctggaatgcttctttaatggtcttcatgttctcgtcgtcagtttcctccacccggaagtgtcgctccagcttcttcttccacagcaccacctcggtgattgtcacgttgccttccgacacgagactacggatcggttccttgaaaggagctag

SEQ ID NO: 1115 - DNA, 567 bp, Aedes aegypti
atgaaacagttcatttcggtattattacttgtcgcatttctagctattagcagtgctcatagttcaggtaaagatgtggcaacgaagagcaatgagaacgcaggggcgtacgaggagattcgagtggaatcgtctctcaacgtgcgcaagagcaatccagctgcgaggaggcacgtgagaagcgtcgtagatatattggtgcccgacaacgcacgagttaagcgacagtttggcggattcggagcatccagcgcacaggctaacgcaaatgctttcaaccaacaatttggtccaaatggatttggagccagtgcagccaacgccggagcacaatctttcttcaaccaaggtcctggaggtggctttggagcctcggccgctaattctgcatcgcaaggattccaagccggcccaggtggattcacgggctctgctggacagtctggaagccagacatatcatctccctgggaaccgggacgtaagcttggcatacaccggtggattctctgtagcggacggtaaacctagtgtatcgcaaggaaattcgatcagtttctccggataa

SEQ ID NO: 1116 - DNA, 1080 bp, Aedes aegypti
atcatttagggatgacaaagacaacgtcaggtaatcaaaatttggctatttaactagagtatctgaatgatacgaatttcaagaagcatcgcgtgattgtaaagaatgttttcagcagatattcgctgtatcatattaatttgttgtgccagttttctttctatggtttttggttcagcaaacaatgcaacacatactaaacagtgtctgatagatatgctaaatcaatgtccacccaattcttcatgtgatgagggcttgtgtgtttgtttgcattcattcaaacaaaatcctgaatataatgagcagaagaataacgatttttgcattgaagtagatgcaacattatctcttcccggcaacaaatcaatcacgtacgacaaaatatacagaaaagccccagaaccacatcacatattaggcggaattttaatccccgttagtgcggttatagtgattttagccaccatcgtattagctaagaaaacgcaacttatgcaaaggattcgtttgtcccttttttcgaatcgtcccagaaggcccgcgtatgaagatgttgttttaggtaatgattccgatgatccccctattatttaaaacatgtatttcaagtatactaaaatacactttattgatatttgcagtaggctatgaacaataattccaaagaatgatggattctagagcataaaaaatattgaatgtgaacatcaagcaaggctttgatcaactcgttattcctaatggcatagttatcatcatacaatttaagttcagtaaattttagatatgtaaagaaattatttgatagaaatattttattttacttgtacatatcaatactatttttccataatacatcaacaatgtatataattcatatcaaaccaagtaatgtcgtttagaattttcaatcaattcaattgatttaacttgtatcgtaaaagtattcaatataaacaaatgtgattgattgtcgataattttctacattcaaatagataatgtaagattcaatatgatgtaatgtgaaccaaaataataaaaaataaaaacaattatatcgatttattgtattat

SEQ ID NO: 1117 - DNA, 342 bp, Aedes aegypti
agtgaaactgcgagtgaaagaagcattttcaactcgtgctcgcgcgatttaattatcatcgaagtttttatcgttaatttccgtggccccgccgggtgtaacagtgatcaaattgctcgcgacattgtgcggaagcgtgcaaaagtgtgtttcgtttggaaaaagcgccctagaaggtggaaaattcgcgctggaaaaaagtgttggcattttgagagcgcgctgcgaaaattagtttcctccgtcggagcgaagggggaaaagaaagaaagaagacttcgcacaccacacgaagaccaacatcagcagcagcagccatcaaagttagccacgacgacataa

SEQ ID NO: 1118 - DNA, 1532 bp, Aedes aegypti
gtgatcgctggtgaatggtaaatcgcctttcgaaaacagaacacgcggacagtgtggctacgtatatactgtatgtcatattgtttgaatcagtaccgccagcgagaacaaagtgagaaattcgttacgtgtcaggaaatgatagagtgccgaataaatttcatactttgacgagagtgaaaatactttctgctacaatggaacaacgattggtctgcgttatcattcttggattcggctttatgctgttgttcactgcttttcaaacgatgggcaacattgaacaaacagtgatcaacagcatcaaaatagacgatcccacgtttcaaggagatggatacacaagtctagcggttatatatgcattgctatcgatctcaaactggttgaccccatctgtactgtcgaaaattggaccgaaaattgctatgctcataggagcattcacctactgcttcttcatcttaacttttttgtggccacaaacatggttattgtacgttgcaagcgcaattttaggagctggagccgcgctgatctggactggtcaaggaatgtacctttcaaagtgcagtgatgagtctacaatttcccgcaactctggaattttttgggctatgctgcaaatgagcatgttttgtggaaaccttttggttttcttcctgttccaaggaaaaacgcacattgataacgatacacgtaccctggtcttctcgattctggctggtttggccattataggaattgtgtttctgggagctttgcgaaaaccgaaccaatcgaacctcgctctggacgatgaaattccagatcgtcaacagggaccaaagcaagcattcattaatgcagccagattgttcttcacgaaacgtatgttgcagctcagcgttacgttcatatatacaggactggcgttatcgttcttcagtggcgtttatggagctagtattgggttcaccaaggcaattggcgaatcagctaagcaattagtcggactgaacggagtattcatcggcgtaggagaagttctaggaggagtattcttcggccttctaggaaaacgaaccgccaaatggggccgcgacccaattgtaattgctggattcatacttcatatcattagttttgtacttatatttatgaatatacctgatgcagccccatttggagatacagacgaagttgcgttcatcaaaccaccgatagctgctatcgccattttatgttccttcctgcttggtttaggagatgcttgcttcaacacacagatatactccatgcttggaggagtattcgccagaaactcggctgaagccttttcaatattcaaatttacacagtctgttgcagccgccataagtttcgtctactcatctcatctgggacttcgtgtccagctaggtatccttctagtcttcgggattttgggtactgttactttctgttttgtagaatgggcagtgaaacaaagccgaacaatgaattcaaatgaatgtgaaactgtcgatactaagaaataaataaactaattg

SEQ ID NO: 1119 - DNA, 1002 bp, Aedes aegypti
taggcagtcagtatacgtgtgcagtttgaccggtgcacattcaagtaaagtgctttttcctcgcatggaaattttatttctagttaaatgtatgtctagtgcttctgagtggttttctacaaatattttatttgtatatgatacaatacagctgaaacaaataggattatcagaattctgaatacaaaacatgtaacttcttcggcggttttcgaacgatcgacacgcagctccaacggtttttgatcttctgctgccaattcgaagtttgcgggcatcgaatcggcatgtcgcagcagtacaagtgcttcgtggcttgtgttgggtgctattgtaacagttttgcgatccggtcttcgagccgaaaaatcgatttcaattgttgttcgtgatgatcggcgagcagtgagtgaccagcagtatatcggcatgtaccgaagcagcaattgtgatattatagtgctagaagtatttacgtctccttgagaagaaagttcatcgaaaaaagtggtttcaattgagaagaacactgcgtggggttagtttgtagtgaaactcggtcaattccttagtaaatagttgtaaaaaatggcaaaaatagcagcaggagatgcgctggccccggtggaaggttttggggaagcacctcgaagtcgagtgtcgactggtgccagctctcggttacgagctgagcaaagtgatagtgatgacggtggaattaaattgaagaaggagcttgggctgatggatggagttgctatcattgtgggtgtgattgttggagcgggaattttcgtgtcacccaaaggagttctgctctattccggatccattggtcaggcgatcatcgtatggattctatccggggttctcagcatggtgggagccctgtgctacgcagaattagagttgctgctctctttgatttcaacttgtctcgccaactacttcgacgaagattcagttaggtttttgatagatcgtaagaatggcaatttttaa

SEQ ID NO: 1120 - DNA, 537 bp, Aedes aegypti; identical to SEQ ID NO: 470

SEQ ID NO: 1121 - DNA, 1552 bp, Aedes aegypti
agatatacatctgtactaatgttttgttatctgaaactgatcgaaaaatcctgtggttctgggtttcgaagacaataaacaaagtgctgttctcacgccacttaggtttcaaatgtttcaactttcaagcttaaaacgtttttgattctactaaatgcgatacttttccatcaggacaaaaatcaagtgcttaacaattcgaaacactggacaaattgaaaaacacttacaacagatgtctgtctgctgtactcttatgagtaatgcgatattgaaagatttggaaattgccacagtgaaagttgtcgtcatttcgcttcaatttaacacatcccacaaaatggaaacgcaaacattctccacggtatctatgccgcacgatttacttccgacgtaaatgctaactgtaaaaaaatgtgcgcttacaactcattcatcggatatattcattctggccatagcaagttcccatcagtaagtgcaaactggcaagtgggacgaaagtgttgacgatgaaagcattgtttttgcttgttttgattaccatccacgaatgctccagtatctctatcaacaaacctggggatttcggagaaaacgatcgaaatgcaaccgataggcagctgtcactgtccaggaagaagaggtttctgctttttccagttggtgccgctattttggtaacagtatccggcgcaaaagcaatggtatacaaaggccctggaggaaattttgccatcttggaactggacatgtatcacccgcttccggacttcaataaccgttttacacaattcaaactaggtgaaatatattacccaccaaagcctgcacccaagccagcaccaccccctccaccggtaccagctcctgcgccgccacctccccctgaaaatcctcacgatcatcacgatggacatgaactgtcggaaatggaattgcaagactacttgaaaacgcacccggatacgtgggtacctccaggatacggcaaagatagatctgactggttcccaaagaatacttacaatccgtatccaaattactatcgacaaacaccggctgcaaattatattccattcgaaagtaatatgttggacgtcaatccttcaaattcttaccgtatgagaaggtctggcaaaacagtaacggactatcatattgaagaagatgaggatcgatataatataagtcatcatcgcaactgggagcattactaccattatcgggaaaagcgagacttgtaccaatcacttgaacaggcacttggacagaagcttcgattccagatgaaatcctgtatattgcgcgccatatgtgaagcacgaagtttgcttcttccaccgggcaggtctatgatgatggacattctaaggattgtattcagtgttccactgaaggatgacctccaggatgaatacagtaaggcgatgagacatgaaaatatggattgccatgaagtgtatggaaaggattgctctgtcagtatattgtatctgatcctatttggaaagtttgtaacgtaataaaaaaaaaacaaaatgtaagaaaa

SEQ ID NO: 1122 - DNA, 315 bp, Aedes aegypti; identical to SEQ ID NO: 495

SEQ ID NO: 1123 - DNA, 1461 bp, Aedes aegypti
atgatttttcttgaatactgcaatacccataaccaagccaaaggatcaaaaccggcaggtcatgctggtgttgacggccaactagaacagacacccgccgaggaccggcagtggaaagtggaaaagcgtcacaccggaaagaagatccacatttttctcggaaaaggttcagggaagagcaaaaagtccagcaaaaagcatgccgacagcgatggagctgaaacgcaaacacgtaaaacacccgagttgacaacccgatcggacaaggccgaagatttggccgcctcggccacatccgacgcgccagacgctgccgttggcgaaagccaacactacgaagtccctgagcaccaaatcgtgaaggagaagattaagatcaaacaccatcaccaccatcatcatcacaaccatgtgaagacggtggtcaaaaaggaaccctatcctgttgagaaggtggttcaggtgccggtcgaaaaaatcgttcacgtacccaaaccgtacccagtggaaaagatcgtagaaaaggtggttcacgttccggttgaaaagattgttcacgtgccgaaaccctatccagttgagaaaatagtcgagaaagtagtccatgtgcccaagccatacccagtagagaagatcgttgaaaagcccgtacatattgcgaaaccttacccagtcgaagtgaaggttccgtatcctgttgaaaagattgttcacgtcgacaaaccctatccagtcgaaaagattgttgagaaagtagtgcacgttccaaagccgtacccagtttacaaacaggttccagttccatacgaggtgaaggtaccatacgaagtacctaaaccagttccatacccagttgagaagaaggttccctatccagtagaagttaaagtaccatttgaagtcgaacgaaaggtaccagtacctgtgaaggtggaagtcgagaagaaggttcctgtccctgtcaaagtatacgtaccggttgaaaagaaggttccatatccagttccggtgaaatcccagttcccattcgataaggacatcggatatgcctcaaccaaactgcatccattcgaatcccagcaacatgaagtgagacattacggcgacgagtactctaacggcgaagaaggccaacagcccaaatacggaccatcgacattcccacagcaaaacgactaccaatcgcaggctactagccaggaaagccattatcaccacaatgaccattacggatcgggtacgacacaacaggaggtcatcgtgactccgccggccaacactgcccatctcacattcgatatgtcccaacaatctatgcctcaagctttcgctctcacagcaccgtccaatccgggaactacgttgcagcttgaatcccaaccacagccattccagcttctccaattatcgcccttccagttccaaacccccaccggcttctccctgccaactgccaggtaa

SEQ ID NO: 1124 - DNA, 3307 bp, Aedes aegypti
atggtgaactcgacggcgacgacgccctcccagtcccatggcggcgccctgtactacgtggtggaagtgccccgggaggagtacatgaagcagtgtgccgcccaggcccatgccgcagcttccgccggaggttatccgaatgcgtcctaccaggcacagtatgcggcccatcatcagcagtttcagaatgtgcacaacacgaccatcctggcgcgactgaacagtaccgagtctggttgggacaacccgttccggcccgggggagacctctcgcgggaagcagacgaaatagtcaatctcatcaaaggtggcaaaccaatcacacctactggcgatcagaacctgctgaacggtagcgcaccgaaggacagcagtcacccggcggaaaacggtggcagcacagtggtggacggcgttgcgacaaagctcgatgcggcgcaactccagagccagccaaacggaacgaaatctcctcagaagggtggcggtggcggcggggacgcttcgccccacaagaatggttcgacgggtccggcgcaggggacgcccagccagggaggggcggcccctcagacgacaacgacgacccccgtcagcaaccaggtgatagcgggaccccagtcggcaacccacgtggtcatcgacgagaagaagaagaaaaagtgcgcctgctgcgtaatacagtaattttcccgctgcgtgcgccattgtcgtgtccggtttgacacacgtgtgcaaagtgcatagggaaggaggaggaggagaaggaggaacagtaggcgagagagttgcgtagttacgtacggtacggggatgtgtgcgagcgagtatccatgatggtttttgttattcgatgagcaggctatgcgcgtgtgtgagtgagagaggaacggaggaatttgctttcatcgttgtcgaaattattgtttatttttttgtttggttagttcgttttgtaagagtttttaatgccaattttaagttgcaagtaaccttaattcttacattctcacaatagtgtcagtcggaaattatgacaagagtagggcaagttgtttactttacagtgggaaagtatcgaaattattttatgttttcttgggaatgacagaagcgaatggaaacacaatttggaaaggaaacaattacgattatgtatctctgtgtaactgtaaacctatgtaacaatttactgtaatttaggacaaataatgcttcgagcgtgggtttgtgccggcttctatcagagtaggaatgttagaatcctacctttttgaggagctatcggtacggtccacaaaactatgttttatatataggattttaaattaacagactcagtttcttatttatatattctaaagcatacaaaacaatggtaatcttctttgattagtattgagttaagcaatgttaggttcggaagttggaaaggatgatattctgaagtgctagaatagaaggtgcgaatttcgagaagccgtgatcctgttcctgaatgttggcagctttttcagtcaacaatgggatgagaaaagtcccatgccaaaatgaaaaaaattctgttgactttgccattttcttgtaaggacggaactttcaaccatatccaccccaaacaaatgctatattgttgaaattgatcacggcttaaattgtacgagaagtcaaacgtaaagcagtgaatgagctttctcagtcaatgtgttaaaatgtgtatattatttcgtaaatcaaagcaagcattgtatacagagtcacacattcattagaactgtagaatccacctcctgtctgttggaatcgaaaatataagaacacacatcaggtactcagtcggtaaagtaggctgcagcgataacggataatgataaccgctgttacgcagtaggcgctggaaaataaaaaaaaacattgtagtaaacattaaatcgtaactaaacagaaccacgtgattgttagttgaagcataataattaaacaactgaaaaaaaataatgtttaaagtgtcgaaatagtttaacgaaaactgaaaaatcagcatgctttatgtgctacaaaaagagtattgtaatcgagggattaacaaaaatcaatgcaaacatccctgcaaaacaacagtttcacgcgcctgcacgccactccgctctcccgtaaacttttgaaaacaacaaagaaaaaaccgtgtacccaaacgatatccaaatagcaacaacaagtaataacatcacactgcgaaaacgataactaatgtgttaaactacaacttgataagagaacaaaaaatacttttcattacgattccgtaagaacaactcactactcttaaaatcgaacatcattgactatttaacggatatgcaaacttgtgtacactttttgcataactcacaactacgcaaaacaaaaagtataaaacatctttaaatggcatgaaagagaagcaaactaataagaaaaaatcctatttaagagcaaatgaaaaaaaaactataaaaggatcatatttacttagcaaatgaaacagaaattaaacaaaaaaaaacaattacacaaacacacacaaaaatggattattaaacgtatatattttcgtactaaagaaacaagagcaaacgaagcatacaaagtagagatgagaatcggaacaagaaataaaaaaaccgtatggaaagtaaccagggtcaggagtgtggaacaatacaaaacagacgcgagtagcgaaatcaaacagaaatgtggagaggaaacaaaaagtcacgttagacattgcgataacaaacacacacgttacacccaatgtagagaagcgcgcgaaacagtaattaaccaccaaatagggaagctggattcggtaggcaaaatccaaaaaaaaaacggaaaagcgaatgtacagagatagagggtttttgagatttgagatcggtggtgtgtcacgagtgtcggaaatggttggaaaatgatggcaaagaaggttggtagcgtttcggagtagaagacgaagaagcgaaaaagtgtcgctaccaacgaggacgagcgagagagtgtgtgtctaaaaccgacagagtagaacctaatcgtttaatggacagaaatatggagaataagagatgaaacaaacaaccagaacctaattaaaaactgatataaaaaacctgaaggaaataaattaaattaaaaaaactaacacggttctgaaaagtaaggtgaatacgctgttgtagttgtgaaagcattgaagtctagtggaaaaactactatcgtgacaaccctggagcagtgctgatagactcacactcaaaatctc

SEQ ID NO: 1125 - DNA, 614 bp, Aedes aegypti
ccacacaaatccgtacacttggagcacaataaattcaccggcaattaggcactgattcctcccgatcgagcaagagctttaatttttcaccccgatgccggacaatgaatcactctttttccaggcgacgacggcggcggcactttttggctccggttgttgttgttgttttggccgctgtgaaatcttcttcttcccgattctccggcgactgcggacttcttctttttctgcgcccccttcgcgaaccaaccaacacaaaagagcacacaaaacttcttacgtttttttatttattcctatctccagccggagcaaaagcacacacaataattctgctgatttatttctgcgtgttagtgcacttttgcgttcacttccagactattccgacaacgagccgaggaaactccgcggcggtattttttatggatttaaatttccgacttggccgaaaaacaaaaccgggtaccgtttctccgttttcgggtttgattccgaaaaatgacacaccgattctttcccaagtaggcacactgcggttgcaaggcaacaatgaatgaaaaactaaaagattattccgagctagaggaagaaaatccgcgaactaaaca

SEQ ID NO: 1126 - DNA, 498 bp, Aedes aegypti
atgatgtttgcatcgtttccgctcgggaggaaaagcctctccacctcgaatcgggaagaaaacgagaaaaaaaaaatgcgaatcaggaagattgctgcttcccagttgggcagtcagagtgcgatcgtctctctcggcgggcaacataaattgtattttaatttaattgaaacttattttctgccacaccagaccaccgcaccgaggagcaaaattcactcggatgccacttggatcccttcgctgagtcttctctgctggtctgctggcgttgacgggaatacttcagttgcttttcaattttatgtgtcctcgagagggttaggtatgcactgggaatggcagtcttggcagcgcaacttggaatggatgacgaccgggaagcgagatgtgtttgctttaaggagcttgtgtcacgagaaatggcgacgaagtggaacaaatcgctggaaaactggtgtgtttttttggtgtttctgtcatgattgcttaaactga

SEQ ID NO: 1127 - DNA, 850 bp, Aedes aegypti
gtttgacacaaatgtaaacaaaaattcaaaatcaccggctcagccagaagcagtttttattacttttgaatcattagtaaatatttaaataattttaaaattaaacagtgaattagtttaaaaatgaccagcacaaattctccgtcaaatgttttagctgaaacccgttccttatctcagcggatgcgctctgcttacgatgtatctcgcagcaccgcaaccatcggggacgttgctgtatcgctagatgcacttcggacaaacctatcctctctgatcgtgcaagccaaaatccggatccacaaggcaagtgtcaatcaaacggctccccttacggagaagcaagccaagatgctgaacgatgccatctattcggccagttcgattctgcgaaagcaagaacagttggctagtgcacagaatcggaagcgaacggaccaccaaaaggatacgcttcaagtcagcggggaagactttcaggagcagatggccaatctgaacaaacagctgaatgccgtttcgatcgagatggcaaagctcaagcgggccaacgataacatcatgaacatttactcgaattacatgttggagaatgaggaggaatgcgattcggatgaggaggaagatgagagcgattctggggaggagaataacactatttataagcgtgattgagatgggtttctataggtaagtcagatcttaattttatcctctagatgtttaaatatatgtaacgactgattggttatatcaatatgtattagtttgcactgaattatatatcacattcatttggattaatactatcaatagttgtatgtagtatatcccttgtcatttgttcagt

SEQ ID NO: 1128 - DNA, 528 bp, Aedes aegypti
tcattattcgctacgatgaaacctgttcctcacgtgctgtttgtatttgccattggcatagtgcaaattttcggagcatgcaatttaggatttggaaagacaccaccgactggagtacagttacacatcttgcatgcccgcagtggcccagaatctgtaccgaaaaacatgtcattggtgtttgattaccaggttagcccagtggaaaacgtcaatataacgtatgtgaatgtgactacttcactgacgaatggttgtacattctcacatcctgctaatggagatattacgaaaggatttaagataaccgttagcacccacgaaccggtactagagctgagcggtactgctattgtctatggattgcgttatggtaattggtaataatttagccgtgagaaagttatttaggtgtacataatgaataaaacttaggtgaaatgaacaatcctattattatactataacagtaatacgtgaaaaaatgaataaaatatcttttgagtaattatgtctgagacaaaccaa

SEQ ID NO: 1129 - DNA, 156 bp, Aedes aegypti
atgcaatcggatgattcccacggaggtcggcggattcgcggagatttgcatcagcttgtgaagccgctgggcttcgttggattgttcctgttggccaagtatacgttctggtcctacatatggcgccgtggcagcgactcgacgaccaagagatga

SEQ ID NO: 1130 - DNA, 1238 bp, Aedes aegypti
ctgaaccatcgtttgtgttagagcaatgacatctgagcaaaaatgatcacatttgcgagcatcagaacatttgccacggcaataaaaaaggccgtcaaaaagccaaagcagcttaaccagaaggctcgcattatccaaaatttaaactatgaaaacaaggcactttttggcgccgttaacaagaaggaaacggatgaattacctcgctccaaccgacaatccacaaatgtattcggcaaagattccgaaatgtattggctagtgcatagagacaaatctattagaaagaatgatcgatgctcgagtaacgatcagcaagtgatcatcagcaagtcatcaccggagattccattcaataccaaagaactgcgttcagtgttgacgttcccgttagtgccatcgtcgaatggaactctggaacgatcatggacccgtcacgagcagtatgaaaccgatcgctacaagtcaccttcggtgaacaaaatccttactgccacaatgtcggaagcgtcgcggcagattttgctgaagtggaaagcatccaaaattgctgagttaggcgaggaaggatttgctgagtttcaaaaggcgactttggcaagaggtagtaatttccattcgtgtctggagagctggctcaaccaggaggatgttgatcgtgataagctggagagagcacgtgacttgtgggctagcatcaacggatcactggaaaggatcggtagaccagctcgagtcattgagaggaagatttaccatccgtttctacactacaatggagttgtggattgcgtatcctcgttggacaacaaactacacatcatcgaatggaagacgtcggagaaccaaaaagcttcactctcgtcaacctacgatgccccggttcagctttgtgcctatcttggagcattgaaatcggatcccgagttcagtgggctggacatagctgggggagccgtattcgtggcctatacgagtggaaatcctgcccacgttcacttgcttaatcctgagaggctacggaagtattggtccatctggttacggcgattgcaagagtattggatacggtatcgggataataccttgcctgagccgatttgagggtttttgaattatggtacctacaataaaatgtgatgcattttaaggtcgaatcggcacactcaacgtttgtgatttgttttcttcattttacataagctttgattttgcaataaaaagtagacgacaacaag

SEQ ID NO: 1131 - DNA, 1594 bp, Aedes aegypti
aaaccctttcaaagaaaaacaaacgattttgaatgaaacacgtgaacgtagttgcacccactagtgcccacgtgctcgtaatattctcagtgggttaatgtcagggagtgggtgcaagtgtaagcgaatgttttcaaaattatcattaggtgctctgtcaatccatcggttgcctagcgactatcgccaaacaattttcggctgttttcaccaagatttcgacggtgttaatcaccatggattaagccaatatcaacgcaaaaagaggtaattttgcggtacgaaaacaaaacacgatcccgcacgcataccactttgtgttatcgagaagagcgcgttcgcaagtcgctggaggtggattctgcattgctcatttggtgaaaagtgtggtgagaacgaaaacgggtgagctttaaagcttatcttgttttcaatttgacggttgaaaatggcgcctagattttggatctacggtttcaacccttttgaaatagacggcaatggagatttgcaagaattagatctcagtaaatttgtcaaagatacccagggtgagattataatcgaacttactgctactcatgctttggttgcaaccggaagttcgcttttatcatactcctgcattacggaaacatcgcacaccgtcgactgtggcagtcgaattgctcatctttcggcaaacaactggtactgtttgatccttttgaagaatggccaccttctgaagtatgatatctattcgcaacaaacgaaaaaacttgattttctgtcggttgaaaattcaccggaatctgaaagcgtggagtcaatttctcacatcgcatgtggtgataaggtatcgattgcagttactagcccagggaaatatgtattcaacattcccaacaagacgtttacttttccgaagcatgttcgcatccgaaaagtagttgtgggactggagcattgcttgctgttgaccggaaatggcgacgtgtacagttggggctgtggattacgcggtcagttgggcaacggtgcgataactccccataaggagcaaccgcagctggtagaagccctggcgggagtcaaaatcgtggatatcgcagccggcggttggcattcggcggccgtgtcctcgtttggagatctgtactgctggggatggaacagcaaagggcagttgggactgatggacgagaaacaagtcaggggaactgtgtttgcgctacctcaggtgattgaagtttcggaacaggaagacgatcagtcgcaagaaatctccatagaaaatgttcattgtgggaattgccataccgtggtgataagttccaaaggagaattgtattttgctggaaatgatcttcggaaaaagctagattatgttaacgttgagcgaaatccgaacctgagtgggtttaaaaagtttgaaagctttccgaaagtcgatggtttgaagcttttgaaaagtggagcgaattcgctcgtttttgtgagcgaatgtggtgatggcgaaatgtcgccatgaaggataaattaaactaagaagttacgctattgtacgataggtggctattgttggaaatttatgtaatgatttttactgtaa

SEQ ID NO: 1132 - DNA, 522 bp, Aedes aegypti
atgttccggcatcacatgacccagtacgggtcctgcgccagcgaggtccacaaaacgttgtgctactttttcgcggccctcaatatcttcctggcgctggacatgctcgccgacttcagctcggtttggttcgacgccctggacgaatccagcgagcagcggtaccacggtctcacgcatgtggaagcctacaaaatgctgatgggcgctttcatagccggaccagcgatcgccaacgtgtgcctggccgtcatgttgattatcggcgtttataagcgtcgccccaccctaatccgagtgttcagacttttcatcctggcgcaagtggttgtcatctgtttcatggccttgttttcttactcaattgtattggaacacagaggaagccacacgatcatgctcttcgttcttgttgtttccatcgctctgttcggtgctgaagcatggattgcaggagattaccacaagttattactggaagagatgcagttggaagagacagcctgtcttagagttgcttga

SEQ ID NO: 1133 - DNA, 1284 bp, Aedes aegypti
cgcgaagcgcatttttctgcttcgttattttgctcaacagatttcttaaatttaattttagtttttcctaaaaattgtaggtttaatagcactttttcaaatgcattaagttttgtaaaagcaataaacttgtgacgcttcaagctgaatcgccattagtgtttagccggccacaaaatggtccgtccgaagacttcccgcaatggaaattccaaacggaaccgcaccagctaccaggaagaaaaagtcaacgctaaattaagagattacgatattttggccgatagtttagtagcaaatctggaatcaattttcaatgacaaactcgaagagctgtcgctggcattcaaaatggagaagactcgtttccccaaacatgttctccagatgcggatgggcgatctccggctgataggggccagcacctttgccgatctggataaaattacgctggaaccaccggcttgcgatggcatgagttcgttgggatcgagccagctttccagcagctacaatacgggatccaagggcgagaagaaacaatcgcgcgccgatgaaggatatcttacagaggatagtgcaaccagcaacagaaactccgacctgctatcgtcagccaagggacggccctacggtcccctggcatcggccatgaaaaatagacgacgaagtaaatctgtttcatcgaattccactccctccaagcaccattcgtcggtcctgttcgggatcaaatcgaagaaaactttcggcggttctcaatcgctgttcgctgaaagtaatcgcctgtcgcgatccaaattccgaaccccggtgccgggcagcagactgaagcaaaccgtaagtgccgatcgtggtatgaccatgatcactcccaaagtacaacccaacacaccgatggccattatgcgccatgctcggctcggtgaaagcatctattccattaccggaagtccggtcatcaccgctgcgatggtggaagaaatggccaacgttaacattccgatccagaacggcatactgtcgcttcggccgaccgagatggactcgatcgatacggggttggtgcagaaaatcgattcggacactttggagcacctgaaaaagctacagatgaatctgaataagatcatgcagatggccgagggaaacaatttccagcagatgtaattttttcattcacgtttatgagctttaaaattttgaatcagtagactgttcttttttatgtattagttacttttcactcaataaatgtaattccaattgtgtcttaatgcaatc

SEQ ID NO: 1134 - DNA, 1190 bp, Aedes aegypti
actgaagatatctgtaccatcataaatcgtaccttatttgcgcaccggttcgctttggctatgataaagatgactgatcgcaatttgttttttttttattttcgctacagtcggcgattgtttgcgatttgtgaaaaataataggttgatggtatgtgtgtttgcccgaaaggctgtcgtagtttgtcgtctacaacagagatagtgaaagccctgatatgattaaattgggtacatcgtcattattcacttgatacgaactgctgctgcgaaaatggtgctgacagaggcaacttctagtaccttcaactattttgcttttggaagcaatctcttcttgaaacggattcgcatggaaagccccagtgcagtgagaaaaggaataggatatttggaggattatagactagactttttccactatgctgcacgatggcgaggcgcgcctgcgacaatcgttgaagacaaaggtcaccgagtgtggggagcaatctggcaaatcaatatagaaaaccttcctgacctggacaaacaggaaggagttcacaatcaggtttacaagcctcttactttgcctattcgtacctcatctggtgaagtgctccaatgtcgcatatatcaactcgtaaaaaatccaccaaaactagaaggtactgaaagtggtcgaccatttgagcggcagccgtcgaaaacgtatatgaatatcatcgttcgaggagcgatagaatctggactaccgtcggattacgtggaaaagttgaaaacaattaagcacaatggacactctggtgatccacactttgaaatcgatttggctgtgcaggataaattgccttaaatattgatgttattctataatatactagctaattgaacgcgaaataattgttttcgactacgcatagcgatggtcaaatgaaaaataaatctcattattacttttctaatgatttttttatatcgctttatctttaggtcagcaaaaaaaaaaccctttagtttgagaattttataaggactatgaccaaataaatttgtaaaatcctctaattttctgtagctttattttcatccttgaaatgttatagtatattgaaaatatgattcaaaattattgtaccattgtttataagaagaagaattctgcagactcctgaaaatataactcaaggagtatactgttcatattc

SEQ ID NO: 1135 - DNA, 1042 bp, Aedes aegypti
catagttgattagtggatccgagtgagtgacctagccacggtacgattgaacggctctggctaagaagaactggttttactacttatattatgtaggtaacattggcagagacttgtcgcactgctggaggtcgggtggtattcagtaacaccattcgcgctaaacccgttagaccagagtgagttatcggtgactctcaagtatggtcctgtcgtatgtgaccccttacatccggcacatcgttgtgatagggctggccgcggtcctattcgccatcctatcgcgagagccacccaaaggagctcacgacaagcaagcgacgaacttccgagaacaccaacgactattcacggaacaggaattggtcgagtacgatggccgtgagggaagcaagggactctatctggttatccttggatacgtgtacgacgtgcagaaaggcgtgaagcattacggccccggtgaggcgtacaacatgttcgtgggtcacgacgcgtccaggtcgttcatttccggtgactttgaggagtacagcccggagctgtccgacgtgtcttcgctgaccgattcggagctgaagagcatcgtcaagtggaagtcgttctacgatgagaactacacctacaaaggcaagctgattggacggtatttcgacgagcgaggagagctcaccgaataccacaaggtcgtcctgaagcgggttgcccgagctgaagcagaggaagccaagccaaggcaggagttcccgtcgtgtaacgtggaatggaagcaggaaacgggaacgaaagtgtggtgctcgtcgagaagcggggatggcgtggaacggggatgggtgggcaagcctcggagatacgccaaacaggaagacaaatctccgtactgcgtgtgtgtgccggatgggacggaatccgacgcgttagtgcctttcgaaaactgtgacgctagcagcgagagctgttatgtgaaggaggagtgagattacctgaagtatattaataaggagctgccagcgcaacaatgcaataaaagagaatgtgtgtt

SEQ ID NO: 1136 - DNA, 577 bp, Aedes aegypti
gtgctagttatgttttgtgtgcatttagataattgctagtttctttccaaaaaccaatagaattccaagcatgacgagtgggaaaccttccaaaccgaacgttagtcatccgcacagtgaaaacggtcaccagctgttcaacgagacggagaaaaacgaacagtaccgccggggcgtcaaaatgctgcaggagcggtgcaaggctatccagaagaacaacgagcggattgtgcatcgattacaccttgtcaaaaagctaactaagaaacggaaccgggaggtggacatgctcaagaatcgactcgacagatacaacgatggctggagaacagctccccaaccggtggcggtcaagctggaagaaagcaaggcttcggagtaagtcttttgcgggaaggtatattaaatataatcgtcttaagaagctaggcaataagtgagttaacagaaatagacatattcaggagttgattgattttttttttgtaattttattaaatattaatgcacttcttatgtatcacagccaatctcttaaatcgttgtgtttagggttaggcgatacttcaacattctc

SEQ ID NO: 1137 - DNA, 2283 bp, Aedes aegypti
ctgtagccggcgaagtagtagattggaacagggaagtaatagaacatcattcaaaccccagatgtaaacaaacagtaattaaacggaaaagcaaagcgtgatagctgtgacatttcaacaatcaacggaaaatttacggtgaatgttttactctttcaagttaaagttattctacactgattaatggagaaagtctaatgagtgattgaatatgagtgccgcaaaccaaactatcattgccgatatccagtccctgaccggagatgagctggctgaacaatatcggcgattggctgacgcctaccggacgttgaagcgatcccacgaagaggaactgcaagcgagctacgaactgcgacggaattaccagaccgcttccgaatcggtagcctatatgaccgccgagttggaatccatcgattccgtgcacaaggatgagctggccaaactgaaggaaaaatacgttctgacactaactggcctgaaggattcaaatgcagatctcaaacagtacaattccactttggaagccacgatcgacgatctgcaaaagcaaacgtcacaactcaaggagaaaattgaagaactagaagcaactggcgggaattccgaatctgtaactggtaattcaactctaacttcggagaaggaagcgtatctggagagggaaaacgaggaattcaaacaggtgatcaccgaattgcaagagaagaatgattcgataatgctcaaattggtcagttcggaaagcaaagttgaaagtctcagtgagaagatcgaatgcgtcgaagacaatctgagttcgaaaaagcaagagctggatgagctgaggacactgctggattcgacccaggaggagaacatgcgcttaaactctgaaattgctgctttaaggagtgcaccccaggatgctaacaagaaaggaaactcattgttcgccgaagtggacgatcagcgacagaagatgattgagatgttgcagaatcagcggaagcggtacaacgaaatgaagaaactgtacggtgaaagtcagttccagattcgacgactgactcgtgaaaacgaggagctttgcaacgagatcaaagcatgtagtgagatgttcaccaaggcggacaataccttccgagatgaaaccagtcgacagattagttctttgggaaaggatgtccaacagttgcgggatcaactggcagcgactgaaaggagactactggagaaaaccaacgacatcaattgggtggatccttttgtttcgttttaccgtaacgaaagtggcaatttgaagacagcactgttccagtctcaaatggccaagcggctcgtggacgaaatatgttgggaagctcagcgcgatttggctaaatggcgtttcgaagctctcaagtctcgctacatcataatcaatcgcgagtctcttctagaggaacatggaatcgcttacgaacctttggacgccattcaagtgggcattcacatagacgaggcaaccgttgctagagctaaaccacacgtgggtttcactcctggtgtcattgagtctacccaagaagtgtgccacgacattgatccactgggtgacttagaacaagatttgaacacgctttctttgggtgaggtgaatcagcctccagctttgcttccacctcctcagccaccagtgctactcacaaaaccaccttcaaaaccagccccggaaaaggttgaaacgattacaccacttgctacacctctggtaaccccgatacaatctcccaagtccgaacagaaagactccaaacattccctaaacgcgccattctaccgggatattgtgtacatcccgaagaatgcccccctcacggacagtctgaagaagaaacattttgccgaaatgctagaaaaaactacgaaatctgcggaagctttcaaaacaacatccgccacgaaagccagggctgacgaagagaaggaaaacgttcaacaagtccagcagcagcaatctggccaacagcaagattcctcacagtctaaggcatggggctggatttcggaaaagcggaccaagaacaacatcgtggtgagaaggttcaagttcccggaacgaaaagtgcccgtcgatggacagaaggatgcttgaaaatggaggttttgcgttaaggacgttttgaatgaggtttcagagtaaagaattatttttattcgatataattatatgtatttaagctatcgtgttattgttattgcttcgaaaagataaatacctactacattagactggccccaaaacaaaaaagttgtaaa

SEQ ID NO: 1138 - DNA, 940 bp, Aedes aegypti
ctccgtaacggttttgtatgagaaattcaacatttttgtaaggaacccattgtagagctagcaaattgttggccgactggtcgctaaaatacacaaaatacgccaaaaggataagcgaaacaaaatgagcaagcccaccaaagctaactacaggaagttcttcctccggaacgtcgaaatccctctggccaccagtaaagcacaggttatgaaagcttcccaaaccgccaacaccaaacagattcctaccgttggagcaaagcgctcatcgctgaatgacaaaccatccagtagcagcgtatcggtaacgaaaccatccggttctgccggcaacaaatataaggaaccggaattacacagcgctctcaatgtccgcaaagagatcgaaaaggttaaatccttgcacacgaaaccaccaaccagcatcggggaactaacgccgaagagtaagaaattcgtccgcgatcaggtcaccaagaagctcaacttccaacacgatgagaatgtctttaaaggattggttccggtgaatgtgaacgattcggtactgatccctaccaccaggaaacctttgaggagttcgtacgttgcgaaggaaaagcgagacccggagccggaattgggcgacttcctgcggcccattgccaagtgtaacgtgccgttggagccgtacttggcaccccaaatggccccaaggcgtcccaacttcaacaattttgaccacatactggaagtgttcgccaaagtcgatgtaggagcttgatgggttggatgtaggttacttctagtttaggttattgttaatgcttatttatatgcgctataataatgaatgttcaatgtgttataagtaattattttgtacagtagttctaaattgttcttcaacatgtttggatctatcgataattaatgaataataaacaaaatcatttcagat

SEQ ID NO: 1139 - DNA, 1383 bp, Aedes aegypti
caaacgtaaacaggcatcggacaattacaccgtccacattttttggattcctgatatcgatgtcattgctactggtccgattcaaacgctgaatgttacccaccgaatcaaagtgttgttgttttggaattcgatcgcgctcgagtttttcggagattctcgactggaaaatggttactaaacgatggcgtatcaaaaaataagaaacatattggaggacaccaaccaccgaatcgaaaaattgcacgtgccttacgaaaatgaattccggatgcaaatcaagtatcttcatgtgaaagaaaaggacatccttcgccagttcatttttgaacaagagtggaacttaggtagctcgaaagtactgtccatgttacaggaagcgggaatcgttactgcctccgaatatgtgcttcggctacgctcaagctcagcgattcaacaggtgatgaacgatctactggaggttgaacacattcttctggccgatatcattagcaacgcacacttggacacatcctactctacgaccctccgggaagttcttcacgacagtttcaattccgttctggacgaccttatcgccgaacccaatgtagtcccgtgcaactatctggaacagctgaaatcccatctacccgaaccggacctgactcggctacgtacccaacacctgcaactgcttcttgggaaggagaaacttcatgcgttatccgaggccgttggtctgcaagagcagtggagagcggaatgcgaagatcgccgaagtaccacattagggcgaataatgctggaagtggtacaagaccaggccaacgcgatcgaaacgcttttcgcctcggcaaaaacgaagagtttgtcctggaagtactatctcgccctgctgcacctggtggcagttgcaatcgagggcgataaggttgaaattgttcgcgtgaaaggcattttgaaggacctgttcaatcgagtggtagatgccggagactttgaaaccttcatgatcctgatggtgagcgctagggagatttgcatgtccaatgaaaacgttttggggaactattccggttggtataaggctacgataggtgaaatgagttaccgaatcaagaaggagcagtttgtgcatgtggtggaactaatgacaagattgatcggcctggaaaaggatccggaagtgcttaaggtgcacatcaacatctcggtgagtactcctccaaagtgtatggagttgattgtgaactacaaacaactatgcagagcccatctagctaaactgctcaatgaaaggacacgcgacaatgtgagcatggattgtgaaacgtccattgtcatcgatgatgattaaaaaccattgatagctttataagccctgtattatttaccttc

SEQ ID NO: 1140 - DNA, 546 bp, Aedes aegypti
gtccgcgttcgcgtttttctcctgtgcttttccgcgttttctgtgatttctgtcgtgaaaatattacgaaaagcagaataaaacggcccgattcccaaaggaggcagttatcgtcgagtaccacaaacgtctagtgcaccagcttccgatctggctcatccaaaggatttcctcatttatataatgaagcagcagattttgtgctccggcttccgagtttgccggtttctgggatgtgggacaagagcttcagcctgtatccatccatcccattcgaaacatcacgccaaacggaggaaacagacctattcatcgaacggaaccaataggtcgagtaccattaatcggatcataacaaatggttccgatatatgtatcgaacacatcgcattctctaggtcatggtccagccaggggactgattcggcatttcattcgtatgagtatagagcatataagtttcataattattgaatatcaaatgtgatacgttataatatgttcaaataaattatttagtgctgtgtaaaatcacaggtattgagc

SEQ ID NO: 1141 - DNA, 1595 bp, Aedes aegypti
cttcaaatgtttgcttgatttgctcgaccatagataaaaaaagtttacattttcttccgatgatcccgaaaataacggcaagaacgaactccattcatgcatcttgataaaattgtttatcgcggtagtatttcgatttttgactgctatttccgaaaattgctcagcactcccaaatctttcattgcttccactcctagacgattcacagttattcctttccaaaatcgcattccttccttcggattgtatattgacatcttgagaaggaagaccgcttccgaaattctccagttgttcaaattccgatcgtgaatggtttcgtacgggaatttttttggtttatcccacttctgatgttttagtaaaacacttcttactcttttgaacgtttatttcggaatgtcctttgtaacatgattagtcgctgtcagtgaatgtccaggcctacttgttagcagcttagtacttattaataacataactctactacagtcttcactgtcaagcttacccagcgcttcgttatttgccttgaaggattggccccaatattttttgatatgtagacgcacgctgccatcatctattttgatacatatctcgcccacccattttctttacgatataacgaacgacaacactaatataacatttcccgatctaactgtcattttaacatcctcaatccggtgctaaatgttgttcaacatattgtataaaaatctccttccgataaatgttctacttgtatgcaagcagctgtcatgcgaaaccgaacaaaatttgttgaaaataaatcatggggttattcatcgggaatacagtattagtcaacaaacttgttatcagtgttagatgcaaacaaagtcaaacatatttttacttcgattcaaagtcacagagcattgaaatgcacgatttactaataaatgtcgccaaagaggatgatgtcgttcagattgtccacctgcttattgaccacttattggaattaccaaaatctgccctcacccgatccaaactggcatccgctctgaagatagtcaacgcatcgtcggaagatctcaccgttacgcttcggttgctggacaatctcatccggcagtactgcctcggggagatcaacgaatccgaactgaagtctcacttttccaatctgagctcgtcgatgcaaaccgctctggtacactcggtggaactacggaagccggagatttgccagtttctcgttaacaaaatcaattccaaggacaatctgctgatggaatcgtttgattgggacgtaaagtggatcatggggaacagcagtttggcttcgacgagggagcagatcgctaccgtaatgttgaattgtcgagacaaggatcagaagctgaaaacggtgcgtttcgagatgaatcgggaacggttggccgatatgatcgaagtgttggaaaagtgcgatggaatggatgttgataaataaaatcagaaatagacttttttgttttatttttttaactcacttcaacttgaagattgtaggacatttctcagaaaccccttccttaggtgatatttcacagttattaaggtgattatagaacaaagcc

SEQ ID NO: 1142 - DNA, 683 bp, Aedes aegypti
cttttagattcataattttattcattcaaggccacagacgtcgaattttgtgctctaaaatcacttgcaattcattttggcttttacaataaactttgtattcgagagatctcttcgcaatggccgctacccttaaaccaaactttacctcccatctgtgcagcgttgaagtgtgcgaagtgcggtacaacattcgaattctcaaaatgaaggactcggtcttcatctacatcggtgaacacaacgcagagaactttgacgaactgtcgatggccatgctgatgccaacctcgaacgaaatgctatcgaccaccatcatgggagagccggttggggccggatcggaagaactggcccagaagttgtccaaaaagctgaagaaacaggtctacctgagtgccaacgtgcccaacgatagaatagtgcgaccaacactggaacagaagctgttcgaagagatcaacaacaatctggagtgcttctgatgtaggaaagggtgtcgtcgtgggaattgatgctgccgtcatccagaagactaagcattttctgttatattgagtatgctgtaccttcggaatccgactattttaaaggctttttacgtaaactgcctcaatgcaaatatgctgtggtagaaaaataaagaacttttgtttctgcttgaccaatgggtcgttctatat

SEQ ID NO: 1143 - DNA, 2049 bp, Aedes aegypti
atggcgtcgatggttcagccgagtgaacatctggacgaactcccaagaagcctactagatagtgtgctgtttgtggagaagatagtgctgaatcggaacagttcagcgcttgctgtgattaccgcggaccggcagttgctagaagtaaagcaacgatcgatcgtcacctgcttggatttgggtggttgtggtgttggggatataaggcaagctaaccatgaaccgccagttgtatccagtatttttggagcactgtccccaacgaaaccggacgaagaaatcgaccgcagaatagttctatcggtatttcgttcaatcgatggtgcggatagaaaggttttctatttgttggaaatggagaggaagttggtggttgtggaacggaaacaaagcccctgtctgcgatttgtacattgtcaaacttttgaagggtttattaaacttgtgataacggaacgggatgaccgtccgggatgtccagtggtaaaaatttacgtcgaacaacaattggagccgattgtaaccgacttccattcctatcggatggagtcgagtgctgatagcgtaaataacttcacctgctttcatgagattttgaaggctttgaaagaacgtgtgaatcaacgtcgggcggaattgaccgccttacaagctgtaaccggagagttgtttgaacagataaatgggcagctgaagcacgtgcctagtttgctaagaacggagaatccagatgaaagacagccactggtcaagtatggagatgtttggaccaaggtacataacggtctgctagttattggagttccggtgttcaattgcacttataaaagacgtctcacccttacaaatttgaagttgttcctcaagaacccggaccagcagaagccgttcgaatattactttaaatattatcaactgaaagacgatgacttcaacttcaaaaactgggagcaaatcttggaatccgaagacattatctcagatgttccactctttcaacaggaatggatacaaccgaagatcaatgcactgcaccccggacaaacagcaatcctgttggccactgctaagctttcccacctaaaaacaatccaattatcaaccgtcttcgaatgcttcgtaacgtacgacgtagccacaactggtcaagattcctgccccggtcttcaactgtttgtgggactggttgaagtgaaacgaaccgatttatacagcgtagatttagcagttgtcttcaatggacgagatactttcaaagatctgctcgcaataacggccacttcggagtacttggccctggaacttacattcgaaactgtaccgaaacgcggcttccatcgattttgcatcgagacactgaagtttagattgattaatcatggctgtgctgctgaggagctgcatcaagaggaacttcccaatatactctattatgacgataacggatactggcgttcgatgctgataagattagacgagctaaaaccgacgcgacaaaagatgaagatttactgcacataccctccttgcgttcattcactggacatctaaaatatgacaaatcaccggtgctacattagaattcctggagatagacatcgtttgttgatacagccacccagtgcatactttttgtaccgtaactttcggaaggtttggtatcggaataaaagattttgggaggattgagcttcatcgacacaaaacaatttgttggcaaagttgaaataatagtggaataatattagtaattcgatattggctctaagagatataagcactattaaacgcacggtctatcttaatatatttaaaaatcgatcactttgaatcggttttaaacatagaaacaaaccgatgtaaaggaatactggtcgcattaagtctacgtatatggttaataagcaccgtattattgcgcgctacttgatgtccttggccagtaatgtcgtattttgcttatcggatattctacgagtgagggtgagaaatgtcggtctcgtaaagcgagcctcgactcgccgcgcaaatcaaatggagggtcacttc

SEQ ID NO: 1144 - DNA, 960 bp, Aedes aegypti
gctgtccgacgtgagcgtgtcgatttcccgcaaccaaaacgtgtgcgttttgttgtttattttcacgcgtatcgcaacatcttagcggctttttccgcacagagatcgtagtagactgtgactgattgtgcctaaccaggacgcccacgcggtttgtgagttgagtcctttcttggatcgtgagctcatcggaagtttcgttgaatcgtggaacgttacaactgcagaagcagcagcagcacagccaatatggacgatacgatcgacgaggaagtgatctctgccggcgctacaattaccgtggagtttagcggtggcgcggagacgctgttcggaggagtcaaggaacatgtggtcccgctggacgggtccaaaattgtgctactcgaagaaatgctccggtggcttcgggacaacctcctcacaggcgatcctaacctattcctgcaggaaaataccgtacgaccgggcatcctggtcatgatcaacgacaccgactgggatctaatgggtgaaaccgactacattctgcaaccgggtgaccatatcctgttcatttccacccttcacggaggttagacgctgcccgcaggagttgggatctgtgatacaaaacaattttcggtatagaacagttgaatttgtcctttgtgtattagagcaaatggaaggaaggaggtttcctttcctgcttgttgcttggctagtgtattaacaaaaataaacaatgaaatctgagaggtttgaaggttcgacttggcgatcctcgttcatggtggatcgttctagttgcgtatgcgaaaatttttgtttgtatggacgaatgtcagaagatgaaaaaaatcaacctaattaagcacgtcagtactttttgtataaaatgaatgatgaaaaaacaatacaaaaaatgtaaaaaaagagaaacaaaacaaaaaataaactaatgcaagtgttaatcgt

SEQ ID NO: 1145 - DNA, 2206 bp, Aedes aegypti
acttataattttcggtaaatagcattttcgatcatcattgcggtacaacactgcgtctttgctaaccgcatcagtgccatctattttttcaacgtacttacgcaacaatatgtcagaatgatgtcggttagttgttttgattgaaccgcgatcagttcggttaaaaatagtggaacagaaaatcgtaaattttcgtaaaataaatccatcaaaatgtctctaaccgatgaaattgtgcgcttcaagctgtgggctactaaaatgggatgtccactggaaaagattccttccgacgattcgttaaaaaaatgcattcgcggcaagcagagtatccttttccagcagatcgtgtccggaatacttccgaagcaggagatagccacaatgcgaaacaacgtcctggcagccaaactcaagcaatatcaagccctaggcggcgtgattgcgaaatcgaaaatgttccaaatgcccgatgagctacaacgatatgagaaagtggagaggttgaaagacaaatgtgcagaaacaagaaccaggattctgagatcgaaggcaacgatggaagcgctaacggataaaatcaatgaaaaaaatatccagaaggttcaaaccaacacgaagctgggtgaaactacagataagcttgctttctacaaagcaatggataattctctgctaaaggaatccgagaaagagattgaaatcaaacatttaattgaacgatcaatgccggttagagcatcggagtcgcccaaaatcaaatctgacgccgaggaagctgttcaaacatgcttgaaatatttggaggatttttactcaaagttttctgagctaaaacaggaaggcagcaaacaagcacagcagaagctttggtctaacattagatcagcactgaaaggcattcccaatcatcttctgtggagcgtcgtaatggaaatgaaagaaagacaacttgcggaaatatcacaggccgattcgcagcaaaatgatcacgagaaggataacgctttatccgcacaggatgtgctgcagatcaacatggctaaactttgcggctctcacgtcaatttgttcattgacgtggttgcaatgaaaagagcaattcaaatgatgaaggatgactacctggcaaagtatactccattcgcgcaaatgttggaaactaaaatgaatctattgaatatgatggatgacgaagctgaagaaatgctggaagattacatgtttcagtctacatccaaggattacaatcagggacagcttgatttcctaagcaaagaaatcgagcgtaagaaacaagaaatcaaaattcaatcttccaaactggaaaatcatgaacaacttctggctcagttaagagatatttatggagaaattgatacttgctccgagcgaatacaagaggaaattcaacaactaaatcaaattaaggaaaaaatctcatatttcaaaagatatagtcgttacacggttcacaatatgcgacagaagacaacgaatctgtccataaacatgcctgatcaaacaatcaatttaacaaagcttgaaggcaacactctcacaaacattcctgcgtatgccccagcaaatctaccgccgtacagcaccgaattatcaacatttgcggaaatcccattccacaagttctacaggcacaacaaatcattcctgctctcgctcaaaacgaacatttgcctgtccgttggaaacgattccagtgcgttgatgtctttcctaccgaactgcttttcatccgccgagacttccatccaccaaatgcggtctttgatcaagttcgacgaattcattcgcacatttgtcctggacttgaaacctgaattagacacggttgtagtggacgaggcgtactatcatcagttgtggaaagccaaccatgaaaagatatgccaacatctggacgagattgaagcaattgcgaccaatacacagcaagtgattgagaagggaagagtttactacaacttcgtgctggcaaatcctttgcgaaagtacgttccacctaagaagctgttcaacgggcggaactatcgcgaatatgagaatgaatatttgatgtactatcggatgattcatgggccgattgcggggcaatgatacagtgttaagaagaatgatgaattgtcaaataaaaatgttttttgctatcacaaatatttgataaactttctttgttttccctcatttc

SEQ ID NO: 1146 - DNA, 619 bp, Aedes aegypti
gtttgtggttctgatttgtgcatcaaagatccggatctacttttttttgtatttaagtggtaaaagttttgtatttgagagaatttcaacaacccatggccttttagaaatacctcatgaggagtggatgcatatgagacggtaccaatcctatctccggaagcgatttgatgtctatgagatacctgattcaaagatttccaaaaactgtcgaccttataaagcgacatttctgttcaatcttgaaattcacgatttcctcctcaaaaacaagcaggtggagcacaagctttgcctggtgcttcttaatggtttttcattgagggtagttatcaacattgtgcgtgaaagccgtagctcaactaaatcctctctgaaatggatggtgtcctggaaaggcaaaaacggccaacgatggataacgctccagatgtcggatgaagaaatgcgttggacatctttcggggatctttgtttggagtgtccattggcatggtaacactcatttggatgtgaatacatagaaataaataatttcataaatatgaagcttgaaagttgaaaacgaataatgtgccattatgaaaaaaacaataaaaacaggaaaaatttgagctta

SEQ ID NO: 1147 - DNA, 808 bp, Aedes aegypti
aagatcagtttgaaaaacacaagttcaaaacatttgcttcgttagtgcagtttcaaattaaatcaatattttacaataatcaattcaatataaaattaattagacattagtttccatacaacaaaatgagttacgaatcagacgaagtcgacgaggatattcgcactctgatttcggaatctgtggacctagccgatgaactgttcggagtgatcgtgcaggaggagctgagcaaaacgaaaaccaccatcctgaaggagttggaatccgaagtggaaagctacgctcgacagattggccagtacactaccagattgcaacggctggaattgctcgagcagggtatgctacatcgtctgaacaactgcagtgcactggcgaaggaatttgaccagctaacggatttgtaccaggctaaagtaagccagctgagagacctattggaccacagcatcacattcgagttctccaaattgctcgccaaggatgtgttccagaagatgtacggatttaaggatgaactcgatcaactggaggaaaagctgggtgaaagcacggatctgatcaacaaggaggacaatcaggagatcgtgcaaacgttgagccacctgaagagaaaaacgtccaaaatgatgcaagatatggacaatttgctgggattgaacagtatgcacaagctgacggtgatgggattttcgaacaaaatttattacgacgatcagaagagtcaaggggcatgataaattttatatagaaatataacgatattatctataagggaaataaataatttaagattgaatagctt

SEQ ID NO: 1148 - DNA, 1892 bp, Aedes aegypti
atctcagagtatgcgagatatgtaacaattttcgatgaattattgggttaacttttgtaaaaatctgtggattgattctttaagtctttaagagctcatgtgtaaattactgtaagtgttttgaagaagttcataaaaatattattagaacaaacactgaagaagttttggtgatctaagagaaattcttgtattcttggagtagttgttggtcagcgaacaccatgacaattttggaggaatccttggatgcatttcataaataatctccagagaaattcctcaggagagaaatcatgaaaataaagtcatgtaacaaaaattaaaaaaaaagccgaaagaaaaattgctagtacctctgaaaggatctcgataagaatctcgagtatttgacgggacataaaaggaaagaatccaccactaagaaacaaaagtttaaaatattttttttttcgattggactctggctgaaattttgaaaagcctcaaaagccacaagtaggagaaaccaaatttttaagtaactaatttcgaacaaaatttgcctaagctattgtccaatcaaattactttcctctattagcaaactttttgaaaaagtaatattgaacagatggttggttcatcttgaagaaaatttattttttgtgaatgaacaggaacaaaatgttaccaaattaggaaaccaatgtttcccgacagagaacacctagaggtaagaaatgaatgtatatcatactaatgaacgttttaaaataaaaaaataaataattgagattcatcagccatacttgtagaatgtagattaacacttatccttatggtccaaaacctcaaatgaatgccgagaattcctctggggattctcaatgaatagtagaatttatgctgaaggaactggtggaagttatcttaaagaattcttggaagtaaactaaactaaaataattgcataactctatagtcgtctacaaataaggaaagcagtgtgaggatcggggttaactggccaatgatagatcgtcagtcgatggggcagcaattcaaccttcaggaatcgtccaagtagttaatggatcagttctcaaccaagaaatagaaccaactcgcgttttggatttcattttctctcctgtgaaagtaaaaaaaagggtagatgtccctagattttcatcgaaaaactataatatttattcaaaaacggtgaggtcgctcgttgcctgataaaagcctgggcacgcccatgtttgctgctgaccatcggtcaagcaattatattctgtgtgcaccatcagcaaactgattgatctcgttagtcagtctgccgttgacttcccgttcaatcacagtaagcaaaatgcacagtaagcgtacgattctagtttggacggtggccattttggctacggtaggagcgatcccagcaggctttgccgatgtatccgatcaaatttcggccacgatcgaggcggagaaaaatgtcggagtgttcactgttgggaatcaacttccgggtccaagtggcaaagtgggtcaacaactggtctacaccctcggacaacgggtcgtaggtgatcgtcttgtgtcgaccaaatcggatagcaaacagtggccaacgctgcaggacgttacgctaagcttggcctatccacagtccggcgttggagctgtcgtgacttacgtccaggtgatcgtcaaacagagcagcaatcttggcaaagggtacgtcgtgtccggaggaatcggtcagcgattcatccatttgaacatcgaagcctacagtaccaattacttcacttacactgttcaaatctttggattgtaaactgtattagcgataagcacttacctcgtaataaaatcccggattatatccggcgccaccgaacagg

SEQ ID NO: 1149 - DNA, 416 bp, Aedes aegypti
acatcagtacccaatcatttgagagtttagacagttcttcactaactaaaatgcattcattaaaattggtatcggtgtggttgatagtacttctatcagctatattggctctagcacaaggctttccacaagtagagcagcggcaaaggtttacggacggaaacgacaaactggtacttcctgaagagcagagtttggagtcgcaacgaagccattggcgatcgaaacgcacactatgtaccggaaagttcagtaaaatacttattcaaccttgtttcttccactgtcaaacgtttggaatgaagggaaagtgtagcgaagacagaaagtgcaactgtgttccattctaataaatgtaaactaatttatataagatttgtattaaataaaatttttcagataatgttagaaaggct

SEQ ID NO: 1150 - DNA, 2343 bp, Aedes aegypti
cgctgttatgtaaataagttgtatgtcaattgcagcacaaacaaaacaaggcaaaattcgaatttcgtgcgcagttcgtatcagttatcatggatgcatatttaaaattggaatggtccaagaacaaccgacgcagcgaacagcggctgctggaatatttcgccattgacttctcccaatacgaggaggacatattcaacctgcacatcaatgaaactgacacggtgcaccagttaggggacacctttatggagaacagcgatgaccacgaaacggtgctgaattatccaattgatccccggactggacgagaggtacggcagctggaaattgacacgaccaaggctgagggcttgtacgatgacttccctagcgggtcaatgctgagccaggcagatcatcagcactgtttgaaggttttgaacaggatcaacatgaggctgggattcgaaagtgcggaagactgcaaagccctgagcaagtatcacgcccttatgaagaaagtggacaacgagcggatgttgttcgagagttttgtcaaaaactatttcaacagcaacttggtatgcaggaaaagctcgatcgacaaggagctggatgacctggttgtggccatttggaaaggaaaagttggaagaatattgactgattttgcgaacaagaggtacatgctgtccacggctgttatgtggcttaactataagcagcatgagcataatgtgcgatttgaaccagtttccgaagatgtggtagaatttggagttgtgaagaacatttataccgagtctctattggcgtgtaatactttgaggcggaatcaacgcattttggatgcatttttcgaggaccagcaccgatcgcttccgatggacgatagcgtccaggtgaacacagtgctgcaacaggatgaagacatccgatttgtcattaactcgggaacgctttgctacctgctcaattgcgtaagcaacatggaagagcaatggatggttccttttcggatcgaaatgattggaggtcgtaacgtgattttcattgacaaaaaactccaaccaatcaagatgcccacacacgataggaacatgaaagcgcacaagtatttggtacgtagcttcacgtcgattgttaagaaagagaatcctcataatgttaatcgggaagctgacgagaaagattcccaacgcattaacagtattgagtataaagcaattggttttgatgagtatctgaggtcagttgccgaaaaatcagaactcaagccatacccgaatagaaattcttgtcttcagctgtggacattgcaggaaggcgacgaccagtatagatttcttatcagattccgtatggactgctacgaatccttgcgaaaaattaaattctacatcaacatttcggttaaactggaatatcaaaccgagtttggcgccgaacaaatgaccaagagtgaactcattcatgaatgggcccggcaatatctccgaccgaactcgaaaaccctccgattgcggattaacgcggttacccatgtcatcatatctcaccactatctcgagctgaaggacatagaagaagagttgaagcgctcgtacgatatcgaaccagccaatctatttacaaatctgtggcaaaccttgaaaattcttctgaatttccctcctggggatcacattttacagcacgacatgaaaaacaaagacatcgtaaatgtactatctaacgataactcccccaatccaaccagttcttccatcaatttggtggatcaatactcaaacgtcgaatacgatcgcccggccgtcgaatcgtacgattggatcccaattgataaatctgtgataactcaaatgcatcgcgaaaatacgctactcccgtgcactttcccccactggatctccgtcaagcgcatcactccccgggggaaactcaaacacagtcgaccccctcctacgcaacaacctgttcccgatcaaaaacccaaaaagaagaaatccaggggaaaccgcgttcgtcgaaagctcaaggaacgcgaagccaaaaagcagcaacggaagcaggctggctttgtcgaagaaatgcagcaatcgttgaatcaattcgctccgtacgaggggccgtcgcgaaacagcgaaccatcatccatggcagccaagaaggatccgagcaaaatgagcaatagtctgcgcgccatggagcgagatccgttcgattaccattcatacgtgaagcaagcccagaaagacgaccaataaactgaaaacgatataggtaatcttgaaatgtaattcaataatctatcacatcatttgcttgtggcttacagtattgcctattcactaagcagac

SEQ ID NO: 1151 - DNA, 1070 bp, Aedes aegypti
aatgtacgctactgatgtacattttgcaaacattatgcatcaacgccggtgatacaaaactctagtgttttttttttggttcgctataggtagaaatgaatacgctgaaatctaaaccactagtagcgccaaagatttggaagcgggatgaaattctcacatttttagatatctttgaatcaaccttccacgcttcggttgaggaacccttcgaatcagaagaggacatgtggaaatgtgtggcagataaattgttggagcagggcatatcagcctccgttcaacaatgcataaataagtggaactttttgtacaaaacatacatcagcaatcagaatcgacagggtgttttctacgcgaaggtgaagcgaattgttgaattctcacaggaactcaacgagcaacaggaatcggtggaaacggtagccgatgagcaagtagtagaatacgactcggaagcattcatcaaacaggagaagctatctcacgatgctgaaagggaagaaatagaagaccatttgaatgagcatgaagaaaaccacgatcatattgaggagatcgtcactagtcacgaagaaacgttggaagaaaatactgcattggacttacatgatgttcaacctgagtctcagtgtgatagtgtagcagaaatgacttatgctgaaacacctgcaaagaaaataaaattatcagacgatgtggataccgttactggtaattctagtcagcaatcacccaaacattttaccgaagaaaatacaaatttacgggatattcttcaaacgatactcggtaaaataaatgcaattcaagatgagcaaatccggcaagggcaccgaattgctgatatagaaaaacgtcaagacgagcataaatccatattattggatataaagaagcacattggattcaagtaattttgcattgtatcttgttttgtaattcctctttatatgaaggtttttttcaatgtatgttctagtacatcaaataaactatattgtacctgtgtctaggtgttttttgtatgaatagtattttacgcaataaaccaatgtatttaacaaaac

SEQ ID NO: 1152 - DNA, 834 bp, Aedes aegypti
atgatgcgtgctatttttcttactctatgttcatccatttgttccgggtttcctattgaacttgaaaatcgggcagatctcattttaaactacaaaaacctcaccgaatttgacgtttcttcggccacattgacggaagtcatatatctttcactgcagggaaacaacctcatcacgtttcctcgctacatttaccacaatctgccggaagtggaaaggataaagctaacggacaatccacgaatcactttcccatcggatggatctccttttttgatatcgtggagccttattgaactggaactcgaaagctgcgggatacaagagatatacaatggatcactcagctgcctgagcaagatggaggagataaacatgggaagcaatctgatcaaacaaatcgacaaaaatgccttccgggagaaccataacttgcgcaaaattgttctcagcaacaacaatttagcaacggtcccgatcaacatgttgaagggtctggagagaatgaaggaaatcgatttaagttacaacaggaaccttgctgcacgtttgaatcgcccgtttctgatgagcaatactctggaaattttgaaatgcagctactgcgggttcagagaaacgacagagattacattcgcgtacttgccaaacctcagagaactacgcctggaaggcaacctgcttctgcgggtcccggtcctcttgatgccaaacattgtagtaatcggaaaagatccggacagtgtaatgacgaattgtagaatactagcgtctcgtgtttcgaaggaccacatgatgaacgacgaatttatttgcgcacttctgtttttgtag

SEQ ID NO: 1153 - DNA, 1896 bp, Aedes aegypti
cgacaacatgaaaacataaaggaaaatcgattttccaacccacgtacagaaagagatagtatcgcaatgctttcattttgcagtgaactaatgtgattctcatcacgtacgtagatattggatttttccggatctactgttgagatcatagtgtaaatatgtaaaaatcgcagacaaatgatatcacacgaagttaactattttatagatagtgaaaaacggtttaaggaccgagaaaagcattccaaaatgaccatgaaatctagtttcgatttcgaagagcatatggagaaatacgacttggagaattcagcgatccacagaaaacttcaaagcaaagtggaagcgctgaagatcatgcgaaatgaactggaaaagtaccgatccgaaagggatcagttcaagctgatggccgaaacacttcaaatgcgatattcagccatgaaaagtagtctcaactcgccggagttccaagccgcaggctttggtcatagttccgccgttagtctattggttaatcaaactcgagaacgcaacatttctttaagtactgaagtggaagccttgcgacagcgtgttcatgaactagagggcgacatagacgtcctgcgaacaaaaaacttcgatcttcaagcagctttcaacaagatgaagtccacggaagaaacgaagctcagagatcgcaaaggtatcgtttgggacgaggaaaagtccaagctgatagcgcaaatggaaactctgaagaaaaagaatgctcaactgcagtacgatgttcgatcgttgctggacgaaaaggaggacgtagttatggaacgggacgcctacaagtgtaaagcccacaggctgaaccacgagcttagtgtgatgctcaagggtgaccaatcgcagcagaagattgtggatgttgatggactgattttggagaacaagtaccagcaggaaaagattacgaatttggaaaatgaattggaactgtcccgacagtcggccaccaagtacaagaacatgcttgacaccaaacggaaaaagggaatcatcaagcttggcactaacaacaatcagagggtcatgtctcactcacaagtgaaagatctactcgaacgcggaaccgttgaggagcttcccctcaaagctgccaccatatcggagctgaagtcactctgcctagccctactggacaacgtcaacgacaagagcttggcgttatcacaccagaagaaaaccaacaaacttttagctgcaaagattaccgaactggagcaacggatccttgctctaacgggaactaatgaaatcgcacccacatccagcctttcaccgtctcaaattctcctgaacggatacgcttcgtcaacggtcgatttggatcttagcgaagaaatcaagcagctaaagattaaaaatcattctgaactcagtagtgataacagcgcaaatggagtggggcctaatggacgtactgagggaaccagttccaatacatctcaaggcttaccaacggaactgctttcgtccgaatcgaacaagagtctcccgagctgttcggagattggtgaacatgattatggtcgtgaatcatcttcggatatgacttccaatgcagacgaaggcatcctattggaaccctacataagagcgagccgcagtggatcgacggacagcaaacttccggagctgccaccagagattgctgaacttgtgcggcaattatcgaacagtatggatgacagtgctaattgaaaacggacggatttgattgacacttcttggtggcattgagacttcattcacacagttttcgaattatgtcttgggttgcccggcgatgatggagaatcaattcttgaattgcagaagaatcgaattgtcctaagatgcttgttatctctgagagaa

SEQ ID NO: 1154 - DNA, 5585 bp, Aedes aegypti
atgttcgacgtggaaacaatcaatcgttcttcaggaaaagttcaatcaatcgttttgaaacatctgaaacaacgatcaaaactattttcaatcaaacaacaagcagaaacaattctcctgtttgtgttgaactcgcgctcatttctactagaacgatggaatgatcttctagatattattatccccgtactaccatttctgcaaacggctggcataataaaatcgcaatcgacactatcacgtgctatatttgccctactccatccggactctcaactctcagcgactgacttactccgaggaaatctacgctacctttttcaggacgacgccgatattcgtgaggaagccctaactcgagtgctgttcctcatgagcgttgcaccgaacgcacatcagtattcacctaacatagagcatatccgtgacacattgtccaatgccatttgcttgacgaaatccaagtatgacgttggcaagcacctttctacggatgtgtttgaaataagtgccgtcaagcccctgttggatacactggtgcaggaaaattccgatcctgggatcagacggagtgccctcgtccagctgaacgccatggctgaagatcccgttctttgcgagatcatccataaagctaacggatgggcgtttatattgcaggtgttggacaatgctttgcgcgagcagcacttcctcgactacccggacagtgcggtaccagcagttggtgttttgacgaagctttgctttgccattcctgagtttcggagatttttggcggacgatgtaaacgtatactatttgattgtaagatcattgttgagttttcatcatttgccaatttttaaaccggattgctgttcactcttgttcctgttgctgttcagtgaatacactttagggtgtgggaaaaccgtttcgctcccggcgatatgtaagaactacaaaattccgtttatttgcgagtaccactggaagtatagcccattcaacgagttgagctacttagaagagattttcatcgatgaagagcgggacgatcagcaatttactgcagaaaggaacaccattttacgattaagcagaccatgtggcatggaatgtgcaaccactcgaatgcaacaacaggacattaatgatttagaaagcatgaatcacaccgcggaaaacatggtctatttggagagttatcgtcaggtcgcttggcagtttttacgattatcgttcgcaagtcaatggttcgatgcatttgaaaatattatgataaatgctaaacgatctcggcaaacacttgactctggcaaagaagatggcgctcttgtggactataatgtgctgccccctcacttggtgtcacctaagcagaatgaggatgaggatggagttattgaactggatgatggctccttggaatttgatcgagtccttcacctcacaaagcaagacttgaatatgattcgaacatctcaaacagatgagatttttcgcaacagtttgaaagctatagcgacagcggtgtcccacgccgaagtgtccataggattgtcaggattagaaagtaatctaatattgccaatgagagagcaaattttacacaactcaatcgtaaagcatctaaaaaagttcattctaactccgcccaacactccagccgatgaacagctactcatcgatgtgctcagtttactgggagatttgatacaaattggatacgagaacgtattggtctggatagtgactctgttgtttgaacaaacgagcatttttattcaactgctcaaatcggaaacgtgttccgaagaactgttcatgaaaaacgtagacttcatccaaattgtcctgcaagcggctcttgcttgcgataacccaaatgtagcaagcctgcttatcaacgaagaaggttttcaaatgaaggtcaaacgggaacacaatttcaacttgttgaacagacttttggaaatcataacgaaccgtttggataatgacctacaaaagtgccacatcggaaatgtcctctcgttgatcagtttggcgagggtgatagcacttagtgaactgatcgaattcgagaacaaatttctcaaccatgtcatcaacaaactgtgttcgtacattgcgcgcatcggaatgcttacctattcgggttcaacgataataaagaattgcctgatggtcatatctttgctgttagaccaaatgagagaagttcacctgaaatcgaaacacttcaaggtgatcgcatcacagtgcagccatactagtatactgattcgatcgtgtgcctggaatgtgcttgcaaaaatgtcaaaatctttgtccggagcgcactcgataattaaggagtgtatctatctacccggtggaatgcacgcttgttgcatcaaaacgattctggatccggaagaagccagtctggttaaggaatctgctgctggattgctcataaatttactatcacacaagggggacaaagatgaacctctgcacaagtatgtaattccgtgtgacaaagtgtctagcagtgtgaaagatgtagatgccattgaaacacttttcacggtgttaagaaagcataggtttttcgagcaatctctggaatcccttcaaagcttcaccacccgtgatgaagtagaaattggagaactcgatggaattcaggtggtgacttgcgacgtagtcaaaagctacagcatgatattctcttgtttgatcgacctggcaccgggtttaaccgaacatctaatcgagaagtgctgcttgcagcgtttaatgaactgcgtttcaaatgtgcctttgcatccgggaaaatccgctctgttgatggtatcggaagtgtgcaatttgttaatgcgatgtctgacgtacaaagaggacgatatatgtgagctgatatctccctatcaggctgttattggcgggataatttatctactgaatggcgacttgtatcaaagttacgacgagcgtttacttcgccaggtcaccggtaatattatgcagcttttgaacgtactggtcgccaataagatcggtaatcaacttattaccggtgtactgtcggagttgaaactggagccacttctcagattgatcatgaaagcaatttcggaccacaaacagaaagaataccaaattgcatgcctccggtttctaacgttgctaacactgttgtcggataacacttcggtttgcgatttccaatcattcctcaatctcatggaaactaccccactccatcaagcgtcaaccacgtctacagaaaacttacctacaaaatccggaccgaagatgcgctacttgaccgataatttctgcatagacgacgacgatcgagaaaatcaggaccccaacgggttgaaaaagcgccaaacactgccaatcaaacagaacgaaaatgaaaccatgcaaacaggaagcgaatacatgttttctgcactgatggaacagtttcggattgcatgtttaaaagataaacccgaaaatggcgcactggtttccactctccaaaaaagaacactcttctccgcaattcaggtgatgctgcggcaatcggaaaaggctaggaaagtagcccgcacgagcaagtttctggaaatgcttctcgaccgcatggaagctatctacagtggaattggcatcaactatcagacttttgtaaagaagcatggagaagggcgaaaagctccaatcgtggaggagctcacgttcattgcggggattctatcggcgtggttcatccaggacattctagtacatcaggccaacatcaactatatatgtcgattgttcctgcaatattggccgtggatcagtaacaaccgtgatttggagatagcgttcatgaaagccttagtgtgccttaccgaaaattcgatcgtagtttgtaaaagtctgtgcataccgcacgcagcacatccccattccatattgaagcttacaatagccacggtaacgggtgaaacaggtaaagtaaaaggaccgaaagctgaactgacgttgcttcgcctttgcttgagagttctgatgaactgttgttcctgccatgaaggacgtgtgatgatcaccaagtttaacgtgctggacaatgtgagcaaattgcatccggttgttacaaaactgcaaaagccatggatcacggtgactaggctatggttggagttctgggaactctacagtcgacacaacgatgttagcgaagtcaaacatctcacagtgcttggagcgctcattcgtaagtcaacgccagagttacgtcgcttcgcgctggaaattatgcgtaacatgtcattcgttagcaacaatcgaccggcactgcttgcttctcaggactacatgtactcacttagagacgtcctggacggcacggatccggccgagcagttacttgtggtaagttctatatggaaaataattgctaacaatttcaaaggcaaagctgccatcaaaagcagcccactgccgaggcgattgaacgctttgctcaggcagcgatctttgttggaacgctgcgaagatgatgatctcttcaatgtgctcacggtagtggtgagcctcttaaatgcataacaattagaattaggatcgatttaaaatttattcacgcttttttgttaaaataatacaactgtacagctagatgaattctaaaaaaaaatgctttttgaacgtttgcgaaagaactatcctaagccttgagttatcctcgaattatgttgtaagcaacgaacagcatcgtcatgaaaatgttaatagtgataatggcacccttgttcgggtctacagttgtggtgctgatgcctgcacttgtgcaatcttcaatgttctcgaacagtcgaatgtaattctgtactgcatgacccagctctgcatgctgtggagagaccaatcccaacgctgaatcctcgaacagtaagttcttgacacctccaaagatgttgtacattcggaaatcgggatcattttgcaaatagatatccaaggagctaagggcgttgattataccagctgtcttggacgactgacgtcggacaactatttccccatcgacaatcgtagtaagataacattcttcatctacctggaatcctggataggctgcaagtgatccatttctgcaaagaactcgatagtcgtttggattaatgttcaaagcccgggcatgttccgccaagttttgaacctcgacgatcgctacttcaccctgcgtattaagacaattcagtgcaccacgggttccatagaacgggttattgacattggcagcacaattaatattcctttccacagtcgcgtcgatatcagccttgccctgaacctcagatggttggtcttccacttcatctggcaaagcagttgaatcttcttctccatcatcattgccactgtccctggatgccaatggtactggatcttggggtcgtactggcacattgcacaacgaacaaagcgattcaggattttcccctcgaggatcatgcaaactatcccgagaacctggagcacacgactcgctgaagaaatctcccaacagacgaccgtaatcacattcgtgctgatcaaaaatgcctcgagtttttcccacattt

SEQ ID NO: 1155 - DNA, 1424 bp, Aedes aegypti
gagcttgtttacagtcagtcagtgaaaaatttcaattaatcatagaccatcgcagcaagccatgtaaattggtgacgttcgttttcttcaataaaagtgcatcgaaacagcagtgaaagacctcggataaacgcaaatatgccaaaccaaggcaatggaggatccgcgacttcgctcgagtacaacggaagctcgacgagcgatcggaagcaatttctcgtgaacaatgagttcatgtccgatgtggtgttcctcgtaggcgagaagaaggaacgaatccatgcccacaaactttttctgattgcgagttcggagtacttttacgccatgttcaatggaaacttcaaggaatccagcgagagtgagatcgtgctggaggacattgagccaaagattttcctggagattttacgattcgtgtattgcggcaagatcgacctaaacttccagaacatccacgagatttacatccattcgaggaagtacatgttgatggagctgctgtccatggcatcgaacttcttggagaagagtattgaaccggagaatgtgctgaaaatcttcacgcaaaatcggttctacggatttcagtttgtcgacgaaaagtgcttgacattgatcagaacgaatcccttgttctatttcaatcacgaggacttttcgttgatcgatcgcgaatcgctgtgtttgatttttagctcaaagaaaatcaactgcacggacgaccaactcatgggggcgttggacatctgggaaaaaggtcacgaaacggagaaagtggatgagttgaaagcgatcatcaagaattccaaacgatcgtacgattgctacaagctacggctctttggtccatcttcgggatccgagccgaacgatttcggtttctcgatcgtttccgagacgaacgtcaacttgtacggcatcggggtgtatctcaagtccacggcaaaagtgatcacgatcgaaatgaaaatcttccagaatgacctcgagatcgggagcgatctgttcgaatacgagaatgacaactttgtgaccgtggacgtggcgaatcttttcttcgaggaaatcgttctcaagccacatcaccggtataagatcgctctgaacataacgccaacggtggagccattcaccattcaaaacccgaaggttcatcacgatcggatcaaaatgtcgatcgctaatgtcatctacggacgctgtgatagttcgtactgtgcaatcgcccacatgcactgtagggaacaaaaactctcgggcaaagccatcgggtgaatcgacgaggatcgtcggcgtgagttagttaatggttatgtaggctcctaattgtgctagatgaaattattttcgttgaaaacgattttaggctatgtaggcgtgtacttagcagcgttcaaataaatcaagattggcaaaccctc

SEQ ID NO: 1156 - DNA, 1021 bp, Aedes aegypti
tgacaaaggtgtagttattgtaaaattttcctcccagttcccatcatggttgaacagctagatagtctaattattaaaaatgaaccattctatgccgttgaagagccagaccttctcaatggcataggtaacagcaacttttcgttgggggatagtgatctacgtacgctttgcctcaatagattaggactatgtgaggaaactgtggctctattggaagcccagcaaatcgatgtcgaatgcttgaagaaaatgcgatttgaagacgtagataccttgtttgatggtcgtcctctggggccaaagattcatttgagagaagcgcttatatcatggagaatagatattggtttaccgatgaagagcttgcgaatgatttcttaccgcaagcgatccgtagatcagcttgattccagaccgataaaatatcccaacaatggtagctgtgatccgatggggaatagttctatgatggttgaaacacacaaatatcacaaaccaacatctaatatttcttataagacttttgcatggcctatgacggtggaagttttaaaggatattctgaatagttgcaatgttgggagaatgattttacattcgggagagctgggaagtttggaaaagtccttccaaagtcagctgacggcgatagtgatcgattatcatatggagtttgacacaaaaattacagccatgcagctagaaaactatcagagatgcatcacgacgttgttccctcatgaaaataagaattcgtatcacattcctcgaggacctacaagacgaaatcccggcggctcattatactcaaggttcatcaatcaaaagattagcaaaaaagcactagctatcggcagtggactggggtccccttacaacatgtgaaccttaagctaaatgctttttatttagttgcttaccgtgtaagaaataatgcatgtatgagacgtttttcaacagttaagttaacatcctttattgtattcttgaaataaatatttatttgatggaaacactc

SEQ ID NO: 1157 - DNA, 6338 bp, Aedes aegypti
tttgtttttttttggttaatttttatttccgtttgcatcatttgtactaaaagtagatgtaaacattacattttcctttgaactagcaacactgttcgtctgcaacgtctgtcaagctgtaaaagtcgcaaaagtagaggcaaattgtccaagcattgaacgttaaaatttgtgtttagtttgaacaaattgccttaagcatttcaatatttataaatcgagaattgaaccaatgtgaattgatgatcaatagattgctgcataatttccaataatgggtgagacaaacggagatgttatacaatggaaaaagttgtggcaactgatatccggaattcactacgaaacgccgaatgccgtcgtccgggaccggctcatggacgtttccaaacagctcacagatggaattctgatgtatcgaaaggctgccaacgacaaacagtccgaagaacagttgaagaaagccatgaaggaacgtaaccagcagaagctgttggcttttgccaccaaattgtatcagtatttggacatagatgcattgcagtcgtggaacattctttgcttctatcttgttaacgaatatcgtggtcccgctaatgcattggcagattatctttccaccgagagctcgatgttgactttgctgagtgacatctggtcctattacagtttggaacgaatggttttactaaaggttgtcaaaaatctgctggagttctacaattcgggaaaccatccatactcgaaggaatataaagtcataatcgataagattggcatggccaatctgcgaaaatcgtacatcaatcagctggaaactttgatcaacgaatcgatgcccgggaagctgattccgggagatatgtttaacaaccaagcaaaaatggtatcatggtccgagcggaagttacgtgaaatgaatgagattttgcacataattttgatgatcatccataacgatggaattagcgtggaagacttctgccgtttgttcaagctattcaaagggcatgcattcggcaggcagcagcagtatctagactccactaacgaaaatcatggggatttggtgaagcgaatcacattcagcgagttggcgatcatctgcgaagcgttggatctgaccgagaagccagacaaaacagattgggctgaaggtgtcatcgaggcgctggacaacgagctggtcacgctacatcagttcccagagcatggtcctctgctgttgatgtggatgctattcaacttcaggatccctagccacttggaagacgacgatgtatccagtcgataccgtcagttcggatcgagagctatccagttgggagttttcgaatatcttcatgcgttggtcactcatcgaaccttcaaagatcacagctttgtttgccgcattacacggaaggcgatttacaaccagcttgcctttctttgtcagttgttcgattccgacggatcagtagctgatcatgcgaaagttatagatctcctcagtgaactgatcagcagtccctcaatcgcagcggacttttgcaaaaacgaactcaatcccattcgatctttgttcgatacatccctagaaaaattcccagtggattttaggcccttggctacaatcgcccacgctttggcttcagccggctccaactcctacaaattcatccacgggcttctggaaagtttaccagtctatagcgaggtgtacaatccggacaactacgagctgcgttcttcgcccacgaacgaggatgaatttgttctggcccatgattatgtaccgttccggaggattgggtttaaggttccacgcgggaccagcgtagttgtgctcgataagcgatcccacacgatggtgcactttagaacgaaattcaacttttacgacgcattgcaccacgagataaatgaattgctttcggatgctttggcttatacgcagcttaatgacgagaggattcaacgaatcatggcgggtatacgctatctagctgttgctgtaaaacgtgtcaatcagccacatgaaatcagctcggaaatggtccatcctacggagatggtcttcgatatccttctcaagttcaaggttgtccaaaatcccccagtcgaactgctagcagagtgtatcaacgtttgcgctgccctcgtgccgttatttgaaccggaaatctacgcgcgggtcataaatctaaacatacttccaactgtgaacaatgccaacctggactttaaggattacgccgctggaaccagtttcgaatctagtttgattggattctacttggtgaattgcgagaaaaatgccggaaagtatcgcatactgttggcttatctgaactttttgaaaacgtacaccaagctgggtaagagtaacatttttggggtagagctgcccggattgatattccttctgcgagaagtgtttccgcatgctcacacgtggaggtttgagaacgaagcagagcgacaaaaagtgtatgtgttgatcatgcaatatctttttgagatccttcagctaagtccggaaatgttaaagaatgactatcccagaacggtacttcagaatgtttgtgtgtacagcctgctggatctggacaacggattgaccctgttaaagtttgtcggtgttggcaatggatacttgcagtcgataatggaaaacgaaacaagttggatgatggcccaagagcaaagtatgaatcaactagtgcaactgtcgatgactattttgatgcagattctacgactcaaacggacagtgattgaagatgagaaaatgttatcaccgttagaatccgctatctatacgcaaccgaagcaacgagatacgctacgcatcattccggtagtcacgggatacatgaacaatatattcaataggagacttcccatattatcctgtagattgctcagacggttttctatcgaattcaaaatgtctttgctcgcatgtttggatatcgaaccggatcaaattcggttgatctttctgcaacgtttaagagatgatctggaaagtgataacctcaagatagcagtattggagttcgtggaagcgtgcattcacaagcaaccaggattgacggaagctttcttcaaagtccattatgataacgttgagcaaaggctatttcttggtgtgaaaccgggaaagaaaaagaacatcagtgatggcataccgacttatatggaagaatatctggaagcaatttccagtgacccgaagaagctggcaagtccgcttttgtcccgaatcatgtcattgtttcatgctctttggaagaacaacatgcaggtgttatgcaaagaactgctggaaaagaaaactttctggccaagtttgtgtaatcctttgtttgggaacatcagcgaaaatgttaaagcctacagtcagctattcaacatactaggaatagagctgttcaaaatcgatagcccacgtaaggttgatgagaatctgaagaaagtatacgaaaaatttctcgattatgacgtgttttcccgttgggttcgagctgttttcgatctaccgaaatccagtggagaaatatgcgatgatagttcctctttcgcatcgccagtaaccgatgagactcccgaatggctcagtcgtttacagtccttcaaagatttgatagttctgctgctaaggaaaaaagataccggtatcgtccttccggaccgcagcaaacgattcctagccgatcagtgtctaaacgttttgctagatcgtgcagagtatgcagaagatctccgcccgttcgttattcttgcagaactatatcttatagttctctcagactacgaacacaagtataccgataacactgagcaggacaacgaagttttgcagaagattcaaaatctgctcaacgctcttgccattaactataatgaacttcatggacgagcaaaggagtctgttctggcgattgccataaaggcagtagaattacaagccgatcagctaattgaacactcgtcagtcatctcgagcgttacccgatccgctgtcgaagtcgtctgccaagaagttcataacctagaagtgtcgacaaaggccgagataaaagctccaaatgctaagatcgcaactcgtggacacataccgctactgttggctctaaacttgctaaagaaactcattctcatttatgaagaaaacggaagctccgcagccaagtggcaatgttggttcattagaaataaagtgttcctgcgattgctcagcgtaacgaacgtaatgtcacagatgcactccaaacgcaagatcaccgaagaagtcttggaacttttagttgtgctggctaaaagtggatgctcgggcgagatgctacactgtgaaattggagattatctgtggttgaaactcttaccaccgaaggagctgctacaaaggccgtacacgatgtctaatgaagccgaaaacaagtggaaatcacaagattggtggccgatttacaccctaggtattgagttggtgcgggtactgttggcgcaacacaaataccgcttcctaaaggatgctttgttcttcgccggcatacacgaggaattcctcatcgattctttgctgttggccaagcaatcaatggagaccaaagcggtggcgttaattaaaggtaccctagagttgctggtagagctggtcaactacgaaaaggagtggagattggaacacggtcagagcttaatcaatttgatgagatgcgttcaagttctaatggatcatagtgttgcgttgctgtatcgtcccaaaattctcaaaagattagctgaaggcccatcggcagagctgtgtaacgaacaggacgaccccaatgccgttgatacctccgataagctggtcactgccatgaacaacgtaatcgagattgtcacactgtgtgccaagtgcctcttgcgattcagtccaaatttgttgaatctactttgtgacgttgatttcttccctgggcagtggtacccgttgatcgagattcagtttggagttccgaaaatgaattcggataactattcacagctcagctttggaactgtattaagagccgtgtgcatattcaccaaagttttaaatgtgcaacattatacgttccaagagcacccactcaatcaactgccagccggagaaactgattttgtggatggcacgtcaacgttgtctaacgcatcgttagctcgtctcaacaaatctgccataggtggcagtaatggtacaactcggcagtcgagccctcgtacaccattctccaagtcgctttctatgacatccgtctccagtttcacctcgacaaatgctattgccctctccaacgagcttcttacacatttggattcaaaactctgcatcagtggcttagaatttgtgcttaccttactcgcttcacaaagtttgcttgctttaaaagatactaacctatcgcaacgagagaaacaacttatcaaacgggagcttagcactgaattgctgattttccatgatttcgtaaagaagcgcatcctaaaggattcaaaggaaatccttactcgtaaaaagtatggatccgtacccatctacaatgatgatgaaaatgaaaccgacgataaaagcaacaccgagatcaccgtaaaatcggcgccgccaactgtcgtgccaaagaaaccggaccgcagtcattcgatgcgagtgaacgtggttttgaagcagcatttacaacaggcagcttcaacgccgctcagtccgattgctcactcttcgacgcggatggacccggctttgcataaaccgtcctcgtctactcctgcaaccgcaccgcgaggcatcttaaaaccacccaatgcaggatcggtcaaacgagtgatgtttgacgagggcttagagcatactaaaacttttgcctatgcaggcccagaagacgagcccatcttctatgaaccggaagattgcaagtacacgggattgtcgtacgtgaggatagtcgaggaggattacctacacctgttatcgaacctgttctcgatgatagctcaaagtgaaaattagttattttttgacaatgcaacaatgtttaaataatcatcaaaagggttaataaatttcttaatttgccaaatcggtatagtttattttatgtgaaagacaaaacggtattagccaatggtcacagattatattgcataggccaacatttgcgaaattgtttatcataaatcgatatcattcaaagttgtcacgttccaagatccgactctcaaatcgttgtcctttatacattgccccggatctgttgccataaaataaattcgtttggtggacctcgaccttttcctcaataggccctaaccagggttgcgctacctac

SEQ ID NO: 1158 - DNA, 1460 bp, Aedes aegypti
acttctcctatcgcaatgcgatcggtttaggcatttgttttcattcctacagccagtgtcatcaacctgttagtgctcaatttgataaaggcatatcatttccgatagttttttaacattttataatcggaattgcactactgttcattgttgcatcacatgtgaaagttacttcgactcgtcaataaaagaatttcacaaacgaaaaagatggctacggaacgggcaccactgctggaagataagagctattttcggcgattttgcgattacatgagccacgataccaaaggagtcgagattgcgacttacacggtatctggaatcctattcgtcgtagcgtataacaaaataagaccaattacgcgcttcagcaaagcatcggacatcccgaagcacttcgttcgagagcaaattccacagtacggtcgtgtgaccaagatcgaaccctcgatccagtccggccctctgctaatcgtgaaacatcgcccgccgctaaacatcgttttctggtccaacaaaacgctcccggtcaagattgccggggtggacctcaacgccaacggttattcgtggctgcaaacggttgtcctcaatcggcaggttacttttattccggtgaaaaccgataccggtaaagattatgccgaatgttgcgtgtacttcaacgagctgtcttcggacaaaaagtggctcaggaaggtcgatctaggccaggcgctgcttcagctgggatttgccaaattgagtacaccagtgccacgggtcaagttgaccagcaaggatccctttgagaaacaagtgcacgcgtacttccagaagttggcctacagcgagagtaaggccaaagatcgacgcattggactgtggcaacataccctaccaccgaaaatgctgcccgcgagattgtggcaatctatgtgggacaacttggctcaacgactatcaccacagtcacaccgtgttccggagctggtacgataaataagcatgatattacgtgcaatcatcaaaagtcatgcagacatcagtcctccgccaaacaagcgcaacaaatcatccgagaacgccacatttgctcggtcattttcttttatcgtaaaatgacaacttgttaccgatttgaaagtattttttttctgttatactataaagtgcctgaacggagagctcacgcgtgtttgtggggcacaatcaaaacttggaggcgtgtcaaatgggcgccgccattgtccgaataagtagtagattatcgttgagacgtcaactgatggaagtttaattgatggcgatagcaatgaatgaaaatatctttgttgtttttagtcttctatattgatttagtttgtttttaagatgaataaagtttaaaacagtttaagagaattgattctcgcctagaagcgggttttaaaaatttcggataaaacgcaagtataaataagctgatggaaaaaata

SEQ ID NO: 1159 - DNA, 795 bp, Aedes aegypti
atgacagtcgtgtcagtcccctgcatcaagcatctcgcgatctcgcgttggtgttttgagtgggtgccacccactgggtggacaagacttgtacttagtacgcgaatttctcgtaccgtagatctgaagagaaagcgcttgaatatcttatcgactaagatcgtctaatggtgtattccggtgccagaaataaaacaatttgattattgattcgtcataacaataactgccattcaaaatgtccaagccgtgtgcgattcaaaaacagattgagaactctaacgagataatagccgaccttcgcgagcggatacgaaagatggaacggcgcctgacagatccccagatgccggaggaacgccgcaaagagatcgaaaccgaaataacggagatcaagaaaatgttggaaacaaacgaggaaatgctgcacaaactgcatcgagaaaactccaaatcttttgccgttgcggcttgcctgttttttgtctgttttctagtttacggaatttatgtattaattgtaggatcgtagcattgaacgaatatattactagagatttaattgtgaaactcaaacatggattcttttagcaattcgttaaggggaactttcaagaatttctctacatgtttcttcaggattttctctacagattctatctgaataccttctgaaatgtctctagaagtgcatccatttttttccggtcattcatcctcaaatatctgcaagctttcctccatgagtttccaagagccttcatagatccaaaaaattctgtacgaattcatata

SEQ ID NO: 1160 - DNA, 1132 bp, Aedes aegypti
ttttgttttcatttttgctgttcaaaaaactcggctcggcagttgatggccaacaaaaccgtggaaagcgtgaaaagtaaacgatttcgtatgcatcgacgtgtgccagaatttctagtgtgattagtttatgtgaacagccgaaatgggtgataaacatgtaccaacgttggacatcgagataaagctagatgttaacaccgaagaatccagctcgaaagcgttgcaaacaatcatacaggtgctgttgttccagcggagccaaatcccattttgctacgaagtgttccaagccatagtgaaaaaattgaagaaagaattggccgaaattgattcatccaaatggaaaaactatcaattgacaaaacagcgcgaaattgccttcaatttgctgtgtgatatacaaacccttttcagagaagtaacggaaattgcaaaacgtagtgatcacgatattcgcgccatggtcttgttcggatcgactctctacacggcaaaggaagcattcatcatcaaaattcccaaggcgaaccggaaacactatccccagcatcaccgccagcgattggaatccgccttgaaactcctaacgaggcaactgatactgtcggaagaactacgtccttcggggcgtttcgtggggcccaccaacacattcatgctgctgggaatgtcttccacgtgggacccggagaaaatctcgcggaccgtcgagtacagatcaataaatggctaccagttgccgattagctgccagaagtatgtgattaacgtaaccgtccagggggccagtgaggatgaattggcctgctgtaggcaaatggatgtgttcagcgatgcactgcaagtgctaacgatcgacgatgacgctaaggaagtccctacgaaaccccatggtcgtcgcaacgaattggtcaaaaacgatattatgtggtaccaagtgggaaggagtttgaaaggatttaatgatgtgctcattaaagggaaatctatctgggatggagaattgtgaagtgttgcgtccgtagggcgctaatgaactgacagtgttgctgagggcggcaacaaaaaatagaatctaaaaatgcgctttaagaaaataaattcaaattatgcttctaatgtaacattc

SEQ ID NO: 1161 - DNA, 1298 bp, Aedes aegypti
gactctggtgcagacttccagtggtttaattcgttcccatctgaaattgtgaaacaagtaactgtttttgtatttattgtgagaatggctattaatctaaacctaaagtcagctgacgtgaaagcaagtctcgaagatcctgccaaattgcactacattccagctacaatccgtggcgatggcccagccaaagtggaacagtattttgagtcgtacacagacgaattggaggacaaaactctcgtgaatgctcttcgtggattcccgctacgagggaaacgattcaccttacctgcggcctatagtggcgttatatttcaggaaactaaaaaaccactgtcagcggacgaggaacggaatttaagcttcgctggtgccttcaaggagtttacctattggaattacgataagataccctcgaagaacgatgcgtttgaaaaggcccttgattggatggaactgtctgacgctttgcatgaaccattggatgaccaagaagataccaaatcggatgtaaaacaagagaaataaactttgttggttgtttgtaataaagtttttattacttccattgtatgtcacgtaagggttgaaaatctacaataactttgtggaagtttcagaaaatctttcctaatcaagaaaggctcatctactgtaacgtaattattaaaagtatatatcttaaagctattttgtttctttttacgccgcactctttggaggttgccggtagactcccacaacgactgcgtggtcacgttcgtatggttccagtgtgatttgctcctgaggtttcaacttttctgattgtagttttttgacttctgccgcgaacaccgcttccggaacggctgtcgaatcgatacaggaagccttgatcgaaatgacgaaatggcctccgtttttcaggaactggtgagcattcaacgcgacgatacgggcctgatcgggctgggcaacgtcggcgaaaatggtgtcaaccaggccgaccaacattcggtacttatggggatgacgagcgtcttcaatgatggggataatgttggtccgcttcttggcgacatttatcaaatcacgtcccgatcggtgtgagaattctacggcatagaccagtccctccggcccgacaacgtccgatacatgcgaaaccgtagttcccgaggcggcgcccaggtagagaaccttcgagcctggtggcatgtgaattttgtcgactcctccgaggacggcagcagccagcttcgaccggaagggattccaaactcggtattcattcttttcgccgttagtctgca

SEQ ID NO: 1162 - DNA, 334 bp, Aedes aegypti
catcagtcgagattaggtgattgaagtaaacgcatccactagaggaaacagcaccatgaaattgacaattttcttcactctgattatgctactgcttggagtagcctttgcatttccacctgagggtactatccccgcagcagagaccaaggccgcagagattcaggatgttgcggtagataccgctaaccacaagtcgtctgaagattctaattcttctgaggatgagcacaaaaactgccacaagccgaatgcatgaagtcattacagattgagctcatgaataaaattttgttgattttctaaccaataaccattacagtgattcaaaaaa

SEQ ID NO: 1163 - DNA, 582 bp, Aedes aegypti
caaaaaaatatcatctgccagtttgcttttgcgaaactgaaatctaaaattttacttgtatctgagtaacttcaacaacatagcttatcagaaacgaaggaaatttaagttgaaaggatacaatcttgttctagtcatgtcagattccgatgggaagaccactccagtcaaaattaaagaagagctggatgatgatgagcctaaactaatgagtttagaaaaactagatagaggatcaccagaaatttggccagcaaaaggcccatctatgaatgagttcaacacaccaaatttgaatttctccccaccggcatggacaaaaggcttaacccaggacgatatcaattcgatgtatcaattgggtgctttatcgtccaacggaataatcgccgaagtgaagaaattgtacgaccaggcttatcagttgggtgtccaagaagctaaagaaatgactcggggtaaatatttgaacatctttaccagcagtcgtaagaaatcgtaacacaatcgatagcttctaattttaaagatttgttttatgtaacgtagcaataaaacgctggagacatttttataatccgt

SEQ ID NO: 1164 - DNA, 1833 bp, Aedes aegypti
atgggtgtgcgtcatttggatacgttaattcgcaaaaaggtcgaaaacgggtgcttcaaagtgaacattgaacatgaaattcgggaatactaccgtaaagcttcgacgacagttggggaggtttctccaccaccaccgcccgtgttagtcatcgatgtgtttgctttgagtggtgagctagactcgatagatttcaattcgcttatctacggtgcgcgcttcaatgttggattctggattattgatcgattcttgcggaaattgaaatcgcttggagtctcgttggagtttttcatggatggtagtgtgcaagacttcaagatacgaacttggtgcgagcgtaaagacagggattaccaagacgcaatcgcaataataaatgccgttgatgaaggtgtagatattgagacaatacttacgaccgtgggagcgccaggatgtggctacgccctggaatatctcgccgaaatgcatggtagattgacggtgtccttggaaagggaatgcgaccaagaattggctgcattcgcaagcaaagtcaacgcttttgcgatcatctccaatgactcggatttcctcatctacgaagggaactggaggtattggtcgtcgagagatctcgatatcgacaccttggaaacgctagaatacaatcgccatgctttgttacagtatttgggattgaccttcgcccaaatgcccttgtttgccactctctgtggaaacgacattgtgaagcttgaagaactaaaacgctttcatttcagtctaggtcaatactgtcacaaaatgaccaatgtcgctaaatttgtccaaccacaagacccgaataatttacagaatattctagaaaaagtttttggacctcacaaccgttccgggaaggatcgcttctggatgagtttgcaattttacaaaacggactttgtaaccagttccaatgacgacccagtagaagaaattctcctgaagcacccgaacccattcgtgtaccaactttggcacaaacagccgcacgtcgtttcgttaggactagttgacatgcgcagtaccgaattgggaaaacaagtaccctcactagtcctccgcatactgctgcgcaccgctgggatcatcgtgttgagccgtcagaagggacggaagatctacatccagacattcgtcatcaaattaacccacgaatccaaccaccggatacaacgtttcccggtgcagttcccaagtttcactgatcctccaactctcatggaactcttctctacggatccattcgtcatggcgaacctcgagaatacgaagctactcctactcagctggatcgtgtcagatcggttggactatcgacgactcagaccgatattgagacccctgctgcctaccgttgtcaccctgtaccacttggtggaaaatcggatcctgcagttgttcgaagccgatctgttgcttcaggtggcatacgatgtggtcacggagacgtatgatcccaaatcattggagttcccaaccacggtagaaagccgcccgtttaggttggcgttcatctttagaatcatgtaccgtttcgttgccattgcaatgaattccattggtttgaacttacggggctttcgggaggaccctccattcgacggagtactttttcatacgaaataccggacgtgggacaagtcggaagcagatttggggaaaatcgcgcaatggcggatttatacaacaatttctcaatgaaaaaagtaatgcttttgatttcaacaccgatgtttcttacatttttatcgatttaataaaattgacgcttgttttctcaagcgcaatatgttttatttcttgagc

SEQ ID NO: 1165 - DNA, 1057 bp, Aedes aegypti
tcggagtcgggtgtaaacaagacgacatcagtgcgtggaaattgcgaaattccgtgatatcctggaaccaaaaatccccatccggtaacgaatggatcatcctcggccgtgcggttgtaaaggccgccgaacttgtctcagctgtgagaaggatttcgaaatagaacgagtggatttccttaaaatattcaagagcagcaaagcctattcctactgtccgcggtgccataagatttacccaggatgggacactgccaaggtaatggccgaacatgatcgcaatcatgggggtgatgctggggaagactaccccggagtgtacatagatctggactttttgtccgagtcggaggaagccgaactgatgaagggcattgacgagatgccctgggacatgtcgcagagcggtagacggaagcagaactttggccccaagaccaatttcaagaagaccaagattaaggtgggaaatttcgaagggttcccaaagttttcggaattcgttcagcgcaagttcgatcaagttccgctgatgaaggggttccaatcgatagaacagtgctcgctggagtacaacccggaaaaaggtgcttccatcgatccccatattgacgattgctggatctggggcgagcggatcgttacggtgaacttcctcagcgattcagtgctgaccatgtcccgatatcgcaaagaagatggcaagaatcgatacaatttggattttgttgatcgatacaaggataaactgattggcgagctagtggacgaggaaacgatggacaagttcgatgatcgaatagttaggattccaatgccaaggcgctcgcttttgattctctatggacccccaagataccagtgggaacattcggtattacgagaagatatcaccgaacgtagggtgtgcttggcgtatcgggaattcacgcccatgtacctggaggatggcaatgaatacagcaaaagtgaagaaatttttcgattagcgaaaaacttttggaaccatttagaagttatcactagcagttgaagtatttgaataaagcatgttatg

SEQ ID NO: 1166 - DNA, 989 bp, Aedes aegypti
atcgaagaaagttttgaaaacaaaccgtcccatctaaaatcgttaaaaagttccattaaaaattccagttatttcagtgcaaagaaacataattacgccatggaggacgacctgaaccagctttccgacagaatcattgacaatttggaaaaattcaatcgcatactcaaatccgctggcttagaatccaaactgctcagcaatccggatcttcctgaccgtttactgaaactaacccaacaagagtggacacccggctcggatacccgttccgcagacccatcggatcgcctagctgccgaagacatagattccattttcagcaaaattcgacatcgtccggtgcccggcagtggatcatcccgaggcgttaaccgagccccctcacaaaagaaagccattccgctgcaacagtcccggattctgaacgaaaccaatctggccggcagcccttccggatccctgaccgatttgagcgacagtggtggcagcaataaacaagttcgaacgatcgacgtggaagctctggtcaaaagcttgaagcaatcccttcaggccataggacagatcgagaatcggccactggaagcgatcgatttcgagcgggtcgagcggtacaaccggagggagtgcatcaaagtgcgggatgccatccgagatgtggaactgatggtgcaggatctggaacggtacgtggccagtgtgcggagtggtgacgaagatcggagcgaactcgttggtgagactttggtgtctcggttgagggatttgtcggagaccatgtcccaagtgatatttatcaagaacaacgaatacattccggatatgagcaaatggactgccatcggttcgtttccactggctgagtgcttggacgatgtgaatgaaaacattcgacggaagaagctctatcaatgaagaaagttcacgaaatataaattaaatcagcctataaatcaagtttaataaaatttgattaggtagttttt

SEQ ID NO: 1167 - DNA, 1421 bp, Aedes aegypti
atggctattttcagatcattagcgaggaataaatctttattcctttacgtgcagcgctatcttagcacatcttcccggagtaagcttccggcggctgcagttacattagaccagtctacggatcaggccctcgacgccggtagattcaaaccaagacagcacgaaggtcgactaacgagcggatgcatcaacgtgccggaatccattgtcaatgccattttacgttgctgcaaagaccatccgattaaggcactgctgtccgaaggaaacaaactggacaattttttgcgatctcgtaaggttccgctggaaaatgacgagcttaggcgaaaaattaatgatctgcggcactcggtgggcgatgagttcaaagccaagatggatgttactacaatgtcagaagagcaggtgacctacatcaacaaggtgattgaggcgcaggccaagaaacgtgccaaacagcagatctacgcatggaaaccgatcaactatgacgagtttaaaagcttacagtaccttctgggacggtcagcggcagagtacgcgaccttgattcgggtttttgatgaaatcaagcaacgcgatgcccagttcaaaccgagaagttttatcgacttcggttccggtgttgggaccggtacgtgggcggtgtccaacctatggaaggagcacatcttcgagtatgtgtccattgatgcttcggcagatatgaatgacctggcggagttgattcttcggggtggagaaatgaataaggctatgagtttgaggaacgtattctacaggcagttcctgcccgcctcccacaataagtacgacatcgtgttgagttcattctcgttgtttgaactgccatcgaaaaagaaccgtttagacgtgatagagaacctgtggaacaaatgcgatggctacttggtactggtggaacaagtgtccccaccatcagcaatgtccccggatgaagctggatgacggcacgccgtgcaatttcgaggtaacatacaatccgttaccgctggggaaatcaagcgaggctagcaagttcctgtactcctatgttgtatttaaaaagggcaccccaactgcccaaagtcgacatcctcgtttggtgaggccaacgctcgtccgttcgaagcattcgatttgtcggatgtgtactgatggtggaaaactgcaggaaataatcttcaccgcttcgaagcacggcaagaacctatatcgatgtgccagggccagtaaatggggtgatcaactaccgatcaaaatagacaacctagaatagttatacaatggaatgagttttatgtaggatacaaaagagatagatgtgaattataccttgttttaagatagtaacgaataacttctttgtgatcacagctatagttttcagaccacaatataaatttagattagcacag

SEQ ID NO: 1168 - DNA, 1960 bp, Aedes aegypti
gctgttttcagtgtagccaaaaacattgtacgtaatgaaatacgttcacacgaaaaattactcctgaaccactgacatcagctttgtttacgcaaatttgggccattcatcatcaatcaatgatccattcataaaaaaaattgtaggtcgagtaaataaaactcaaattagatttaggaaataacttggaatataggtattaaattaaaaatgcctacaacgaataaggctggtccggtgtccgatgacgatgatgatttcttcaaaccaacctccaattccactttagcaaaaatctttggtgttccgaagggtggcgcagctgtgaacaaaaagtcctcaccggaaaaagactccaggtcgatacagtccacgcccagcagtaaggtatccgatcgctacggggcttcttcctttcgttacgtcccaccatcggaagcagtcgattccactacggatggggaacaacccgggagtaagccgtcgtcggattggaacctagtgcaagccagtgtggtaactgcctacaagcttgtcgggaacgagaacaccccgcaagggaagctaggattggcattgctccgttcgcaagctgaattccggattctgatctatcggaccaaaaccgatgcccttgctacccttaatttagacgctgcaacaaaactgtttttgaaaaatgaatatctccaatttcgaagtgacgacgacgacttttggagcgtcttgtttgaaaatccagttgatcgtgatcgtttacttgcggccattgaaggcgtatgtctattagaattagaacgccaaccccacaagcaacgtgttcctccgattccggcatccagaaccattcccaatgtggaggagccggattctgatgcggaaaaaggcaaagcaaatctcatctcacggatggctcgagttggccaaccgattcttccgcaagccaagcccgtatcaactacggaagtgagcgattcttccgatacggatgcacgctttgagacaatagctcgtcctagcattcctccccatcgacggccaggtaatggaggcgttggcaaaatacagcccgtaacgatgggcatgcagataattccctcagcagcgaatgccctcacaaccgccatagctggacaaaatttgctccacactgcgaccgatgttaacttcaatctattcatgacggaaagcagaatgcaaggcaccgaagtgcgaatgaatttgtcgaaattggagtccaagctggatcgtgtcttggacaaaatcgatttgatgaatttgaacagcactggtgaagcaaaatcgaacaccgataaagatgatgatatattggctttggaagagaaaattttagagctgaagaaggacaatcatgcattgaaaggaaaggttcgctctttggaagcagaagttagtacccgaaatgaagatgtgcacctgaagcaacaattggccgaatcggaaaaacgttactcagatctccagttaacagtagcagccattcagaaagatttaacatctagtcgtgataaaagcgaagtagatctcagagaaatggaacgaattagactagagcaagatgcaaccaaacaatcattgcatgaaaaagccaaagaaattgaactgctgactgaacaactaaaagatgctcacaatagtcaatcgtcactgagagaggagaattccaaactggtaaaacaaaatgaggatttgcaaagcactttaaataatatggaacaacagctgaaaagtttaaacgaaaaggtaactggatctgagccggtggatgagctgatcaaaaccattatgaacaactgtttccaacgaatgtgcgaccagattgacgatgccagaactttgaagattgtagggcaaacgatcaaacatgaaaccaaagctgctttggcgcggcggcagaaaaaataaattgaggaaaaatgttagcttgttacgataggta

SEQ ID NO: 1169 - DNA, 1327 bp, Aedes aegypti
atgacatcccatgcagaagaaactgccatcaacgcattagagagaagtttcattcccaaccacatagaaattgcggctcatgtttacaacaatgcatcagaaaaagtgctagaagtgctttgcagccaagctcagatgtatggtatcgtgcgactgattccatctgttggatttgtacaccacacatatttcgagtatttctccactttatactttctgacgtataaaaccaatgcaagcaaagaattcttttccttcatgaaacaaaacttatgtccgtctcgcctaagtattgccaccaaattcttggatcaccacatcggtggaatcaacccaaatgaagagctacaaacgttaaggattgtaaaaggagaaaaagatgcagaaaatgaagaaatagtcgagtttgttgaaatgactaaagatttcgaaccaccatcaacagcacgactccatccagagaagttacgagagtttaattactatctaggaaagctctcgcctgcggatcgatacactctcattcgtaattcgttgaatcagtcggtatttaatgttcttgaagttctgtacgacagtctgccacgcgatacaaaatgttcgttgaaattctgctttggcaatagagctcagaagaatttcgtaaaccttaaaacactcggaggaaatcagacactacaactgctgggcattcttctgaagaagaaccccaataactttgttcgcaaatatctgatagatttcagcgatggggacaaagattatttcgagatgacctgtcggaaaccgttcgttcaagtattgaattggttggtcgacgatcttatcgctacaattgacgatcaagaacgggaagctctattcagttacatcaatcatcgtttcgacaagtactttcaacttgttgtgcaacacaacaataccgatttttttgaagaagcgattaaaagaacgaaagctttgtggcctatggacaccgtcaataagttccttatggatcgagatgtgatgaatttgttcctgaaaaatgttgagctcaatcctgacacgaaatcacttctagtcgaagaacggatcaagatgatagcccatttgtacgatcttttcaaatgggctggttgtggaaacgtgatacttagtgaaagttgcaccgcagctatcgatgttttaaaaaatgaagccatacagagtgcctttaggaaacaattccagaaccagtgaagcaattaaatgtttaatttgatgaaatgttttagaaatatataaaaatcatttatatttataccttatatttgttatatttttatattatatttttataataaat

SEQ ID NO: 1170 - DNA, 696 bp, Aedes aegypti
aagaaatcaagtcgcatcgtcatgggtagtgagattatattcattctagcagtaacggcaatgttcggaattgttcaagcagctccaccggatggtaccacaatagcacttctcaattatagagaaaaatgcataaatgtaagcggttcggatgaaggattttatcaactgtttggatcgatcaaatatgctcaagcatgtttgctggatcacatggaggaggcttaccaacagggtgtaccagagatagatgaatattatgaaacgaagaaagattttttcgccaattttcgcccgaagctcaatgcagcagtagactgttttaatgacgtctttgaaggggcagccaagtgctcgactgaagcttacgataagttggtgccaatcttgaagaacgttatgtatggccttgttgagcttatttgccaaaacgggggtgaactattctacgatattcaaactcctgagtttcgtacctgttttaagctgataaaaaagaatgctttccagtgcaggacttccgaagccatcagaacaataacatattctgcattcagtttggagcaatgtcgagaggtgacagactcgcgtaactgtttcaaaggaatatgcaacgtatcagcggtacacgacttaatagacaacgtatacgatacgttgctagatgcaaccaaatgtcaaaaagaaatatattaa

SEQ ID NO: 1171 - DNA, 1070 bp, Aedes aegypti
gctctttgtttatttcccattctcaacaaaaacacaaatcaagcgattcattagtttcattgagtaaatttaaaccccttttattcgatgaaaaaatccaccgatccggatggcaaagccagtggcaaatccaccgccaaggacaaatctctacgtagcagaaacaaacggaagtacaagcgcaagaagagcgccaagcatcacacgaagcgtgccttcgagcacagtttgcgggaacacggttcccataaagctgctccggaatcggacggattcgtgcaccatcgacgaaggcgagtagaggcgaggccggtcggtgtcggaccaagttgtccccagatcaagcacgcccagaatgtgtggatgaaaacgtaccagaatatcgtcaagtggcagtaccagcatcagttgaactactggaagcagcacgccctgctgctgcgggaggaaaatgtgcgcctgaggaggcgcctcaccgtgcacgactccgaagatgaggcggatgaagcccttgcctacgcagaagcggccacttgggagctgcaaaacggccaagaagccgtcgttgccgaagacgatgaagcgctggacgaggagtttatcgccttcatggaagtatcggcccggcatcggctggaacggaggagattgaaaaatgaaagtgttcattaattagatttatgaataaattaaacaagattaaagacacatttcgtggccgaagctcaggctcctcagctgacaatccgaaactctcgcactcgattacgtaatacttactcacacgcttttcgaccggtggttgtcgtgtgataaaaagggatactgagcaggatgaggtgtgggaatggagcgcgaaacggcatctggtgtttgacacgataatgaattataagaaaggagccgaaatggaagcagatcacaggcttcattcattcgtaactgtttgttcggtgggattgtccggtatattttgtctgaggtcaaaacatgccaggcgatactatccgcttgcgaaatgtattaagtaattagtaattaaaaacctgaatttagtactataccattta

SEQ ID NO: 1172 - DNA, 309 bp, Aedes aegypti
atgtgtgcaacgaccgtggctcccgaaccatccgccctggaagcttctgtagtagccgatgaggacgacgacgatgttcggattacgtccgtggaaacgattccgattgcgttcgatctgagtgaagataacaacgatccgttcatcaagatggccaacgattggtactgttgtaaagtgtgttcccgcctctaccaggcgtttccccaactggtggagcaccttcgcgatgtaaacccggacaaggcggagatattgcgccaacgatcgaaagagtcctacttccgggccaaggaaagttacctgtga

SEQ ID NO: 1173 - DNA, 1118 bp, Aedes aegypti
gtaacgttataccacgaggaaactggaaagaaggatgccaagcacgagaaggatctactgcaacagaagctcggctttgacgaaaagctgaaagagaaagatgaacagttggaaaaacatcaaatcctcaccagcaaactgcagaaacagatagccgatatgaacgtgacacatctcgagataatgaaggagaatgagttcatgaaatccaagctgcgcatcatggaacagatgaaggagcggaggtcgctcatgccgccaccgggtaccgttcaactacgttcccacctcaagatggaggacgaagagggcgaacagttcaacaacacctacctgacggatctgaagacgggtcgtatgtcgccaccgttcggcgggcgtgaatcgatcccgctgacggaactgcagaaacgcaactcaatggttaggccgcatctcaaggatagctacgcgcttcagtacgtcgacggaaatctgacggacgacgacaatcgagatctcgctggcggtaacttggacgacagcagtacgagcttgatttcgcgcaagaaacaaagtggaaccacttcctacaaacgaccgggaccgccgacgccgagcaagaaagccggtcgtctttcgttcggtggatctctgccgaccaacgacttccagtacaaagaaattctcaaggacaacagcaatggatcgtcctcgggcggcggtgtcttcggtggccgcctgagcttcggccggaaaagtaacgtggatccttcgacggctctagctaccaccgctggcaacagcagtggcagcaatgccgacctcaacgctcgccggaagacccccggcaagttcaagcagatgatcagctcgtcgaacctgttcaactcgtcgcagccccagcagaaggacgaggttactctactgaacataagctggcgtttcgatgagcgacgaaaacggcaatacgttgttaagacgcccgtaaagtagactgtttgttttaggtttacaaaatacagtgtaataatttatcattctttggtaaattaccttcgttactttaactctaagaaaatttgagttgatgtagtttttctgtgttattttcttattttaatatattttttacaagt

SEQ ID NO: 1174 - DNA, 2948 bp, Aedes aegypti
ttgaattgttacgcgagatttgtttatttttgcatacgtcggattgaaaaaatatgcttgaattcgttgttcaaaaaataaaataaacataaacaaacaacaaactcacaaccgtttaataggcacgtgcttgtccgcttttaatatttaccttattttgtcttaattttaataagaaaattatttaaaattgcccgaaaatggatgcctgtgaagtgtgcggtcagaacgagttcacggtggaagaaggcttccactactgcgtcgagtgcggaaccaaatcgcaacggcacggtaccgagctggtggccgaattcgaagagaacatgcccgggggtaaggatgccgttgctggaggaaccatccggatcaaacaggtcaagaagaagggcaaaatgcttaccagctgggaggtggtcaactacattctgctgggctacacggaacggctggtggcgatgggagccggggaggcgttcaagctgacggttctgcaactgtggacggcctatttgcgccggtcggaggtggcgtttttcgacaagaacaaaccggaacggccccggttggatgtgtttcatcggacgacggatgcaaacataatctacaaccgcaagataaaaaagaagcgcgaacggaggaaaagcgcagattcgggtagtaggacgagctctgtgccgatttccggcgtggcgttgaccaagaaggtgcgatccgagcagagaagtttgctcaacgtggagtacgattcgttccgggccagtcagtcggatgtgaaccggtcgctgcacgagctctcggtgcgctcgttgaatgctagtctgtcgggaacggacagcgaagccagcacgaaaagtggaggccaaaggataaagtattcccgattggccaggatcaaaatgaagcgcaggctcaagatgtcaaccaagcacatcgataagcacgagagcgatgtggatgatttgatgagctgccaccggaaaaagggacaagggaaaagcaatccgcgacacagaacggatccggaaagtttgtaccggacaacgatagcctcaatcctggcgttggcattgaatgtcagtcgtagtaaggttcagtttgcggatttgatgcgattctacagagaggagcacatttctaccatgaacctcatgcagtatattccggaggaagtagactccaacagttgtatggagacgctgtgcggacttcagaaagggccatcccttacgcaccatgaacttctcgagagtgttgtaaagatgatgagattcataaacgttaaaccaattcttccggattttagtcaactttgtagacgatatgttcaggaactgtgtctgccaactgatttgatgatattcttggaccgctttttggcggtatttccacccaaaatggaacatgaaattagcagatggtttcctaattacgaagcccgagcaatggcaataattttgtttatgctaaagcttctgttcggctgtaatgactcaaccgaaatgaaattgtccaaatcagcagcgaagttcaatgcgatgcttaagaatctgggcccgtcctaccggcagctgtttgtcttccgagagtgggttcgattcctggaaatgagaaaacttgttctaggccaagttcaccatcctacaaatcgagtcgtagcgaagcaagaaggggtcgaacaagatccagaacttttcatcgattacaacttgcgtaaaaggcaaggtggagatttgtatcgggcatcaaccaagaccataaaccgcaactgggtgtccaaactgaaggattttgccaccaacgtagtgaatacttatcaccgtcttaatccgaattcaaacacgcaacaaagcatcgaattcgatcccagcctcacaccgcatcggtcgtatctggaaacgttcctcttggcatacaatcgagaaggtaaaatccatgtgcccgagttcctacacgagaatcacgaagaccgttcgattgtctcgctcgtaagcccatcggaactcaaacagctcctccgaaccaaccatcagatcaccctcaaaacgaagaaagcaccctcggccataacacagttgaaatttatcgacagggttgttgcacacaatgtcctctatcggctaatggagtacgagtctccctatctgctgatcgacgagtgcgatgaatccaactggacacctcccccgaaacgcagccatcgagacgaaccacacgagtcaatccttacccgaatcctgattcgcaacgaacaacaagaaggagaaacccactgtggcttacgacaagagtccgtcctcgcggatgactcgattctgagcaacacaacggcggatctcttcgattcgcaggaaccatcctcgcaggatagcgttatcctcccgtaccagaactccacccactcgcttctgacgcccaactacgactattgggttcgattttatcctgtcagaattctgagttctcgggaacaatttgacgaggaagttgccgtcacccttccggaaaactttcgcctggtgctggaggaatgcgcccggatcgtcgagacgcaccccatggtcctgtatcaggagctgatgaccgtggaggcgtatctgttctatgcggtgcaaccggtcgagcgattcttcgatggaaccgacacatgtgaggtacagttccacagcaaaatcgactacggcatggttaggacggtccacgaagcgaagaggaagtattgaaatagctaataattcgcaacattttctagttgttcaattgttattgtagagcttgggtttaatttacaatcaactggtttacataaggatttccgaaatcaccctaacgtgtttaaaattagaagggatacctaggcggggcaagatggccactagacttttgcaaatttcgaagttttgactccccttatctaccgtaaggacgccattcaccgctcatttaac

SEQ ID NO: 1175 - DNA, 231 bp, Aedes aegypti
atggtcttgggccaggtgcagttgaacgaattgggttggtttggccgccgtgacaagaacccaaggctgccgcttgccgtgagccgtggcttttggagatatcacaagtactggcaacccaagcggatgggcattgtcccgttcttccaggtcatcgtcggcggaatggtgtttctgtattccatcaactacggcaaactgaagcattacaggaactacaagtaccactga

SEQ ID NO: 1176 - DNA, 1478 bp, Aedes aegypti
cactcacaaacgagcaaaaccaaaacaaaaatttcgattaaaacattttacgggaaaagtactgcatttatgtgattttatgaatgttcatgtgattcgtacgtagtattaataaaccatgcagcgataccagatcgatttgagtgattttttcgttgaccatcgccaaaaagtgtttgtcggcaaacgagacaagtggaagctgatctcctgtttggtgaaacatattggtgcagttttcgggttaaaaaacatcttcatcaccgatagcgatggtgttctgttcctggaagacgatagtttggatgtgataagagaaagcgacttgttaagagtgcactcttcgaacagttcaaaggtcgctcaggaaatttgcgcgcccaaacgagtggcggcagttgactcgccacgtgcttccgttgtaaatcagaatgggaaacggaaacgtgaatcgacttctaatgataaacccacacaaagagatatatcctcgagttccgaatccgatagcgatgatgacaatgagactacactgcccaaaatattcgtcggactcgaatcagtatgcaagaaagacgaatccattgatgaaatacccaaactcaaacggaaacgaattcgcaagcggaaatctaagaaaaaacaagagggaactccacagaaagtgatcgtaaaaacttatggcaaaggtaaagttcctgccattgtaaacgacaatggagactcttcccaacatatacgatttagcaaagatgatacaccagacgaagaaggtgaaactcccgctaaagatgagccctatcgtaatctgaataagaccactgttgcccgtgtagtaaaagccgttttacaatgctctgaacccctgaccccaaacaatgaaagtccctcaatcccggattacgtagatgatcttcacatggatcaatcagtggtcaattcccagcgtaagcagaaaacccgaaaacaaaagaaatcgttggaaatcaaacaagaactcatagaaacaaacacgattcgcgctccttccccaacctgggatttcgagttggaccaggccaaggaaaatttcctatccagttatattggtgaagagttttggaccactcttcaggaagcgttggaaaactttcccaccattagcatcccgagcgtgaatgacatcatcgcttatcggctgccttccgaggatcagataacttatctggcattcgtggaacgtgccgacgatggcgatagtgacggcaacccagccctgaagttgaagctacgccgactcaacactacatcaccgaccgagatgataacctacacgttggatcagctcacggaaatcagactgatagcgacgtatcagccatagacgttttggggtaggtatcgttagctgaagatcacacgataccagatagtggttcaagtctataaaacaataaatgtctacatagaaacggacagtagttgattccggacatgtt

SEQ ID NO: 1177 - DNA, 844 bp, Aedes aegypti
cattccaaaatgaccatgaaatctagtttcgatttcgaagagcatatggagaaatacgacttggagaattcagcgatccacagaaaacttcaaagcaaagtggaagcgctgaagatcatgcgaaatgaactggaaaagtaccgatccgaaagggatcagttcaagctgatggccgaaacacttcaaatgcgatattcagccatgaaaagtagtctcaactcgccggagttccaagccgcaggctttggtaatagttccgccgttagtctattggttaatcaaactcgagaacgcaacatttctttaagtacagaagtggaagccttgcgacagcgtgttcatgaactagagggcgacatagacgtcctgcgaacaaaaaacttcgatcttcaagcagctttcaacaagatgaagtccacggaagaaacgaagctcaaagatcgcaaaggtattgtttgggacgaggaaaagtccaagctgatagcgcaaatggaaactctgaagaaaaagaatgctcaactgcagtacgatgttcgatcgttgctggacgaaaaggaggacgtagttatggaacgggacgcctacaagtgtaaagcccacaggctgaaccacgagcttagtgtgatgctcaagggtgaccaatcgcagcagaagattgtggatgttgatggactgattttggagaacaagtaccagcaggaaaagattacgaatttggaaaatgaattggaactgtcccgacagtcggccaccaagtacaagaacatgcttgacaccaaacggaaaaagggaatcatcaagcttggcactaacaacaatcagagggtcatgtctcactcacaag

SEQ ID NO: 1178 - DNA, 977 bp, Aedes aegypti
tatttttgtgattatgtgaaattcgaagcagaaacattacgattgcatttcataacgaaaatacaatattacaaattatggatagagcgcaaccagcaccacatcatcctgagggatcccgcaatgcattgaacttccaattttcgccggaggagctgaaagtgctgcaggaatgtaaccgggaagcatttttccaacgctcgatgcctctggggacggttttcggattgggaacgtactacgccgtccaaaggggatttctgaagtcaagcccgcgatttggcgccggtcccaaagtattcgttggaattacgttgggctacttcatcggcaagctgagctatcagagtcgatgtgccgaaaagattatgcgcattccaaactcccgtttggccgatatgattcgccagagacgtcagggagcgaccaccgttgaaagattatatcccgatcaagggttcggcgctggggccatgttgtccccgtttgggccggccagcccgagtgacagtgtgacggaacaacatttccgcaatcgggactcgatcaacatcgacgtccacacgcccaattattccgggctggatgaaagcgctcgaccgtctcttgattctaatcgcgccttcgaggaggatctgcagctcccggtggacccgccaccggtgacgaaatcctacgaagaattacgtcgacagaatcgggaggaatacgtgcgccgacagcaggcaccgtaccgtccgccgacggttctggaagatacgcccccgattaggcgagaggttgccgctccttcgccgagaccggaagatcatctacctcagcagccccaggtgaagaataagtacggggacgtttaccaggagtagaccgctaattggaattttgtgccgctcaaagtactttatgcagaataatgttgttcgtatcacaaacattagatactcaataaatttgcgcatttcagttttcgcatagtc

SEQ ID NO: 1179 - DNA, 2731 bp, Aedes aegypti
tttgcatcaatgaagcttacacattttgaataaagtgagttaaatttacccaaatgtcaacatttcttatcgagcgtgtactgagatccttttcgtcgattaatttaaaaagcccgtcgatgttcgccgcgaataacgatgtgtcaaaacagatggtcttctacttgtttgtatttagtgccgggaaaatccgttcgcacgaatgcgggaacggtcaaacggatttttctagccctttgaatcacaaccgtcgaacttatacctactagcctaatatctaactgtccgacttatgcatttttaaccgtcgagtttattagttaagttagcaaaattaatccaaatgattgaactgtgatcagcgtataatagtggaggaacagtgctcaaattagtttagtgttctctagtaaagctttaataattgtgttcatgaagtgctgatcgaaggattcccagaatcgattccagaatggatcaggaagcattcctcactcctcgtaagatcttccagaatgcgttcaacgcggccaggaggtcaacggccagtgcgcattcaccgtccgtcaaggcctacacgccaacatcgctgtctcggacggcggccggaactagtagaataaatttacttccggtcatccagacaccaccctccagaatggtcaaaggcaaggtgatcaatcccttcgaagcacatttgactgatcgactgcacttgccagttatttgtagtccttcgctctttcaacggccaagtactccccaaggcggtagcgtcacgcagttcgagtggacaattgacgaagtgagctatctgggtccggccaatgtggaagcgcacgaaacacaattcatggaaacgccagacccagtgctggaagcgaaggcgcaagctgcaattagtgcatactttaaagatcacagtatagttcctagtcccattggctgtcaactgcgtagccagaaaatcctactgaatggagaatctactgccatcgacagtttcatgggcagaaagtccaaacggaaacgggacggagtaacccaaactgttttaactttcccaccgattttacccaaagaagttgaagacatgctggcaccctacttcgggttccatgacaaccaacagcaaacccacgaatctatcaacgagtctgatgtaagtatcgatcatgatgcacgagatgcttcgctccgtaggaaactgttcaactgtacgacagcgtcgaccgattcggagactcgagatcaggacgattcgcttgaccatctggatatgcattcacttagtccggcgcccgtcactccggaagtcgacaaagaatccgtgcaaaacttgaagcgatcgcgttgctttggatctcaggaaatcaagatcgatcgggacgacatttccctcagtcccgtagtggacaaagagaaagaatccttcggggcgctgtcacccatttccaaaagctccacgtcaccttctccgttgaagcccagttcaaactccaccgagataccggatcacgatgccatctaccgaagcacaccggaacgtccgaaaagttttgttttggcgttgaattgcagcgccaacagtcaccacatgtccgtcgatcacggtgaaaggcaaaccgacctaacggttgatttcaacgaagaggatctctcctacgaagacaaccctctagccttgtcccaatcgtcttcctcggtggtttcacaacatccgaccacgccactacgtcacacgcccagggaaagacgccgcaaccggaagaacctttcccggtccttcctgctgtactcggacgaggatcgctttgaggaggagcaacaagaacagctacaactatcgaaggaattccaccataggagtttcgctgccatcagcagggataaggagaacatcgacagcgcaaagggctttcgatgtttggccaaatcggtcccggaaaccagcagcggtaacttctaccgcatggacagtggattcaacgaagaggaaacacgcacaagtcaagagactgtagaatatgagactgatgtttcaatgcaatccgagtgctgcgaaggtgaccggcagactccgcaacggttcaagatcgcacgttggaaaatgtccgccgcggccaattccgacgggcagcatcacacaggttgctcgataagactgtaaaacagtaaatttctaaattgagattttattttagattactaggtattattgcaaatgaatcgaagaacatgagctagagtctgtaaggtagtttcaatgagacgtcgtacgaaatgtcgattttcttaatttgtcactaaaagtttgtttggtaattttgccgcaaatttgtttcctatttttattttagtacgtattgtaattatatttcgttgcattgtaaactacgacgtgctacgtccattaaaacgctttttgttcattaattatgttgtttcaatgaaaggatcacatgatgacttataaattactttgaagcaagtgagaatccggagaaaactgcaactttgaaaatcacaagaatcttctaaggtagacacatcggtgttggccaatctaagagaaaatatatgagaagccctacatgttgaaatgtgaaataaaagctttcaaatgaagacttttaatccataaatgtatgaacaatttcggatctaagcagaaatcttatttcagtattgaaaatcacattggtcaatataggccagaatcaatttcggc

SEQ ID NO: 1180 - DNA, 809 bp, Aedes aegypti
  misc_feature (1)..(106): n is a, c, g, or t
nnnnnnnnnnnnnnnnnnnnnnnnnnnnnnnnnnnnnnnnnnnnnnnnnnnnnnnnnnnnnnnnnnnnnnnnnnnnnnnnnnnnnnnnnnnnnnnnnnnnnnnnnntaaagaaaatgactatgtacgacctggcgcaacaggactatcaggtcctggaggaaatgatttctaaagatccatcgctcattaccaaaaaggatacgaatgaacgcttcctgctgcactgggcagccctgggagggcgcgatttgctggtggaggagcttctgaaaaggacaccggagcagttggaggcaaccgatgataccaatgctacaccgctggttttggccactctgggaggccatctgagcaccgttcggatgctggtggccagaggagctaacgtgaaccacaagaactggcagggacatttcgcgctgcagtatgcctgctccaaggggcatttcgagatcgtaaagttcctgctggaacaaggcgcggacatcaacgtaacggacaaccgacacgacacatcgctgcaccgtgtggcatcgcaaggccgggccgaaatcctcaagtatttgctcgatcataaggccgaggtgaatgttcagaatgcggaaggaaatacggcgctgcatttggcttgcgaagacgaacagagcgcttgtgccatgctgttggtcgagcatggagcttcaggtacgattcagaataaggagaagaagacccctctggatctggccaaaccaggactgaaaaggaacttgaagaacaagcttggaatttctgatgaataaaattggaacgggttttcgtgcgatat

SEQ ID NO: 1181 - DNA, 714 bp, Aedes aegypti
ctttaatcagtgattgatagattagattctgctgatctggagcgaaagtaacggaagtacctacggaatgacactgaatcgagaccctgatgtaatatgcttcaaacattgcggaaggaaaattttcgtcttttctgttccctcacattgtccggtttgcagtctgccattatcacaatccaatgaagtgctaccatttacgctaccctaccccttcgtcaacgcaacgcaatgtccctgttcggtggttctccggtcgtcccacggagacttcctcagcaacttccagaacagtgtcaacctgcacattgccctgactgactcgtgcggttcgatagttgagttcgacagtccaggtttgttatggacgccggccaggaacgtggacaaagcccaatggaggcagtgtgtgttgatcatgcaggtaccggaagcgtggtacgccgagtgggatcaaactctgagaaatgtgatagatcacgagggttggagacgaaaacagtatgacgaggatcatgtaaattgctatagttttgttttggattttcttagacacttacaatatgaagacacttcgcaatttgttcatgatagacaaacattctctacaaaattcgttgtgccaaaaactgcatatgcagccaagtttataacaatatttagaagggtcaaagataatagcttttggccagatgaaatcaatagtgaatgagg

SEQ ID NO: 1182 - DNA, 1143 bp, Aedes aegypti
cgaatgttttgcgtctgatgatcgctttttgttgcccttccacatcgcagtttttcataatatcgatgcgaccgatacagaacaaaacgaaatcgagtgacgattgtgagaaaactattaatttttaagaaaatggattcataaagtaagacagtttagttagtttataagtgtagaaagttgtgcacattatttgtcgcatccagtgaccgaatccgggataccccgagagcaaaatgactttccttagtttgctgagttacttctcgctgctggtgcagatctgcttcgtgaccgtgtccatagctgctggcctctattaccttgccgagttggtagaggagtatacggtcatggccaaaaaggccatcacatggatgatcatgggttccgttctgttgtacatcgttttcatttttacggaacgtttctcgtggacactaatactctgcggtcttggggcgcaggcccttcatgcagccatcctgaagaacttcccgtacgtgaagttcctatcgccctgcttcctaggtgctgtgatattactcctggccaatcattacttggcgttcatctatttccagcagcaattccatccattcaccgaggtaatggcatacttcacactgtgcctgtggctggtgccattcgcactgttcgtgtctctctcagccaatgacaatgtcctgccgacgagcaacgagaggacgcatctgttaagtgataacgacgtggtgacgaactacttctccagccgcaagaagatcggtctgctttctttgttcaactacgcgaaggaatcgcttctgcccgaacgaaacaaaaaagcattttagttgtacttaaatgatctccagttattacgtaaaaccacccgccagttggagggtgttaatagggactgtaaatgttttgccatcatttgtacgaccactagggtgtaagcgtgtaaggtacactgtgtaacataatgacgaaactacataaaatcttaaggtacgcacctcaaatgtgttcttttgaacccccataagctactgtgaatgtttgagcggaattcatccaatctgaagggtctaaacgagcttgaaacttgtatggaaaaccgttctagtataccgtgatgctatcatatttcgcgca

SEQ ID NO: 1183 - DNA, 183 bp, Aedes aegypti
atggctttcggtgattatccggtggagtacaacccgaagatccacggaccttacgaccctgtccgttactacggcaagccggatacgccaggtgaagttgatcgaattgggtgcttggtttggccaccgttacaagaacccaaggctgccgcaggagccgtgagccgtgccttttggagatag

SEQ ID NO: 1184 - DNA, 4125 bp, Aedes aegypti
gaacaatccccatatttttgaaacaaaatttcattcaaaattttaggccccattttcgctctagctgcttatcctttttccagcggaccacagaaaaaaaaatctgcaagtgaatttcagttcagcggatcaacctcgaacgcgcgccagtgcccactccctcggttcgactacttttcgcccttgatttcgcccgggcgctttctttcaccgttggaaatttttgttagctctggctgccatcccgattcggtgctgaaagtgcagtgaaaattcgaattttattgctttatttctggcggaaatcgtttcaatttgtggtggagtgttgaagtaattacggggaaagtaagaaacgttgaaagtggtgcgattttccgcggaaaagtgttttgtgttggagtttttgttgttgcttgttgctgttatggtttaacgcttttttctgcttgcggggattgtttgacgagcttggatttctagtgtgtgaataattgcgaagcgttagaatggatgatctgttgcacaaattcaacgaaatcatcctgcaaacatttgcagcggaatctcgtctggaggaagaatttcagaaaagtacgaaaaagttagatgaacatgtcacgcaatcgatcaccaatggaacgccggttcaaagtaagaaacgtccgaaacggttggaatcgatggaagagacaggagaagctggggatgacacgttcgcctcgacgaatagttccttgcatacgtcgagagctagtcagaggaagaacagcactcaggccaagggacgagacaaggtgcgatccctagtggaagaaatgacggccgttgctccggcgtctttgcctccgtcggtttctccggtggttgaggaacagaaccaggcgaatgccaaacctcaggaggacaatgagaggcgtccggctagggctgctcgggtcaaggccacgcagaatttgaaggaacccagcttgcatatgaagatgcgacagccaagcatcacgatcaagaaggagcggatttcggaagaaattcggaacgagcaacaggtggaaccgatggaaacggacactgagaatgatggtaatgctttgaacgttatggaaaaggtcgttgattcggagaagcggaaatccaacgatgaaggattcggcagcacgaatgagaaggacaaggagagcgaggaacctcccgcgacggaaatgtccataattctgataccgaaaccgattccaaaagtggaagtgctgtcggatgatgaggataccggtaagatgcctccgcctatgatgccaccgccgccagctcctaaaacgaaaactcgtactaagaaggcagataagtctaaagttaagacctcaaatgtactgccggtcaatataaagcgcgagaaagatgccgacgagacgtcatctagttctgcgatttcgtcggcagattcttcactttcgaccacttccaacaaaacttctactcgtggtcgaaagaagaaaacaagctcccaacctgaaccggccaaggttcatatcaaaacggaaaagctttcaagcgaaggcattcgcaatgacagcaagtccaaaacagtttccactaatagtcccacacagtcggagaagtcagtttacgaagacgctctggacggagatgcggttatgcgtccggtggccgtggcattgggtcgaattccattgattgccgatggcgagaaaaatcaaaccttcgccatggactcaaacggaaccttctcggttcccacatcgaacggaacgttcgttgttccctctccagcgaatggaacattcaatatcaagtctcctgaaaatccagcaaacggcactttcgatgtccgtcagctcccagggccaggcaatagcactttcgtaatggacaaaccaaaatctgctgaagaccagcagcgtgccctaatcaacgccagcatcataaccgaagataattcccacatcgaggaaagtccagaaaagccaccgcctccgaaagccaagaaaccagttgtggccaaaaagccccaagcagcgtccaagtccaagaaacacaacgaactgttctccttgcaatcccccatcaaaacccgaatcgaagccttcgagaaggccgccgttggttctccgttccattctcgtactgccgccaccagcaaaaacaccaccccatcccagtccaatcgattcccctcgaaaacctccaccactccgctcgcctcccagcgatatccggcctctgccaaagcgagcacccagacaaccccaatcgcccaaagcaccctccccctcaccaagggaatctcctcgtccgcctccaagttggcccatctgcagaagaaacccaccctggcctccgcaaatcttcccaaatcgcaaagtctatcccgcgaacccagcattgaccggggcaccggaactctgtcctcggcatcatccaccacgtcgctcgccatggacgagaagaagaagaaacgcgaagagaagcaacgtctagcgcagcaacagcgtgagcagattgaaaaagaaaagcgtgaaaatgccgaacggttgatgaaggagaaggaggaaaagcaccgcaagctggtgcaggagaaggaagataagctgcgggcggatttggttaagaaggccaagaagatggaggagttcgaaaaacggcggcacctggaggagctgaaccagaagctgctggcggagcagaagcgcgaggagttggccaaactggagcagcagcagaggaccgaacgcgaacaggccgaactgttcaaaatcaaccaggccaaggaaaactacgaaatcaaactgcacaagcaaatgtaccagcagaagatgcaacagcagcagaaactccagcaggctcaggtcctccaacagcagcagcttcagctgaagaaattgaaacaaaatggcaccgttgccacactggaaaagaatctgttcacgttcgatatgatcctaacggacgattccactgacgacgaaagcaccagtgctagcaaaaaatccaaacgtcccccgctgccggcgtggtgttcaaaggaggaacgcaatccaacgatccggacgcagcgcgagatcaagctgaaggtgatcgaccagttcttctcggtggcgccgatgacggccgatctgcgggagatattcccctcaatcgacgcccggaaattgaagcgaaactcgagtgccgtctggcggacaccgccgcggtactcccagatgcccaagtattgaggggactcggcatttgccttagttaagctagctactaacctacctaaccacacactccaattgtaccatcgtcgttaagtttagcgcccaagatgattgattgctcccagccaagcgtaagtgggtaagtgtgcgaacgattttatgttttgtgtgttattattgtgggcgtttcggaatggattcccctccaagttccaacggatgaactttgtcgaatataagctatgggttatgttatgtggctattctcgaatgaagcgaatcgaatgaagcgaactatcgaaagtatgtaagatgaaacttgagtttaaaccttgagcgaggtgttcggaatagattagaagcacctatctgtgcgcatcaacagcgatcaataactaaccccgtaattataggctaataatgagtttgtcaaacgcaaacgaattaaatttcgtcgtgcaaggctttcggttcgaactggtctgaagctgcgatcaacaaaaatgatgattttactcattgcgacactcttttgttaaatatgtttcttacttaaacatcgataaataatcaatctcacggtaatcactattctaagcaaattgaaacgtattaagtattagaaataataaaatttgaatgatttttttttgtaaataatttaatatatcgaagtgtggtttcttgaaagaacaaatcgccctgcaaatccaggcgggttcactgtattctagatgtcttgcttaaaaccaagccattgtctctgaaaagatacgtatctagttataattagtacttttcttgctgggttaggtggccactcgacgacacaccaaaccaagtctcatcatttccgggcgtattgtaaagctccatcttcgtcggtctttggcgatacttctccagt

SEQ ID NO: 1185 - DNA, 695 bp, Aedes aegypti
atggcgggtttctgatcctcgtgcgtccgcgatcgcatcttttatccggtttatttattagtttgttccgtttgtttcctgctttatttaaataatttgattcaaagtccaaatcaatctcgtggaagcaactgatgccagcaacgattccttccggaattctctcagggtgcggcgtttcccaaggattcctccattaaccaattcccaagtgatgatatcctgcaaacaagagttccagtttgtgattgaaaatacccgccacggatgtgaaaaagaatccgctctatggatgtttttgggagtttttcgaggattttgttcagggattactttggccgccgggttggaggatgccgcaatttgtgttccgcaggaaatttattacaccgacggccagggagatctaggttttgttatttaccggaatagatgttgcagatacatttatgatcggcacgaaaaacatgaacgggctctgtgaatcattgtactgtttgctgtggatatcaaaacatcctggactcatcctggagtgccttcaggcttgttttttatctaaaaagtgttcactgcggcaccccggattcatcatttggagcttcccagccattatgctccatcatttgaatatttgtttaatgcaataaaaatgttataaatggtgcaattaaaataattgatgatttaaatga

SEQ ID NO: 1186 - DNA, 1671 bp, Aedes aegypti
atgaagaacatccctgttaccctagtagtggaacgaagatggatttgtccttgttggggcacagcagggtgcattgtgtgggacgagcttaatgttcgcggtattcatcgtgctgtgaaagtgaaagtattctggaagtacataaacacacaagtgtgcaaaaagcttcttgggatcacaggatgggtgctctacgtgacgcgttcgttcggtgtggtctacgacgagtacgtcgtcgatcagggcaagaatctgacgctgccatgccggtcctcctacccggtgatgtgggtgcacgagggacgtcgcgatgacttccagcagcgattccagagtgacggctccctccagctcacaaacctgacatccaaagatggcggcaaatacacgtgctcggagttggtcccaaccttcaccacggtacagctcgacgacattccatcggcggaagacagcaacggcaccggcgaggcattgctaatgttcggtcctcgtaacgacacccagaacatcagtagcagcagcgaagaggacgaaccatcgacgccatcgtcgccacagttcgacagcactcccgatcgatacgtgcagatccgacagttcaacgtaaaggtgcgaacacctccgttggccgtgtccaacttttttgtgcgggcctccaccatcattgccgtgctggtttgggaggttatgcccaatcggaccggaggctacgccatccgggactttaccgctgagatgcgtaagcttcggtggagcgacgaggaacccgaggaacgctgggaaacaatcgatccgcggcacatcagcccgaatgcgcgtcagctggagatctaccatctgatcccgaacacgacgtacgagttccggatctgggccaacaacgctctgggagccggagaagtgatgaccatcacagcgaccacctcacccgatatggaggagaaagacctgatccggcggatcatgatcgatgcacagaacttcgatacccgcgtttggatcgcagcagtcggcgtcgtcatgggaacgctggtcatcctgacgctcgggacctgcatcgtgctgtacaaggagtgccgcgaacctatcggtactagaatgaactataactgttgttgagctatttgattttgttggtttgtttgttctacagtttggtttgaacatttattttattttattttattgataagtttacattttgaaagtaactagatgcattttttcaatcaaagggaccaagttttgaattttgcacactgcaacaaataattcgatagattttatggaatgattcgtttaaaagtttgctttttcttctacacttatagatttgttatcgaaaattctcaattgttagctagaagtagaagattttcagacattttgtttgcattttgattgaccttcttcatttgtttgacaagtaggtagtttctaaattacatagatacaaatactctgacaaagaaagtaatagcttttgcggacaagtacaccaacacgtgctcagtaaaaagagcgtaggcgctcacgagtggcttcattagatagcagagcaagctttattaaaatatttagatatacatagtaaaaattatacaactagagagtagtgccaaaacaaaagacaataaaggtgccacgtttgggtaaacaaggatactg

SEQ ID NO: 1187 - DNA, 624 bp, Aedes aegypti
taaaacacccggtcgtctggaacaactgatatgcaattcaaaggagcaagaagcttcctcgcaatcagctgaaatggcctccgtctttgctaaaacgaaacaaatagaacacgggaaaaccggaaccaaacaggaagctgcatcttggcagttcgtcgtcatcattccagataagagaagcggaactcgtttcacttgttccattggtatcagactggccatgaagggacaaaggcaaaaggcgtcgcgaagctgccgacttgaaacagcttggaaccaccatcagcagaaaacagcggcccgtgtgttatattagtgtttatcaccagaaaaaaagcgaagaaaatgcataaactgtgttaaaaaagtgattgagtgatgaacaataataatggaaataaaaattgtacttatttcaaaataatagtgaaaccagtggtacgtgtcgttcaaactcgcttcaaacaaaaacagaaatattatggtttttttttctttcgaatgaaatgaaattgagattttaattttgattgaaattaggtttttacacgtatctacttgtttcactgtttcttcattttttcttaattttatcacattttgttttattgtttgaatgtaaca

SEQ ID NO: 1188 - DNA, 1158 bp, Aedes aegypti
atggcgtatcaaaaaataagaaacatattggaggacaccaaccaccgaatcgaaaaattgcacgtgccttacgaaaatgaattccggatgcaaatcaagtatcttcatgtgaaagaaaaggccatccttcgccagttcatttttgaacaagagtggaacttaggtagctcgaaagtactgtccatgttacaggaagcgggaatcgttactgcctccgaatatgtgcttcggttacgctccagctctgcgatccaacaggtaatgaacgatctactggaggttgaacacattcttctggccgatatcattagcaacgcacacttggacacatcctactctacgaccctccgggaagtccttcacgacagtttcaattccgttctggacgaccttatcgccgaacctaatgtggtcccgtgcaactatctggaacggctaaaatcccatctaccggatccggacctgactcggctccgtacccaacacctgcaactgcttcttgggaaggagaaacttcatgcgttatcggaggctgttggtctgcaagagcagtggagagcggaatgcgaagaccgccgaagtaccacattaggacgaatcatgctggaagtggtacaagaccaggccaacgcgatcgaaacgcttttcgcctcggcaaaaacgaagagcttgtcctggaagtactatctcgccctgctgcacatggtggcggttgcaatcgaaggcgataaggttgaaattgttcgcgtgaaaggcattttgaaggacctgttcaaccgagtggtagatgccggagactttgaaaccttcatgatcctgatggtgagcgctagggagatttgcatgtccaacgaacgcgttttgggaagctattccggttggtataaggctacgataggtgaaatgagttaccgaatcaagaaggagcagtttgcgcatgtggtggaactaatgacaagattgatcggcctggaaaaggatccggaagtgcttaaggtgcacatcaacatctcggtgagtactcctccaaagtgtatggagttgattgtgaactacaaacagctatgcagagcccatctagctaaactgctcaatgaaaggacacgcgacaatgtgagcatggattgtgaaacgtccattgtcatcgatgatgattaa

SEQ ID NO: 1189 - DNA, 1534 bp, Aedes aegypti
ttcggtttttcatctactcacttaactaaagttttcacctaattttatagtaattcttagagaaattgatggacgagctctagaagaattctagaagcaattttaaagaaataaaatggagagaatactgtactggatcatgaagcagataatttgaagcagctcgacagacctactacgtggatgaatttcatccagagataaaagtccagccttcacacgcatcataaatctacgctatacagaaaatacggataaaaggttgacaatctcacggcttgcagacagatctgcgaagaaattgagtaacgcgcagatagcgcttgtttttgtcagacaaacgtggaaagacattttgcctaagaatgaccgcaaaactatccctggaccaagtgaacgccttgagccctgccgagttccgagaaacgttctacaacgtgattgaactttgtccagcggcggcaaacttttgcagtcacatgttaccgttttccagtgttaacacgatgattcacagttttcacgagtaccttagtggcttggacacggagtccaaaatcggagtgatacaaggccatcctgatttagcgggcagactactggccacacaccagctcacgcaagaatccagctttgaacactcgtgcgccggattggatcaactgtcgatcgagaatggtatacagctgaatgacttcaataatagatataagaacaagttcaactttccattcgtgatctgtgtgcgccaagctagaaagattgacgttattctcagtgcagtgatggcgcggatacacaatagcttagaagatgaagtggacattggcattgaagagattctggcagaggttttgcagaagttcgtttattggcctgaacgagaagaaatcacaaaaaacattccgctttgttttcgaggaaaatacgaacgagtcagatgcatactcgattgcaccgaaattcctgtcgcaacaatgaagtgcattaattgttgcatagcgtgctattctaattatggaggaatgcgaacagttaaattcatgataggtataacaccaggtggtctgatcagtttcattagtaaggcgtacagtggaaaggcgtcagataaacaaattttcaatgatgaaaatgtgcttggcttgctttcaaaaaattcttggaatggtaatgattgataaaggattcaacatccagctcaacataccgagaaggatgctgtactgaatgaaagcattgcgaaatcgaggatccatgttgaaagagtcattcagcgcataaagcagtttggtatttttaaatccgcaattgatgcctctgtgttagggttgatcgactatataatgaaagttgtatgtgcaattgtaaatctggcagccccaattttgaaagatgaaagattttaagagtgttacagtttatatcttttaatgattgttacttaatagtaatttattagtttattacatattgttgtaattgttgtcaattgaattggcttaattaacgggtttaagtcgacagatttacc

SEQ ID NO: 1190 - DNA, 396 bp, Aedes aegypti
atgattcacagttttcacgagtatcttagtggcttggacacggagtccaagatcagtgtgatacaaggccatcctgatttagcgggcagactactggccacacaccagctcacgcaagaatccagctttgaacactcgtgcgccggattggatcaactgtcgattgagaatggtatacagctgaatgacttcaataatagatataagaacaagttcaactttccattcgtgatctgtgtgcgccaagctagaaagattgacgttattcttagtgcagtgatggcgcggatacacaatagcttagaagatgaagtagacattggtatcgaagaggtggaaaagatttgtgaattgcgtattctagagctggtggatggtcaaagtgattcaatttag

SEQ ID NO: 1191 - DNA, 20 bp, Artificial Sequence
  Single strand DNA oligonucleotide
ccagatcacccgaactgaat

SEQ ID NO: 1192 - DNA, 20 bp, Artificial Sequence
  Single strand DNA oligonucleotide
aggctgtcaagcggatagaa

SEQ ID NO: 1193 - DNA, 20 bp, Artificial Sequence
  Single strand DNA oligonucleotide
tcggcattcgtagcttcgtt

SEQ ID NO: 1194 - DNA, 20 bp, Artificial Sequence
  Single strand DNA oligonucleotide
gcagctgacagtttgccttc

SEQ ID NO: 1195 - DNA, 20 bp, Artificial Sequence
  Single strand DNA oligonucleotide
cagaatcccagacccggaac

SEQ ID NO: 1196 - DNA, 20 bp, Artificial Sequence
  Single strand DNA oligonucleotide
ttggcgaaaccgtaccttga

SEQ ID NO: 1197 - DNA, 20 bp, Artificial Sequence
  Single strand DNA oligonucleotide
actttccctggcctttccac

SEQ ID NO: 1198 - DNA, 20 bp, Artificial Sequence
  Single strand DNA oligonucleotide
gcgaaacgtgaaggtgctac

SEQ ID NO: 1199 - DNA, 20 bp, Artificial Sequence
  Single strand DNA oligonucleotide
tgccgagaacagtgatcagg

SEQ ID NO: 1200 - DNA, 20 bp, Artificial Sequence
  Single strand DNA oligonucleotide
ctcagatttttcgccggtgc

SEQ ID NO: 1201 - DNA, 20 bp, Artificial Sequence
  Single strand DNA oligonucleotide
ggactcgtcggagctgaaat

SEQ ID NO: 1202 - DNA, 20 bp, Artificial Sequence
  Single strand DNA oligonucleotide
aactgtccgagagggtttcg

SEQ ID NO: 1203 - DNA, 23 bp, Artificial Sequence
  Single strand DNA oligonucleotide
tgagtttctcgagaggaaaacct

SEQ ID NO: 1204 - DNA, 20 bp, Artificial Sequence
  Single strand DNA oligonucleotide
tcactacccctccctcgttt

SEQ ID NO: 1205 - DNA, 20 bp, Artificial Sequence
  Single strand DNA oligonucleotide
ttcgcagctttcgtcatgtg

SEQ ID NO: 1206 - DNA, 20 bp, Artificial Sequence
  Single strand DNA oligonucleotide
tttcgaaacggcgcaatcac

SEQ ID NO: 1207 - DNA, 20 bp, Artificial Sequence
  Single strand DNA oligonucleotide
agctgccatgtctcaatcgt

SEQ ID NO: 1208 - DNA, 20 bp, Artificial Sequence
  Single strand DNA oligonucleotide
ccagttggaaatttcgcggg

SEQ ID NO: 1209 - DNA, 20 bp, Artificial Sequence
  Single strand DNA oligonucleotide
ttctgttggacggcccttac

SEQ ID NO: 1210 - DNA, 20 bp, Artificial Sequence
  Single strand DNA oligonucleotide
agcccgcaaacggtgtaata

SEQ ID NO: 1211 - DNA, 373 bp, Artificial Sequence
  double stranded RNA
ccccgtcgacggccacgaagttacgatcaagatcatttacaagcgcaaacagcgaatgagcgagaacattcaattctacaacattctcttccaacgcattatgaaagtcctgaagatggtcgagatgggtcgtaagaactttgacccctcggccccgaaactgattccgcagcatcgtctggagatctggccgggatacgttagcgctgtggacgaatatgagggcggcttgatgttgaatctcgacgtgtcccatcgtgtgctgctccagacgacggttttggatcacatccgaacgctggcaagggccaatccccaagattacaaaaacatggccaccaaatcgctgctgggagccgttatattgacccga

SEQ ID NO: 1212 - DNA, 431 bp, Aedes aegypti
tcttctccaccacagccaatggcgtacaggctggagaacaggcagattggacggcccatttccgtaacaatcccatgttcgctacggtgcggttgacgcgatggtatttgatcgtaccgaaccgggcttcacgtgaggccaacgatttcctgggctgcatgattcaagccgcacgcggtatgcgatttgagattagtaactgtgaggtggtcaccattccggacgacaacccaggtacctatgtgcgaacattggacaatctgctgaataaggacccgcagttggtgatgtgcgtcgtgaccaacaataaggccgatcggtacaccgccatcaagaagaaatgttgcgttgatcgtgccatcccaacgcaagtcatggtacaaaaaacgatcacaccaaagggtggtaatgtacgaacactcatgtccgtg

SEQ ID NO: 1213 - DNA, 289 bp, Artificial Sequence
  double stranded RNA
cgagtcaacagaacccgagcagcgccgatccgatgaaggtggacgacctgtgcatcagcctgcgccaaatgcagatgaagtccaaggagcaacaacaggcgctgcatttgatgaaatgggaaaagtacttccaccagaacgacgacggtgatacttacctacaccttgccgtgatccacgaggctaccgaagcggtctataatttgattcacgcggcaccgcggccctggctggacattcaaaatgacattggccagacgccgctgcacctttcggtgctgacgggcca

SEQ ID NO: 1214 - DNA, 448 bp, Artificial Sequence
  double stranded RNA
ggcgattggtggttgttatttccagagaattcttgaaaagtccgttgaacaatttctttgttatgtacgctcaagccttgcaaattgaacaaaagaaacgtaaaattattccttgcgtgtacgagcgattggagcttcctgcaaacctaaagttttatttcattttggactacaagcgctcgaacaagctgtacaatttttgggacaagctggaagatgccataaaagttcgaacagattccccggtgactgaaattaagaatcaatcaaaagcaatagaaactgtaagcattccaaaaataacagttgaagatgcaaacgaatcatcggcagataaagttgatcgaacgcaaaccaaaccagaacaactcacaactggtacatcccattcagtttctcagcccatcaagaaatcactatcatcgtgggatgttagcaatgcgctcaa

SEQ ID NO: 1215 - DNA, 242 bp, Artificial Sequence
  double stranded RNA
tggtggtggtgtcctgcgtaaccaaggacccgccctaccggccccatccgcacaatctggtcggcaaggagggctgcaaaaagggagtctgcacggtcgagatcaacagcagcaccatgagctacaccttcagcaacctgggcatccagtgcgtcaagaagaaggacatcgaagaagcgctccgcctgcgggaggaaattcgggtggacccgttcaaaactggatacggtcacgccaggcag

SEQ ID NO: 1216 - DNA, 261 bp, Artificial Sequence
  double stranded RNA
gcctcagtgcaatcttcacaaccggaaatgcgctcccagaggaactggccgacgatgttcgctcgtatgccaattctttgtttgatgaacttccggaggaatcttaccaagcggctgtggaaaacttccgcttgaaacgggccacctgcgatctgctgagtgggttcggtgtaggagatagtgcttgtgccgcacactgcattgcacggcgcaatcgaggaggctattgtaacgcgaaaaaggtttgcgtttgtcgaaatt

SEQ ID NO: 1217 - DNA, 528 bp, Artificial Sequence
  double stranded RNA
agccgctggatactacgctagtattttactatgggcatcattcgcttcgtggttgctgatgaatttgctgttggtggctgtgccacggtatggagcctatactatgacgcttactggcgccctgttgattggggccagcattggttacagccagatgctaccgaaacgaccgttgacgatcttcatcgagggaggccgcatcagttttcgactgggatggtgcttttggcttgtgctgattgcaggcattctctgtttgtcggttggactgataatatcaatcatcgatctggtgtggcctcatcgtttctcaaccattctggaggtttattacgatactccctatgacagacacgtgatattggaagaatctcacgatgtccgataccgtaaacgtaatagcaaagggctagaagatcctccaggccttggatcgcgaatcctacgtcgcctatcgtcgaaaactcgggaccaagcgaatgataaagcaggcatcgagaatcgaggcttccaacatgacgtaccgaa

SEQ ID NO: 1218 - DNA, 524 bp, Artificial Sequence
  double stranded RNA
atcgcatcatcttttcctggtgttctacggaatgatgttctaccatccgctcagcaacatcatcaaacatcaaacaaatctgaaggcgcacccgaatggttgcgatattatcgatgaccatgtgttcaggaatgattcagttctgcaggctatttgcagtgaggaaccaaagttcagtgccggagacaaatcggcgtggatttggccactaatgggactatcgatctacattctcgacataatcattcgatacctcatcgcacactcggacaggcgaaaagtatccactttgcagtcgtacgtcctaccagctaacggagtatatctacgcctgcgatttaccagtagtaagcgcattgtgatatccgcaggccagtacgtcctcttacagtgtccagccatttcgacccttgagtggcacccgtttacagtcgttgacgtatcaatccacaatacggtttcgctaaccgttgcagttaggggcgactggactcaacgattgtatgaccttgtttcggaaaagg

SEQ ID NO: 1219 - DNA, 355 bp, Artificial Sequence
  double stranded RNA
gtaaaacgacggccagtgatgccaagcaaactcgcgctaatccaggaacttcccgaccgcattcaaacggcggtggaagcagccatgggaatgagctaccaagacgcaccgaacaacgtgcgcagggacctcgacaacctgcacgcttgcctaaacaaggcaaaactaacggtaagtcggatggtaacatcactgctggagaaacccagcgtggtggcatacctagagggaaaggcccccgaggaggcaaaaccaacactcgaagaacgcctccgaaagctggagctcagccacagccttccaacaaccggaagtgaccccccacccgcaaaactgtagcatggtcatagctgtt

SEQ ID NO: 1220 - DNA, 534 bp, Artificial Sequence
  double stranded RNA
ttcgcgaagtaccaggtcattgtttgcacatgtcaaatattgttggacgtgctgaagcatggttatctctcggttaaacacatcaacttgcttatatttgatgaatgccaccatggtgtaggagaacatcctatgcacgggattatggaacaatttctgagggttcctaagtctgaccacccacgtgtaatcggtctttctggaatgttactctataaacagattaaaagtgtcgccctagtatctccagaattggaacgcttggaaaatacatttaacgcgacaattgctaccgttgggagttatgatgctttcaccgaggtctgcaaattttcgacagatcccaatgaacttttggtgtcttattcaacccttcgactgtcacctgtgatggctgacatcgtgaacaacatcaacgctttcagtcaaacgattgaagaatttcaccttccaaaatatttaaatcaaaataaagccctcctaaaagacagaccaaagccactgaaagagatccgaaaactcttcacacatggt

SEQ ID NO: 1221 - DNA, 2748 bp, Aedes aegypti
actggttttggtcggaagaaaaagaaaaaagaaatacgctacgacgacgaggatgaggatgaaggtccacagccggattccacacttgagcagggagtgccaatccctgttcgaatgcagggcagcttccctccggaattggcctccacgcctctcgaggatatcgacagctattacgcgaatcagaggacattcgtagtagttagtaaaggaaaagatatttttcgtttctccgcaaccaatgcattatatgtactcgatccgttcaatcctatacgtcgcgtagctatttatattttagtacatccactgttttcattttttataataacaaccattcttaccaattgtatattgatgatcatgcctagcacgccgaccgtcgaatctaccgaggtgatattcaccggcatctacacgttcgaatcagctgtaaaagtgatggcgcgaggtttcatattacaaccgtttacttatcttagagatgcatggaattggttggacttcgtagtaatagcattagcatatgtaactatgggtatagatttgggtaatctcgctgcattgagaacattcagggtactacgagctctcaaaacagtggccatcgttccaggtctcaagaccatcgtcggcgctgtcatagagtccgttaagaatctcagagatgtgataattttaacaatgttttcgttatcggtgtttgctttaatggggctgcagatctacatgggcgtgctgacgcagaagtgcatccgggagttcccgatggacggttcgtggggcaacctgtcggacgagaactgggaacggttcaacaataacgactgtgcgtttctttcatggcatacaaagcaattccgtggtccaagccaattggtacttctcggaaactggagacacgcctctttgtgggactcgtcgggtgctggccaatgcgaagaaggatatatttgtttacaaggttatggagataatccaaattacgggtatacaagtttcgatactttcggatgggcattcttatctgcctttcgtctaatgacccaagactattgggagaatctttatcaactggtgttacgatcagctggaccgtggcacatgctcttcttcattgtgattatcttcttgggttcgttctaccttgtaaatttgatcttggccattgtcgccatgtcgtacgacgaactccagaagaaggccgaagaggaagaggccgccgaggaagaagcgcttcgggaagcggaggaagcagctgcagcgaaagcggccaaactcgaggcccaagcagcggcagcggcggccgcagccaacccggagatcgccaagagcccgtcggacttttcctgccacagctacgagctgttcgtgaaccaggagaagggcaacgacgacaacaacaaggagaagatgtcgatccggagcgaaggattggagtcggtgagcgaaatcacaagaacaaccgcaccaacagctactgcagctggcactgcaaaagcccgtaaagtgagcgcggcttcactttcattacctggttcaccatttaatcttcgtagaggatctagaggatcacatcagtttacgatacgtaacggtagaggacgtttcgtgggcgtacctggtagcgatagaaaaccattggtactctcaacatatctcgatgcacaagaacatttgccatacgccgatgactcgaacgcggtcacaccgatgtcggaggaaaatggtgcaatcatcgttccagtatactatgctaatttaggttcgcgacattcatcgtacacatcgcatcaatcgcgcatctcgtacacatcgcacggcgacctgctcggcggcatgacgaaggagagccgactgcggaaccggtcggcgcgcaacaccaatcactcgatcgtgccgccgccgaacatgtccgggccgaacatgtcctacgtggacagcaaccacaaggggcagcgagactttgatatgtcacaagactgtacagacgaagctggcaaaataaaacacaacgacaatcctttcatcgagccctctcaaacacaaaccgtagtagatatgaaagacgtgatggtgttaaacgatatcatcgagcaagctgctggtcggcatagtagagctagtgatcatggagaggacgacgacgaggacggtccaacgttcaaggacaaggccctggagttcacgatgcggatgatcgacgtcttctgcgtgtgggactgctgctgggtgtggctcaagttccaggagtgggttgccttcattgtgttcgacccgttcgtcgagctgttcatcaccctgtgtatcgtggtcaacacgctgttcatggccctggatcaccacgatatggacccggacatggagcgggccctcaagagtggtaactattttttcacggcgaccttcgcgatagaagcaacgatgaagctgattgcgatgagtcccaagtactacttccaagagggctggaacatattcgatttcatcatcgtggcgctgtcgctactcgagctgggtctggaaggtgttcagggattgtcagtattacgttcattccgtttgcttcgagtgttcaagctagcgaaatcgtggccgacgttgaacttactcatttccatcatgggtcgaacgatgggtgcgttaggtaatctgacgtttgtgctctgcattatcatcttcatctttgccgtgatgggaatgcagctgttcggcaagaactacatcgtttctctacatgttggatag

SEQ ID NO: 1222 - DNA, 5924 bp, Aedes aegypti
ggttagcaaaatttaatcgtgctaggccgtaccgtaatcgaattttcattcgtggtttcttccgtgaaaatatcgttcattgtttttcgctttcgttcagacgttgtgccagattgttaaagttcgaaaatagtaattaaccggcattgtttgcggttcaatttgcggaaaaaatagaaaatttctcatctcttgttgactccattgaatgtatccaactgaaccatcatggatatgattatgccacagcaagacgatttcatcccgcgggactaccagcggacgatgaagacaatctgcatgcagaaaaatacaatcatctacttgccgaccggagccggaaagacccatatcgccctgatggtcatcaaggaaatgggcaaagatctggataagccattaactgaaggtggtaaaaggacgttttttgtcgtgaataccgttgcattagctaagcagcaggccgaattcctgagtcataatcttacctacgacacatcgatctataccagtgatcgaaatgtggatgcttggaaacaggacaaatggctggaagagttcgcgaagtaccaggtcattgtttgcacatgtcaaatattgttggacgtgctgaagcatggttatctctcggttaaacacatcaacttgcttatatttgatgaatgccaccatggtgtaggagaacatcctatgcacgggattatggaacaatttctgagggttcctaagtctgaccacccacgtgtaatcggtctttctggaatgttactctataaacagattaaaagtgtcgccctagtatctccagaattggaacgcttggaaaatacatttaacgcgacaattgctaccgttgggagttatgatgctttcaccgaggtctgcaaattttcgacagatcccaatgaacttttggtgtcttattcaacccttcgactgtcacctgtgatggctgacatcgtgaacaacatcaacgctttcagtcaaacgattgaagaatttcaccttccaaaatatttaaatcaaaataaagccctcctaaaagacagaccaaagccactgaaagagatccgaaaactcttcacagagttgatttatcagcttggcgatactggtctttttgggggatcaatagctttacttggtttgatagtccaatttgagctggacaaaaggcaatcggatagttcaatgctaagactggcgttgaggtcgtgtattactttttgcgaaagcctgaggcatcagatcgaaaaattaatgagtggtttggacatgaagaccaaattgactaagttcagctctctgaaggtccgccaattgatagatcagctggaaaagttgtacgaagagaatcgtgacaaaaaagcgaaaacgctgattttcgtccagcgacggttctcggcgaaagttttgtaccatttactgaaaatttacttcgctgagacggaagacgccaaccttattgttccagatttcatggtgggcaacaatggttccatgcccgaatcgattgaacaaattttgagtgctaaaaaggatagaagggttctcgaacggtttaaaaagaatgaaacaaacgttattgtaacaaccaacgtgttagaggaggggattgatcttcaaatgtgcaacactgtcgtcaagtatgaccatccgcaaacatttgcgtcgtatcagcagtcaaaaggaagagcccgtatgaagaacagtcagtatatggtaatgctggataacgaaaatcgtcatatcttcctggagaaatacagactctataagagtattgaagaggagttgcgaaggtgtcttatcggcaaaacaataaaccggccagaccccctcgatgcggatgtccacaaagagctatacaatgagatcattccgccgtttttcaccgccaagggtgccaagttggatgctctgtcggccatacagctcctgaaccgctactgcatgggaatgccgagagatgcatttaccaatactaacgtcacttgggaacgcatcgatctgaaggacggcagaataatagtggaagttttgttgccgcttcagtccaccgtgcgagaaaaaatctccggcaatcccatgcgcaatatcaagttggcaaaacgatcagcggcgttcaacgcgtgccgaaaattgtatgagaataaggagctgaatgaacatctaatacccatagactgcaaataccagcttaacaatttgaaagatgtgtatttccgtcattggaaggattttgatgcagacctcggcaaactagcaggcacccaaaagtgcatacgaacgcacgctatccagtatccaaagcaaacaacagagtgtttcccacagccgggcaaaccctgttacatctacgttctgcgaattgcagctgggtttgcgcaggatccaacaaacgacaatgtcaacattttccactctttgtatagctcggagaataattttggattaatgactacgaaacctctcccggccctagcaaagatgaagttctttgtgactttgggactaatcaacgtacacatagaggagactcccatcgtgctgcctaacgggggatccgaaatagaacttgctctactgagacaattccatgttacggtcttccgcgacgtgctaaaactgtggaaggaatttctctgctgcgattacgacaacgaggaaaacagttttctggtggtgcctttgaaaaattctactcacctagactggaaactcatccgagaatttcaaaatttgagcgaaccaccttcggaaatttcaacgatagctcgtaacaagatggaattcgaagccgataagtaccgacacaaggtcattttaccgtggtacaagaacaacaaggaacagccatacgttgtcactatggtgcatgaacatctgactccggagagtcctttcccaaatccggagtacggttcctacgcgaattatttcagccaagcgtaccatttggcagtggttaagccagatcagtttctcattgaagtgaaaggcatcactagttacctcaaccggttgaaccccggagtggaagacgacggaaagagcacccgaagcaaacattggcgttttaacgaaattctgattcccgaactgtgtcacaactaccaattccctgctgactactggttgaaggccaccctcctgcccagtgcacttcatcgattgcactaccttctgttggcggaaaacattcgcgtggatctggcaacgggtgcaaatgttggctgtttggagaatcacacgatcgaagacgtggacgttgagtacaaagagcggaaaggaaagcagttggaggaactacagctgatggaatttgaagaagatgaagacgaagacgacgaatttgatttggaagaagcgaagaggtcattggtggctccagagaatttgagcgagttggcacgaaaccaaatgtgctccattaccggcgatatacctctgccgtggcaggaggacgaggaaccggtggatattgagcgaaactgggatcaagtgtcgaaacttgatctggactactacaatgtctttgtgaataagttttccgatctgtcgatgcgtgaaaaggccgcagagcgtattagtacagcatacacgtcagccgtatatagacgtgctgctggtagtccgaagcgagaacctatggcaatcctggatgtacccgtagaccagaaatttgccattaaactgctccagttgaccccagcaaatacggtcaatgtcaatcttcaacagaagaacataatcaaggcattgacgacgaaatcatcgtccgatgtttttgacctggaacgctacgaattgttgggcgatgcttttttgaagttttccatctctctctaccttgttaaatatcacaaggaatggcacgaaggcttcctcactgcagttaagggccaaattgtaagcaatcgcaacctggtctattgtgcgataaagtacggactacctggaatgctaaaaattcacaaattcgatcccaaaaacgattggcaaccacctctagcaacggttccgaagaatatcaaacgaacgatgcaatctgtgaatcattccgcccgagtgctatatcggttgaccttaacagaggaggaaatcaaaaccggtgtggtgaccgcaaagaacagtgatgattttattgctcagcttgagctgcatggtaacatgcctgatccctcgccaatggcaaattatctctcacagcagaccatgggggacaagacaccggcggatgccatggaagcattgctaggcgtctgtgtgcaatcagttggcatcgagcgttccttcaaactgttgccacattttggaatcctgccgaaaacgcacaatgtcctaagactccttgctgacaagatcgaaaaccaacgactgaaaactcatattgatattcgtgaagtagatgcattcctcaagaactacagaagaattgaaggtattctgggatataagttcaaggatagaacttatctcctacaagcactcacccatgcgtcataccctaccaacagaattacgggaagctaccaacagttggaattcctcggcgatgcggtattagatttcctcatctcgatgtacatctttgagcagaaccctaccatgagtcccgggcagttaacagatctgcgctcggctttggtgaataacgtcactttggcgtgcatacttgttcgccatggtctccacttgtacatcctggcagagtcggcatctttcaccgacacagttagcaagtttgtgttgttccaagaacaacacaaacacgaaattaccgatcaggtgaacttgctcgtcgaagaatcagaccggaagatggccgaattcgtagacgttccgaaggcgctgggcgatgtgttcgagagtctggtggctgcggtctttttggactctggaaacgactttgccgccacctggcaagtcatttacggcatgatgggcaatgaaatattgaccttcaccgagaacacaccgatccagatcgtgcgacagttgtatgagttcaagccgtcgtgcaagccaaccttcagcagggccatcccggacgaggacacggtgcttgttaagctgcggtacgagataaggaaccaacaacacgaagcgtatggttttggtcaaaacaaggacgacgcaaagagggcagcggccaaagcggcactgcaagtgttgcgcaagcactaccgcagtgctaagtaatgtttcgttttgtataattttctttgtactagtgtcgtttacagatgggagttgttgaactgttttcgcatgtgaattaatattaaatggcgataaaatgttttatagaaagcgtttgaacgatttatcgagtattaaatcaaacataattgtatggaggcaatgtcgcaaaatgtcgacatttttcaagtgtttgtaaaactctaatcgtcctacaatactctaatgtaaaaaactgtggaagtgctcatcaaatgtgtactaagtcgtttgagtcgaatcagaacatagttttaataaaattccaatagaaatacctatacaaaaaaaatagaatgaaactccaaatctgactgtttacatgaaaccattgactctcttttgtgatagaagagaattgaagacttggcagtaggttatttcagattggcttccatgctttgttattagcttctaagagggcgggtttggagaagatcattatctaacaatttgaatatcggatcaagccaacggtaaatcgctgtcaaagcaaatacttgtctacgtgtgctggacgtttatgatcttcggaactgcgaatatgcatttaggcaaagtgtgcttaagattgtcaaagaaatgttttccttctcagaaggaaaacatgaacaataataagaaaagctatttgattgaatatatgcacgttttatattacctttaaaaaaaaaaaaaaa

SEQ ID NO: 1223 - DNA, 23 bp, Artificial Sequence
  Single strand DNA oligonucleotide
tgtgtcacaactaccaattccct

SEQ ID NO: 1224 - DNA, 21 bp, Artificial Sequence
  Single strand DNA oligonucleotide
agatccacgcgaatgttttcc

SEQ ID NO: 1225 - DNA, 20 bp, Artificial Sequence
  Single strand DNA oligonucleotide
gcaaactcgcgctaatccag

SEQ ID NO: 1226 - DNA, 20 bp, Artificial Sequence
  Single strand DNA oligonucleotide
ttgttcggtgcgtcttggta

1. A method of enhancing resistance of a mosquito to a pathogen, the method comprising administering to a mosquito an isolated nucleic acid agent comprising a nucleic acid sequence which specifically downregulates an expression of at least one mosquito or pathogen gene wherein a product of said mosquito or pathogen gene participates in infection and/or growth of said pathogen in said mosquito, thereby enhancing resistance of the mosquito to the pathogen.

2. A mosquito comprising an enhanced resistance to a pathogen generated according to the method of claim 1.

3. The method of claim 1, wherein said mosquito comprises a mosquito larva.

4. The method of claim 3, wherein downregulation of said expression of said at least one mosquito gene in said mosquito larva renders an adult stage of said mosquito more resistant to said pathogen.

5. The method of claim 1, wherein said mosquito comprises an adult mosquito.

6. The method of claim 5, wherein said adult mosquito comprises a female mosquito capable of transmitting a disease to a mammalian organism.

7. The method of claim 1, wherein said mosquito is of a species selected from the group consisting of Aedes aegypti, Aedes albopictus and Anopheles gambiae.

8. The method of claim 1, wherein said administering comprises feeding, spraying, soaking or injecting.

9. The method of claim 3, wherein said administering comprises soaking said larva with said isolated nucleic acid agent for about 12-48 hours.

10. The method of claim 9, wherein said larva comprises third instar larva.

11. The method of claim 9, further comprising feeding said larva with said isolated nucleic acid agent until said larva reaches pupa stage.

12. The method of claim 1, wherein said pathogen is selected from the group consisting of a virus, a nematode, a protozoa and a bacteria.

13. The method of claim 12, wherein said virus is an arbovirus.

14. The method of claim 12, wherein said virus is selected from the group consisting of an alphavirus, a flavivirus, a bunyavirus and an orbivirus.

15-16. (canceled)

17. The method of claim 12, wherein said nematode causes Heartworm Disease.

18. The method of claim 12, wherein said protozoa comprises a Plasmodium.

19. The method of claim 12, wherein said protozoa causes Malaria.

20. A mosquito-ingestible compound comprising an isolated nucleic acid agent comprising a nucleic acid sequence which specifically downregulates an expression of at least one mosquito or pathogen gene wherein a product of said gene participates in infection and/or growth of a pathogen in a mosquito and a microorganism, algae or blood on which mosquitoes feed.

21. The mosquito-ingestible compound of claim 20 formulated as a solid formulation.

22. The mosquito-ingestible compound of claim 20 formulated as a liquid formulation.

23. The mosquito-ingestible compound of claim 20 formulated in a semi-solid formulation.

24. The mosquito-ingestible compound of claim 23 wherein said a semi-solid formulation comprises an agarose.

25. The mosquito-ingestible compound of claim 20, wherein said microorganism is selected from the group consisting of a bacteria and a water surface microorganism.

26. (canceled)

27. The method of claim 1, wherein said pathogen gene is selected from the group consisting of a Flock House virus B2 protein (AAEL008297), La Crosse encephalitis virus gene, an Eastern equine encephalitis virus gene, a Japanese encephalitis virus gene, a Western equine encephalitis virus gene, a St. Louis encephalitis virus gene, a Tick-borne encephalitis virus gene, a Ross River virus gene, a Venezuelan equine encephalitis virus gene, a Chikungunya virus gene, a West Nile virus gene, a Dengue virus gene, a Yellow fever virus gene, a Bluetongue disease virus gene, a Sindbis Virus gene, a Rift Valley Fever virus gene, a Colorado tick fever virus gene, a Murray Valley encephalitis virus gene and an Oropouche virus gene.

28. The method of claim 1, wherein said mosquito gene is selected from the group consisting of a Dicer, a C-type lectin, a Trypsin protease, a Serine protease, a Heat shock protein, a galectin, a glycosidases, and a glycosylase.

29. The method of claim 1, wherein said mosquito gene is selected from the group consisting of a Dicer-2, AAEL000563 (GCTL-1), AAEL012095 (26S protease regulatory subunit), AAEL002508 (26S protease regulatory subunit 6a), AAEL010821 (60S acidic ribosomal protein P0), AAEL013583 (60S ribosomal protein L23), AAEL005524 (adenosylhomocysteinase), AAEL011129 (alcohol dehydrogenase), AAEL009948 (aldehyde dehydrogenase), AAEL003345 (argininosuccinate lyase), AAEL006577 (aspartyl-tRn/a synthetase), AAEL012237 (bhlhzip transcription factor max/bigmax), AAEL010782 (carboxypeptidase), AAEL005165 (chaperone protein dnaj), AAEL009285 (dead box atp-dependent ma helicase), AAEL000951 (elongation factor 1-beta2), AAEL012827 (endoplasmin), AAEL011742 (eukaryotic peptide chain release factor subunit), AAEL004500 (eukaryotic translation elongation factor), AAEL009101 (eukaryotic translation initiation factor 3f (eif3f)), AAEL007201 (glutamyl aminopeptidase), AAEL002145 (gonadotropin inducible transcription factor), AAEL010012 (gtp-binding protein sari), AAEL011708 (heat shock protein), AAEL014843 (heat shock protein), AAEL014845 (heat shock protein), AAEL012680 (Juvenile hormone-inducible protein, putative), AAEL003415 (lamin), AAEL009766 (lipoamide acyltransferase component of branched-chain alpha-keto acid dehydrogenase), AAEL005790 (malic enzyme), AAEL014012 (membrane-associated guanylate kinase (maguk)), AAEL010066 (microfibril-associated protein), AAEL003739 (M-type 9 protein, putative), AAEL003676 (myosin I homologue, putative), AAEL002572 (myosin regulatory light chain 2 (mlc-2)), AAEL009357 (myosin v), AAEL005567 (nucleosome assembly protein), AAEL010360 (nucleotide binding protein 2 (nbp 2)), AAEL012556 (Ofdl protein, putative), AAEL004783 (ornithine decarboxylase antizyme), AAEL010975 (paramyosin, long form), AAEL004484 (predicted protein), AAEL014396 (protein farnesyltransferase alpha subunit), AAEL012686 (ribosomal protein S12, putative), AAEL013933 (serine protease inhibitor, serpin), AAEL005037 (seryl-tRn/a synthetase), AAEL009614 (seven in absentia, putative), AAEL010585 (spermatogenesis associated factor), AAEL012348 (splicing factor 3a), AAEL011137 (succinyl-coa:3-ketoacid-coenzyme a transferase), AAEL002565 (titin), AAEL003104 (tripartite motif protein trim2,3), AAEL011988 (tRNA selenocysteine associated protein (secp43)), AAEL006572 (troponin C), AAEL003815 (zinc finger protein) and AAEL009182 (zinc finger protein, putative).

30-31. (canceled)

32. An isolated nucleic acid agent comprising a polynucleotide expressing a nucleic acid sequence which specifically downregulates an expression of at least one mosquito gene selected from the group consisting of Dicer-2, AAEL000563 (GCTL-1), AAEL012095 (26S protease regulatory subunit), AAEL002508 (26S protease regulatory subunit 6a), AAEL010821 (60S acidic ribosomal protein P0), AAEL013583 (60S ribosomal protein L23), AAEL005524 (adenosylhomocysteinase), AAEL011129 (alcohol dehydrogenase), AAEL009948 (aldehyde dehydrogenase), AAEL003345 (argininosuccinate lyase), AAEL006577 (aspartyl-tRn/a synthetase), AAEL012237 (bhlhzip transcription factor max/bigmax), AAEL010782 (carboxypeptidase), AAEL005165 (chaperone protein dnaj), AAEL009285 (dead box atp-dependent rna helicase), AAEL000951 (elongation factor 1-beta2), AAEL012827 (endoplasmin), AAEL011742 (eukaryotic peptide chain release factor subunit), AAEL004500 (eukaryotic translation elongation factor), AAEL009101 (eukaryotic translation initiation factor 3f (eif3f)), AAEL007201 (glutamyl aminopeptidase), AAEL002145 (gonadotropin inducible transcription factor), AAEL010012 (gtp-binding protein sari), AAEL011708 (heat shock protein), AAEL014843 (heat shock protein), AAEL014845 (heat shock protein), AAEL012680 (Juvenile hormone-inducible protein, putative), AAEL003415 (lamin), AAEL009766 (lipoamide acyltransferase component of branched-chain alpha-keto acid dehydrogenase), AAEL005790 (malic enzyme), AAEL014012 (membrane-associated guanylate kinase (maguk)), AAEL010066 (microfibril-associated protein), AAEL003739 (M-type 9 protein, putative), AAEL003676 (myosin I homologue, putative), AAEL002572 (myosin regulatory light chain 2 (mlc-2)), AAEL009357 (myosin v), AAEL005567 (nucleosome assembly protein), AAEL010360 (nucleotide binding protein 2 (nbp 2)), AAEL012556 (Ofd1 protein, putative), AAEL004783 (ornithine decarboxylase antizyme), AAEL010975 (paramyosin, long form), AAEL004484 (predicted protein), AAEL014396 (protein farnesyltransferase alpha subunit), AAEL012686 (ribosomal protein S12, putative), AAEL013933 (serine protease inhibitor, serpin), AAEL005037 (seryl-tRn/a synthetase), AAEL009614 (seven in absentia, putative), AAEL010585 (spermatogenesis associated factor), AAEL012348 (splicing factor 3a), AAEL011137 (succinyl-coa:3-ketoacid-coenzyme a transferase), AAEL002565 (titin), AAEL003104 (tripartite motif protein trim2,3), AAEL011988 (tRNA selenocysteine associated protein (secp43)), AAEL006572 (troponin C), AAEL003815 (zinc finger protein) and AAEL009182 (zinc finger protein, putative).

33-36. (canceled)

37. A nucleic acid construct comprising a nucleic acid sequence encoding the isolated nucleic acid agent of claim 32.

38. A cell comprising the isolated nucleic acid agent of claim 32.

39. The cell of claim 38 selected from the group consisting of a bacterial cell and a cell of a water surface microorganism.

40. A mosquito-ingestible compound comprising the cell of claim 38.

41. The cell of claim 38, wherein said nucleic acid agent is a dsRNA.

42. The cell of claim 41, wherein said dsRNA comprises a carrier.

43. The cell of claim 42, wherein said carrier comprises a polyethyleneimine (PEI).

44. The cell of claim 41, wherein said dsRNA is effected at a dose of 0.001-1 μg/μL for soaking or at a dose of 1 pg to 10 μg/larvae for feeding.

45. The cell of claim 41, wherein said dsRNA is selected from the group consisting of SEQ ID NOs: 1211-1220.

46-50. (canceled)

51. The method of claim 1, wherein said isolated nucleic acid agent is comprised in a cell.

52. The mosquito-ingestible compound of claim 20, wherein said isolated nucleic acid agent is comprised in a cell.

53. The method of claim 51, wherein said cell is selected from the group consisting of a bacterial cell and a cell of a water surface microorganism.

54. The mosquito-ingestible compound of claim 52, wherein said cell is selected from the group consisting of a bacterial cell and a cell of a water surface microorganism.
